United States Patent Application Publication US 2024/0309320 A1 - sequence listing, part 2

SEQ ID NO: 748 - DNA, 6281 bp, Homo sapiens
  source 1..6281: mol_type = genomic DNA
accgccaccatggcttcccctctgagggacgaggaggaggaggaggaggagatggtggtgtcggaggaggaagaagaggaggaagaagagggcgacgaggaggaggaggaggaggtggaggcggccgacgaggacgatgaggaggacgacgacgagggagtactcgggcgcgggccgggccacgaccggggccgcgaccgccacagcccccccggctgccacctcttcccgccgccgccgccgccgccgccaccgctgcccccgccgccgccgcccccgccgccagataaggatgacattcggctgctgccgtcagcattgggtgtgaagaagagaaaacgaggacccaagaagcagaaggagaacaagccaggaaaaccccgaaaacgcaagaagcgtgacagtgaggaggaatttggttctgagcgagatgagtaccgggagaagtcagagagtgggggcagtgaatatggaaccggaccgggtcggaaacgaagaaggaagcaccgagaaaaaaaggagaagaagacaaagcggcggaaaaagggggagggagatggggggcaaaagcaagtggaacagaagtcatcagcaactctgcttctgacctggggcctggaggatgtggagcatgtgttctctgaggaggattaccacacgctcaccaactacaaagccttcagccagttcatgaggcccctaattgctaagaagaatcctaagatcccaatgtctaagatgatgaccatccttggggccaaatggagagagttcagtgccaacaaccccttcaaggggtcagcagctgctgtggcggcggcagcggcagcagcagcagcagctgtagctgagcaggtgtcagctgctgtctcgtcggccacccccatagcaccctccggaccccccgcccttccaccaccccctgctgctgatatccagcccccacccatccgaagagccaaaaccaaagagggcaaaggtccaggccataagaggcggagtaagagcccccgagtgcctgatggacgcaagaagcttcggggaaagaaaatggcaccactcaaaataaaactagggcttctgggtggcaagaggaagaaaggaggctcgtatgtttttcagagcgacgaaggtcctgaaccagaggctgaggaatcagacctggacagtggcagtgtccacagtgcctcaggccggcctgatggccctgtccgcaccaagaaactaaagagaggccggccaggaaggaagaagaagaaggtcctgggctgtcctgcagtggccggggaggaggaggttgatggctacgagacggatcaccaggattactgtgaggtgtgccagcagggtggggaaattattctgtgtgacacctgccctcgtgcctaccacctcgtctgccttgatcctgagcttgaccgggctccagagggcaaatggagctgccctcactgtgagaaggagggggtccagtgggaggccaaggaggaagaagaagaatacgaagaggagggagaggaagaaggggagaaggaggaggaggatgatcacatggagtactgccgcgtatgcaaggacggcggggagctcctgtgctgtgacgcgtgcatctcctcctaccacattcattgtctaaaccctcccctgcctgacattcccaatggtgaatggctgtgtccccgatgcacatgccccgtgctgaagggtcgagtgcagaagatcctacattggcggtggggggagccacctgtagcagtgccagcccctcaacaggcagatggaaatccagatgtcccacccccccgtcctcttcaaggcagatcagagcgagagttctttgtcaagtgggtaggactatcctactggcactgctcctgggccaaggagcttcagctggaaatcttccatttggttatgtatcgaaactaccagcggaagaatgacatggatgagcccccacccctggactatggctccggcgaggatgatgggaagagcgacaagcgtaaagtgaaagacccgcactatgctgagatggaggagaagtactatcgttttggcatcaagccagagtggatgaccgtccaccgcatcatcaaccacagtgtggataaaaaggggaattaccactatctagtaaaatggagggacttaccatatgaccagtccacgtgggaggaagatgaaatgaatatccctgaatacgaagaacataagcaaagctactggagacaccgagaactaattatgggggaagaccctgcccagccccgcaagtataagaagaagaagaaggagctacagggtgatgggcctcccagttctcccactaatgatcctaccgtgaaatatgagactcagccacggtttatcacagccactggaggcaccctgcacatgtatcagttggaagggctgaactggctacgcttctcctgggcccagggcactgacaccattctagctgatgagatggggctaggcaagaccatacaaaccatcgtcttcctctactcactctacaaggagggccacacaaaaggtcccttcctggtgagtgccccactctctaccatcattaactgggagcgggagttccagatgtgggcacccaaattctatgtggtgacatacacgggtgacaaggacagccgggccatcattcgtgagaatgaattctcctttgaggacaatgccatcaaagggggcaagaaagcttttaagatgaagagggaggcacaggtgaagttccatgttctcctgacatcgtatgagctgatcaccattgatcaggcagcacttggttccatccgctgggcctgtcttgtggtagatgaggcccatcgactcaagaacaaccagtccaagtttttcagggttctcaatggttacaagatagatcataagttgctgctgacaggaaccccattgcagaataatctggaggagctcttccatctcctgaacttcctcaccccagagagatttaacaacttggagggcttcctggaggagtttgctgacatatccaaagaggaccagatcaagaaactgcatgatttgctggggccacacatgctgcggagactcaaggcagatgtctttaagaacatgccagccaagacagagctcatcgttcgggtggagctaagccccatgcagaagaaatactacaaatacatcctgactcgaaattttgaggccttgaattcacgaggtggtgggaaccaggtgtcgctgcttaatatcatgatggatcttaagaagtgctgcaaccatccatacctttttcccgtggctgctatggagtcccccaaactccccagtggggcttatgagggtggggcacttattaagtcgtctgggaagctcatgctgctccagaagatgctgcgaaagctgaaggagcaaggacaccgagtgctcatcttctcgcagatgaccaaaatgttagacttgcttgaggacttcttagactatgaaggctacaagtatgagcgcatcgatggtggtatcacgggtgccctgaggcaggaggccatcgatcggtttaatgctcctggggcccaacaattctgcttcctcctgtccacccgagctgggggcctgggcatcaatctggccactgctgacactgtcatcatctttgattctgactggaacccccataatgacatccaggcctttagccgggctcatcggattggccaggccaacaaagtgatgatttaccggtttgtgactcgcgcgtcagtggaagagcgaatcacacaagtggccaagagaaagatgatgctgacacacctggttgtgcggcctgggctgggctccaaggcaggctccatgtccaagcaggagcttgacgacattctcaaatttggcactgaagagctattcaaggatgaaaacgagggggagaacaaggaggaggacagcagtgtgattcattatgacaatgaggccatcgctcggctgttggaccggaaccaggatgcaactgaggacactgacgtgcagaacatgaatgagtatctcagctccttcaaggtggcacagtacgtcgtgcgggaagaagacaagattgaggaaattgagcgagagatcatcaagcaggaggagaatgtggaccctgactactgggagaagctgctgaggcatcactatgagcaacagcaggaagacctagcccggaatctaggcaagggcaagcgggttcgcaagcaagttaactacaatgatgctgctcaggaagaccaagacaaccagtcagagtactcggtgggttcagaggaggaggatgaagacttcgatgaacgtcctgaagggcgtagacagtcaaagaggcagctccggaatgagaaagataagccactgcctccactgctggcccgagtcgggggcaacattgaggtgctgggcttcaacacccgtcagcggaaggctttcctcaatgctgtgatgcgctgggggatgccaccacaggatgccttcaccacacagtggctggtgcgggacctgaggggcaagactgagaaggagtttaaggcctatgtgtctttgttcatgcgccatctgtgtgagcctggggcagacggctctgaaacctttgccgatggggtccctcgggagggactgagtcgccagcaggtgttgacccgcattggagtcatgtctctcgtcaaaaagaaggtgcaggagtttgagcacatcaatgggcgttggtcaatgccggaactgatgcctgaccccagcgccgattctaagcgctcctccagagcctcctctcctaccaaaacgtctcccaccactcctgaggcttctgctaccaacagtccctgcacctctaaacctgctactccagctccaagtgagaaaggagaaggcataaggacacctcttgagaaggaggaagctgaaaaccaggaggaaaagccagagaagaacagcagaattggggagaagatggagacagaggctgatgcccccagcccagccccatcacttggggagcggctggagccaaggaagattcctctagaggatgaggtgccaggggtgcctggagagatggagcctgaacctgggtaccgtggggacagagagaagtcagccacagagtcgacgccaggagaaaggggggaggagaagccgttggatggacaggaacacagggagaggccggagggggaaacaggggatttgggcaagagagaagatgtaaaaggtgaccgggagcttcgaccagggcctcgagatgagccacggtccaatgggcgacgagaggaaaagacagagaagccccggttcatgttcaatatcgccgatggtggcttcacagagcttcacacactgtggcagaatgaggaacgggcagctatttcctcggggaaactcaatgagatctggcacagaagacatgactattggcttctggctgggattgtcctccatggctatgcacggtggcaggacatccagaatgatgctcaatttgccattatcaacgagccatttaaaactgaagccaataaggggaactttctggagatgaaaaataagttcctggcccggaggttcaagctcctggagcaggcgctggtgattgaggagcagctgcggcgggcggcctacctgaacctgtcgcaggagccggcgcaccccgccatggccctccacgcccgcttcgccgaggccgagtgcctggccgagagccaccagcacctctccaaggagtcgctggcggggaacaagccggccaacgccgtcctgcacaaggttctgaaccagctggaggagttgctgagcgacatgaaggcggacgtgacccgcctgccagccacgctgtcccgaataccccccatcgcagcccgccttcagatgtccgagcgcagcatcctcagccggctggccagcaagggcacggagcctcaccccacaccggcctacccgccgggtccctacgctacacctccggggtacggggcggccttcagcgccgcacccgtaggggccctggccgccgcaggcgccaattacagccagatgcctgcagggtccttcatcacagccgccaccaacggccctccagtgcttgtgaagaaggagaaggaaatggtgggggcattggtgtcagacgggctggatcggaaggagccccgagccggggaggtgatctgtatagacgactagtaatgaactagtccgtaacttgaaagtatttcgatttcttggctttatatatcttgtggaaaggacgatagactgtggctgggaatcggtcc

SEQ ID NO: 749 - DNA, 5966 bp, Homo sapiens
  source 1..5966: mol_type = genomic DNA
accgccaccatgcggggcccagtgggcaccgaggaggagctgccgcggctgttcgccgaggagatggagaatgaggacgagatgtcagaagaagaagatggtggtcttgaagccttcgatgactttttccctgtggagcccgtgagccttcctaagaagaagaaacccaagaagctcaaggaaaacaagtgtaaagggaagcggaagaagaaagaggggagcaatgatgagctatcagagaatgaagaggatctggaagagaagtcggagagtgaaggcagtgactactccccgaataaaaagaagaagaagaaactcaaggacaagaaggagaaaaaagccaagcgaaaaaagaaggatgaggatgaggatgataatgatgatggatgcttaaaggagcccaagtcctcggggcagctcatggccgagtggggcctggacgacgtggactacctgttctcggaggaggattaccacacgctgaccaactacaaggccttcagccagttcctcaggccactcattgccaagaagaacccgaagatccccatgtccaaaatgatgaccgtcctgggtgccaagtggcgggagttcagcgccaacaaccccttcaagggcagctccgcggcagcagcggcggcggcggtggctgcggctgtagagacggtcaccatctcccctccgctagccgtcagccccccgcaggtgccccagcctgtgcctatccgcaaggccaagaccaaggagggcaaagggcctggagtgaggaagaagatcaaaggctccaaagatgggaagaaaaagggcaaagggaaaaagacggccgggctcaagttccgcttcggggggatcagcaacaagaggaagaaaggctcctcgagtgaagaagatgagagggaggagtcggacttcgacagcgccagcatccacagtgcctccgtgcgctccgaatgctctgcagccctgggcaagaagagcaagaggaggcgcaagaagaagaggattgatgatggtgacggctatgagacagaccaccaggattactgtgaggtgtgccagcagggtggggagatcatcctgtgcgacacctgcccgagggcctaccatctcgtatgcctggacccagagctggagaaggctcccgagggcaagtggagctgcccccactgtgagaaggaggggatccagtgggagccgaaggacgacgacgatgaagaggaggagggcggctgcgaggaggaggaggacgaccacatggagttctgccgcgtgtgcaaggacgggggcgagctgctctgctgcgacgcctgcccctcctcctaccacctgcattgcctcaacccgccgctgcccgagatcccaaacggtgaatggctctgcccgcgctgtacttgccccccactgaagggcaaagtccagcggattctacactggaggtggacggagccccctgcccccttcatggtggggctgccggggcctgacgtggagcccagcctccctccacctaagcccctggagggcatccctgagagagagttctttgtcaagtgggcagggctgtcctactggcattgctcctgggtgaaggagctacagctggagctgtaccacacggtgatgtatcgcaactaccaaagaaagaacgacatggatgagccgcccccctttgactacggctctggggatgaagacggcaagagcgagaagaggaagaacaaggaccccctctatgccaagatggaggagcgcttctaccgctatggcatcaagccagagtggatgatgattcaccgaatcctgaaccatagctttgacaagaagggggatgtgcactacctgatcaagtggaaagacctgccctacgaccagtgcacctgggagatcgatgacatcgacatcccctactacgacaacctcaagcaggcctactggggccacagggagctgatgctgggagaagacaccaggctgcccaagaggctgctcaagaagggcaagaagctgagggacgacaagcaggagaagccgccggacacgcccattgtggaccccacggtcaagttcgacaagcagccatggtacatcgactccacaggcggcacactgcacccgtaccagctggagggcctcaactggctgcgcttctcttgggcccagggcactgacaccatcctggccgatgagatgggtctgggcaagacggtgcagaccatcgtgttcctttactccctctacaaggagggccactccaaagggccctacctggttagcgcgcccctctccaccatcatcaactgggaacgcgagtttgagatgtgggcgcccgacttctacgtggtcacctacacgggggacaaggagagccgctcggtgattcgggagaacgagttttcctttgaggacaacgccattcggagtgggaagaaggtattccgtatgaagaaagaagtgcagatcaaattccacgtgctgctcacctcctatgagctcatcaccattgaccaggccatcctgggctccatcgagtgggcctgcctggtggtagatgaggcccaccgcctcaagaacaaccagtccaagttttttagggtcttaaacagctacaagattgattacaagctgctgctgacagggaccccccttcagaacaacctggaggagctgttccatctcctcaacttcctgactccagagaggttcaacaacctggagggcttcctggaggagtttgctgacatctccaaggaagaccagatcaagaagctgcatgacctgctggggccgcacatgctcaggcggctcaaggctgacgtgttcaagaacatgccggccaagaccgagctcattgtccgggtggagctgagccagatgcagaagaagtactacaagttcatcctcacacggaactttgaggcactgaactccaaggggggcgggaaccaagtatcgctgctcaacatcatgatggacctgaaaaagtgctgcaaccacccctacctcttccctgtggctgccgtggaggcccctgtcttgcccaatggctcctacgatggaagctccctggtcaagtcttcagggaagctcatgctgctacagaagatgctgaagaaactgcgggatgaggggcaccgtgtgctcatcttctcccagatgaccaagatgctggacctcctggaggacttcctggagtacgaaggctacaagtatgagcggattgatggtggcatcaccgggggcctccggcaggaggcaatcgacagattcaatgcccccggggcccagcagttctgcttcctcctctcaacccgggcaggtggtctgggcatcaacctggccacggcggacactgtcatcatctacgactcggactggaacccgcacaatgacatccaggccttcagccgcgcccaccgcatcggccagaacaagaaggtgatgatctaccgcttcgtgactcgggcctcggtggaggagcgcatcacgcaggtggccaagcgcaagatgatgctcacccacctggtggtgcggcccggcctcggctccaagtcggggtccatgaccaagcaggagctggacgacatcctcaagttcggcacggaggaactcttcaaggacgacgtggagggcatgatgtctcagggccagaggccggtcacacccatccctgatgtccagtcctccaaaggggggaacttggccgccagtgcaaagaagaagcacggtagcaccccgccaggtgacaacaaggacgtggaggacagcagtgtgatccactatgacgatgcggccatctccaagctgctggaccggaaccaggacgctacagatgacacggagctacagaacatgaacgagtacctgagctccttcaaggtggcgcagtacgtggtgcgcgaggaggacggcgtggaggaggtggagcgggaaatcatcaagcaggaggagaacgtggaccccgactactgggagaagctgctgcggcaccactatgagcagcagcaggaggacctggcccgcaacctgggcaagggcaagcgcatccgcaagcaggtcaactacaacgatgcctcccaggaggaccaggagtggcaggatgagctctctgataaccagtcagaatattccattggctctgaggatgaggatgaggactttgaagagaggccggaagggcagagtggacgacgacaatcccggaggcagctgaagagtgacagggacaagcccctgcccccgcttctcgcccgagttggtggcaacatcgaggtgctgggcttcaatgcccgacagcggaaggcctttctgaacgccatcatgcgctggggcatgcccccgcaggacgccttcaactcccactggctggtgcgggaccttcgagggaagagcgagaaggagtttagagcctatgtgtccctcttcatgcggcacctgtgtgagccgggggcggatggtgcagagaccttcgcagacggcgtgccccgggagggcctctccaggcagcacgtgctgacccgcatcggggtcatgtcactagttaggaagaaggttcaggagtttgagcatgtcaacgggaagtacagcaccccagacttgatccctgaggggcccgaggggaagaagtcgggcgaggtgatctcctcggaccccaacacaccagtgcccgccagccctgcccacctcctgccagccccgctgggcctgccagacaaaatggaagcccagctgggctacatggatgagaaagaccccggggcacagaagccaaggcagcccctggaagtccaggcccttccagccgccttggatagagtggagagtgaggacaagcacgagagcccagccagcaaggagagagcccgagaggagcggccagaggagacggagaaggccccgccctccccggagcagctgccgagagaggaggtgcttcctgagaaggagaagatcctggacaagctggagctgagcttgatccacagcagaggggacagttccgaactcaggccagatgacaccaaggctgaggagaaggagcccattgaaacacagcaaaatggtgacaaagaggaagatgacgaggggaagaaggaggacaagaaggggaaattcaagttcatgttcaacatcgcggacgggggcttcacggagttgcacacgctgtggcagaacgaggagcgggctgctgtatcctctgggaaaatctacgacatctggcaccggcgccatgactactggctgctggcgggcatcgtgacgcacggctacgcccgctggcaggacatccagaatgacccacggtacatgatcctcaacgagcccttcaagtctgaggtccacaagggcaactacctggagatgaagaacaagttcctggcccgcaggtttaagctgctggagcaggcgttggtcattgaggagcagctccggagggccgcgtacctgaacatgacgcaggaccccaaccaccccgccatggccctcaacgcccgcctggctgaagtggagtgcctcgccgagagccaccagcacctgtccaaggagtcccttgctgggaacaagcctgccaatgccgtcctgcacaaggtcctgaaccagctggaggagctgctgagcgacatgaaggccgacgtgacccggctgccatccatgctgtcccgcatccccccggtggccgcccggctgcagatgtcggagcgcagcatcctgagccgcctgaccaaccgcgccggggaccccaccatccagcagggcgctttcggctcctcccagatgtacagcaacaactttgggcccaacttccggggccctggaccgggagggattgtcaactacaaccagatgcccctggggccctatgtgaccgatatctagtaatgaactagtccgtaacttgaaagtatttcgatttcttggctttatatatcttgtggaaaggacgaggtattaatttggttgcacatcaa

SEQ ID NO: 750 - DNA, 2948 bp, Homo sapiens
  source 1..2948: mol_type = genomic DNA
accgccaccatggcagatccaggaatgatgagtctttttggcgaggatgggaatattttcagtgaaggtcttgaaggcctcggagaatgtggttacccggaaaatccagtaaatcctatgggtcagcaaatgccaatagaccaaggctttgcctctttacagccatcccttcatcatccttcaactaatcaaaatcaaacaaagctgacacattttgatcactataatcagtatgaacaacaaaagatgcatctgatggatcagccgaacagaatgatgagcaacacccctgggaacggactcgcgtctccgcactcgcagtatcacacccctcccgttcctcaggtgccccatggtggcagtggtggcggtcagatgggtgtctaccctggcatgcagaatgagaggcatgggcaatcctttgtggacagcagctccatgtggggccccagggctgttcaggtaccagaccagatacgagccccctaccagcagcagcagccacagccgcagccaccgcagccggctccgtcggggccccctgcacagggccaccctcagcacatgcagcagatgggcagctatatggcacgtggggatttttccatgcagcagcatggtcagccacagcagaggatgagccagttttcccaaggccaagagggcctcaatcagggaaatccttttattgccacctcaggacctggccacttgtcccacgtgccccagcagagtcccagcatggcaccttccttgcgtcactcggtgcagcagttccatcaccacccctctactgctctccatggagaatccgttgcccacagtcccagattctccccgaatcctccccaacaaggggctgttaggccgcaaacccttaactttagttctcggagccagacagtcccctctcctactataaacaactcagggcagtattctcgatatccttacagtaacctaaatcagggattagttaacaatacagggatgaatcaaaatttaggccttacaaataatactccaatgaatcagtccgtaccaagataccccaatgctgtaggattcccatcaaacagtggtcaaggactaatgcaccagcagcccatccaccccagtggctcacttaaccaaatgaacacacaaactatgcatccttcacagcctcagggaacttatgcctctccacctcccatgtcacccatgaaagcaatgagtaatccagcaggcactcctcctccacaagtcaggccgggaagtgctgggataccaatggaagttggcagttatccaaatatgccccatcctcagccatctcaccagccccctggtgccatgggaatcggacagaggaatatgggccccagaaacatgcagcagtctcgtccatttataggcatgtcctcggcaccaagggaattgactgggcacatgaggccaaatggttgtcctggtgttggccttggagacccacaagcaatccaggaacgactgatacctggccaacaacatcctggtcaacagccatcttttcagcagttgccaacctgtcctccactgcagcctcacccgggcttgcaccaccagtcttcacctccacaccctcatcaccagccttgggcacagctccacccatcaccccagaacaccccgcagaaagtgcctgtgcatcagcattccccgtcggagccctttctagagaaaccagtgccggatatgactcagaaaccgaaacagaaacgacatagatgtcgaaaccctaataaattggatataaacactttgacaggagaagaaagggtgcctgttgtcaataaacgaaatgggaagaagatgggtggagctatggcgcctccaatgaaggatctacccaggtggctggaagaaaatcctgaatttgcagttgctccagactggactgatatagttaagcagtctggttttgttcctgagtcgatgtttgaccgccttctcactgggcctgtagtgcggggagagggagcgagcagaagaggaagaaggcccaaaagtgagatcgccagagcagccgcggccgccgctgctgtggcctccacgtcagggatcaaccctttgctggtgaacagcctgtttgctggaatggacctgacgagccttcagaatctccagaatctccagtcgctccagctggcaggcctcatgggcttccctccaggactggcaacagctgccaccgccggaggcgatgcgaagaaccctgctgctgtgctgcccctgatgctgccaggaatggcgggcctgcccaacgtgtttggcttgggcgggctgttgaataaccctctgtcagctgctactggaaacaccactactgcttctagtcaaggagaaccggaagacagcacttcaaaaggagaggagaaaggaaatgagaatgaagacgagaacaaagactctgagaaaagcacagatgctgtttcggctgctgactctgcgaatggatctgttggtgctgctactgccccggctggattgccctcaaacccgctagccttcaaccctttcctcctgtccacaatggccccgggcctcttctacccatccatgtttctacctccaggactggggggattgacgctgcctgggttcccagcattggcaggacttcagaatgccgtgggctccagcgaagaaaaggctgctgacaaggctgagggaggaccctttaaagatggagagacccttgaaggcagcgatgccgaggagagcctggataagactgcagagtcctccctcttagaagacgaaatagcacagggtgaagagctagactcacttgatgggggggatgaaatagaaaacaatgaaaatgatgaatagtaatgaactagtccgtaacttgaaagtatttcgatttcttggctttatatatcttgtggaaaggacgacagataggtaagtgtcactgatta

SEQ ID NO: 751 - DNA, 9095 bp, Homo sapiens
  source 1..9095: mol_type = genomic DNA
accgccaccatggcagatccaggaatgatgagtctttttggcgaggatgggaatattttcagtgaaggtcttgaaggcctcggagaatgtggttacccggaaaatccagtaaatcctatgggtcagcaaatgccaatagaccaaggctttgcctctttacagccatcccttcatcatccttcaactaatcaaaatcaaacaaagctgacacattttgatcactataatcagtatgaacaacaaaagatgcatctgatggatcagccgaacagaatgatgagcaacacccctgggaacggactcgcgtctccgcactcgcagtatcacacccctcccgttcctcaggtgccccatggtggcagtggtggcggtcagatgggtgtctaccctggcatgcagaatgagaggcatgggcaatcctttgtggacagcagctccatgtggggccccagggctgttcaggtaccagaccagatacgagccccctaccagcagcagcagccacagccgcagccaccgcagccggctccgtcggggccccctgcacagggccaccctcagcacatgcagcagatgggcagctatatggcacgtggggatttttccatgcagcagcatggtcagccacagcagaggatgagccagttttcccaaggccaagagggcctcaatcagggaaatccttttattgccacctcaggacctggccacttgtcccacgtgccccagcagagtcccagcatggcaccttccttgcgtcactcggtgcagcagttccatcaccacccctctactgctctccatggagaatccgttgcccacagtcccagattctccccgaatcctccccaacaaggggctgttaggccgcaaacccttaactttagttctcggagccagacagtcccctctcctactataaacaactcagggcagtattctcgatatccttacagtaacctaaatcagggattagttaacaatacagggatgaatcaaaatttaggccttacaaataatactccaatgaatcagtccgtaccaagataccccaatgctgtaggattcccatcaaacagtggtcaaggactaatgcaccagcagcccatccaccccagtggctcacttaaccaaatgaacacacaaactatgcatccttcacagcctcagggaacttatgcctctccacctcccatgtcacccatgaaagcaatgagtaatccagcaggcactcctcctccacaagtcaggccgggaagtgctgggataccaatggaagttggcagttatccaaatatgccccatcctcagccatctcaccagccccctggtgccatgggaatcggacagaggaatatgggccccagaaacatgcagcagtctcgtccatttataggcatgtcctcggcaccaagggaattgactgggcacatgaggccaaatggttgtcctggtgttggccttggagacccacaagcaatccaggaacgactgatacctggccaacaacatcctggtcaacagccatcttttcagcagttgccaacctgtcctccactgcagcctcacccgggcttgcaccaccagtcttcacctccacaccctcatcaccagccttgggcacagctccacccatcaccccagaacaccccgcagaaagtgcctgtgcatcagcattccccgtcggagccctttctagagaaaccagtgccggatatgactcaggttagtggaccgaatgctcagctagtgaagagtgatgattacctgccatcaatagaacagcagccacaacaaaagaagaagaaaaagaaaaacaaccacattgtagcagaggatcccagtaaaggttttggtaaagatgacttccctggtggggtagataaccaagaactaaataggaactcactggatgggtcccaagaagaaaaaaagaaaaagaaaaggtcaaaggcaaaaaaagacccgaaggaaccgaaagaacccaaggagaaaaaagagcccaaggaacccaagaccccgaaagcccctaagattcccaaagagccaaaggaaaagaaagcaaaaactgccacgccaaaacccaaatccagcaaaaagtcaagtaataagaaacctgactcagaagcaagtgctttgaagaaaaaggtcaacaagggaaaaacagaaggttctgaaaattcagacttagacaaaacacccccaccatctcctcctcctgaagaagatgaggacccaggtgttcagaagagacggtccagcagacaggtgaagagaaagcgctacactgaagacctggagttcaagatttctgatgaggaggcagatgatgcagatgctgctgggagggattccccctccaacacctcccagtcagaacagcaggaatctgttgatgcagaaggcccagtggtagaaaaaattatgagcagtcgttcagtaaaaaagcagaaggaatctggagaggaggtagaaattgaggaattctatgtgaaatacaaaaacttctcttatcttcattgtcagtgggcatctatagaagatctggaaaaagataagagaattcagcaaaaaattaaacgatttaaggcaaagcagggccagaacaagttcctttcagagattgaggatgagctttttaatccagattatgtggaggttgaccggataatggactttgcacgtagcacagatgaccggggagagcctgtgactcactatctggtgaagtggtgttcacttccttatgaagacagcacgtgggagcggaggcaggacatagatcaagcaaagatcgaggagtttgagaaactaatgtccagggagccggaaacagagcgtgtggagcgacctcctgctgatgattggaagaaatcggagagttccagggagtataaaaacaataacaaactcagggaataccagttggagggagtaaactggctacttttcaattggtacaacatgcgaaactgcattttagcagatgaaatgggtttgggaaaaactatccagtccattacatttctctatgagatatatttgaaaggaatccatggcccttttttagtaattgccccattgtccacaatccccaactgggaaagggaattccgaacctggacagagttgaacgtggttgtgtatcatgggagtcaagctagtcgtcggaccattcagttgtatgaaatgtacttcaaagatccccagggtcgagtgataaaggggtcctataagtttcatgccatcatcactacatttgagatgattttgactgattgtcctgagctgcggaatattccatggcgctgtgtagtcattgatgaagcccacaggctgaagaacaggaactgcaagctgttggagggactcaagatgatggacttggaacacaaagtgctgctgacgggaaccccactccagaacactgtggaagaactcttcagcttgcttcatttcttggaaccaagtcgcttcccttcagaaaccacatttatgcaagaatttggtgatctaaaaacagaagagcaggtgcaaaaacttcaagctattctaaagccaatgatgttgagacgtctcaaagaggatgtagaaaagaacttggcccccaaagaagaaactattattgaagttgagctaacaaacattcagaagaaatattaccgagccatccttgagaagaatttcacatttctttccaaaggcggtggtcaagctaacgtacctaacctattaaacactatgatggaattgcggaagtgctgcaatcatccgtaccttatcaatggtgctgaagagaaaattttggaagagtttaaagaaacacacaatgcagagtctccagattttcagctccaggcaatgatccaggctgctggcaagctagtgctgattgacaagctgctgccaaaactgaaggctggtggccacagggtgcttatcttttcccagatggtgcgctgcttggacatactggaagactacctcattcaaagacggtacccatatgaaaggatcgacggccgagtaagaggcaacctccgccaggcagctatcgacagattctccaaacctgattctgataggtttgttttcctcctgtgtacaagggcaggaggtttaggcattaacctcactgctgctgatacctgcatcatctttgattcagactggaatccccaaaatgacctccaggctcaggctagatgtcatagaataggacagagcaaatctgtgaaaatctacaggctgattacaagaaattcctatgaaagggaaatgttcgacaaggctagtttgaaactgggcctggataaagctgtgctacagtctatgagtggaagagaaaatgctaccaatggggtacaacagctttccaagaaagaaatagaggatcttctacgaaaaggggcctatggtgcactcatggatgaggaggatgaagggtctaaattctgtgaagaagatattgatcagatcctcctacgtcgaacccacaccattaccattgagtcagaagggaaaggttccacatttgctaaggccagttttgttgcatctggaaataggacagatatttccttggatgatccaaatttctggcaaaagtgggctaagaaggctgaattggatattgatgccttaaatgggaggaacaacctggttattgatactccaagagtgagaaagcagaccaggctctacagtgcagtgaaggaagatgagctgatggagttctcagacttggaaagtgattctgaagaaaagccctgtgcaaagccacggcgtccccaggataagtcacagggctatgcaaggagtgaatgtttcagggtggagaagaatctgcttgtctatggttggggacggtggacagacattctttcccacggacgctataaacgccaactcactgagcaagatgtagaaaccatctgcagaaccatcctggtgtactgtcttaatcattacaaaggggatgagaatatcaaaagcttcatctgggatctgatcacacccacagcggatggccagactcgagccttggtcaaccattccggtttgtcagctcctgtgccaaggggaaggaagggaaagaaggtgaaagcccagagcacacagccggtggtgcaggatgccgactggctggccagctgcaacccagatgccctgttccaggaggacagctacaagaaacacctgaagcatcactgtaacaaggtcctgctgcgtgtccgcatgctgtactacctaagacaagaagtgataggagaccaggcggataagatcttagagggtgctgactcaagtgaagccgatgtgtggatccctgaacctttccatgctgaagttcctgcagattggtgggataaggaagcagacaaatccctcttaattggagtgttcaaacatggctatgagaagtacaactccatgcgagctgaccccgcgctgtgctttctggaacgagtcggtatgcctgatgccaaggccatagctgccgagcaaagaggaacagacatgctagcagatggtggtgacgggggagaatttgatagagaagatgaagacccagaatataaaccaaccagaacaccgttcaaagatgaaatagatgaatttgcaaattctccttcagaggataaggaagaatccatggaaatacatgccacaggcaagcacagtgagagtaatgctgagttaggccaactttactggcctaacacttcaaccctgactacacgtctgcgccggctcattactgcctatcagcgcagctataaaaggcaacagatgaggcaagaggccctaatgaagactgaccggcgcagacggcggcctcgagaggaagtgagagctctggaagcggaaagggaagctattatatctgagaagcggcaaaagtggacaagaagagaagaggctgatttttaccgtgtggtatccacctttggggttatttttgaccctgtgaaacagcaatttgactggaaccaatttagagcctttgccaggcttgacaaaaaatctgatgagagtttggagaaatacttcagttgttttgtggccatgtgtaggcgagtatgtcgaatgcccgtcaagccagatgatgaaccgcccgacctctcctccataattgagccgatcacagaggagcgagcctctcgaactctgtaccgcattgagctgctacggaagatccgcgagcaggttctccatcacccccagctgggagagaggcttaagctctgccagccaagcttggatctgccagagtggtgggagtgtggacggcatgaccgagacttgctggttggtgctgctaaacacggggtcagtcggacggattatcacatcctcaatgaccctgagttatccttcttggatgcacataaaaactttgctcaaaacagaggggcaggtaatacatcttccttgaacccactggcagttggatttgtccagactcctccagtcatctcatctgctcatattcaagatgagagggtactggaacaagccgaaggcaaagtggaggagcctgaaaacccagctgccaaggagaaatgtgagggcaaagaagaggaagaagaaaccgatggcagcgggaaggagagcaagcaggaatgtgaggcagaggccagctctgtgaaaaatgaactgaaaggtgttgaggtcggcgcagacactgggtccaaatctatttcagagaaaggttccgaagaggatgaagaggaaaagctggaggatgacgataagtcggaagagtcttcccagcccgaagcaggagctgtctctagagggaagaattttgatgaagaaagcaatgcttccatgagcactgctagagatgaaacccgagatggattctacatggaggacggagatccttcagtagctcagctccttcatgaaagaacatttgccttctcgttttggcctaaggatagagtaatgataaaccgcttagacaacatctgtgaagcagtgttgaaaggcaaatggccagtaaataggcgccagatgtttgatttccaaggcctcatcccaggttacacacccaccacagtggacagccccttgcagaagaggagctttgctgagctctccatggtcggccaagccagcattagtgggagtgaggacatcactacgtctcctcagttgtcaaaggaagatgccctcaacctctctgtccctcgccagcggaggaggaggaggagaaaaatcgaaattgaggccgaaagagctgccaagaggcgaaatctcatggagatggttgcccagcttcgagagtctcaggtggtctcagaaaatggacaagaaaaagttgtagatttatcaaaggcctcaagagaggcaacaagctctacctcaaatttttcatctctttcttcaaagtttatcttgcctaatgtctcaacaccagtgtctgatgcctttaagactcaaatggaactgctccaagcaggcctttcgcgcacacccacaaggcatctccttaatggctccctagtggatggagagcctcccatgaagaggaggcggggaaggaggaaaaatgtggagggacttgatctgcttttcatgagccacaaacggacgtcattgagtgcagaggatgctgaggtgaccaaagcttttgaagaagatatagagaccccaccaacaagaaacattccttctcccggacagctggacccagacacacggatccctgttatcaatcttgaagatgggactaggctggtgggggaagatgctcctaaaaataaggatttagttgaatggctgaagctgcaccctacttacactgttgatatgccaagttatgtaccaaagaatgcagatgtgctgttttcctcatttcagaaaccgaaacagaaacgacatagatgtcgaaaccctaataaattggatataaacactttgacaggagaagaaagggtgcctgttgtcaataaacgaaatgggaagaagatgggtggagctatggcgcctccaatgaaggatctacccaggtggctggaagaaaatcctgaatttgcagttgctccagactggactgatatagttaagcagtctggttttgttcctgagtcgatgtttgaccgccttctcactgggcctgtagtgcggggagagggagcgagcagaagaggaagaaggcccaaaagtgagatcgccagagcagccgcggccgccgctgctgtggcctccacgtcagggatcaaccctttgctggtgaacagcctgtttgctggaatggacctgacgagccttcagaatctccagaatctccagtcgctccagctggcaggcctcatgggcttccctccaggactggcaacagctgccaccgccggaggcgatgcgaagaaccctgctgctgtgctgcccctgatgctgccaggaatggcgggcctgcccaacgtgtttggcttgggcgggctgttgaataaccctctgtcagctgctactggaaacaccactactgcttctagtcaaggagaaccggaagacagcacttcaaaaggagaggagaaaggaaatgagaatgaagacgagaacaaagactctgagaaaagcacagatgctgtttcggctgctgactctgcgaatggatctgttggtgctgctactgccccggctggattgccctcaaacccgctagccttcaaccctttcctcctgtccacaatggccccgggcctcttctacccatccatgtttctacctccaggactggggggattgacgctgcctgggttcccagcattggcaggacttcagaatgccgtgggctccagcgaagaaaaggctgctgacaaggctgagggaggaccctttaaagatggagagacccttgaaggcagcgatgccgaggagagcctggataagactgcagagtcctccctcttagaagacgaaatagcacagggtgaagagctagactcacttgatgggggggatgaaatagaaaacaatgaaaatgatgaatagtaatgaactagtccgtaacttgaaagtatttcgatttcttggctttatatatcttgtggaaaggacgaagaccctcctcaacacaatactgt

SEQ ID NO: 752 - DNA, 8249 bp, Homo sapiens
  source 1..8249: mol_type = genomic DNA
accgccaccatgaaaatgaaaatacagaaaaaagagaagcagttgtcaaatttaaaagttttgaatcactccccaatgtctgatgcctctgtcaattttgactacaaatctccatccccatttgactgcagcactgatcaagaagagaaaattgaagatgttgctagtcactgtctgcctcagaaggacctgtatactgctgaagaggaagctgctaccctttttcctaggaaaatgacatcccataatgggatggaggacagtggaggaggaggtactggagtgaagaagaaacggaagaaaaaggagccaggagaccaagagggtgcagcaaagggaagcaaggacagagagcccaagccaaagaggaaacgagaaccgaaagagccaaaggaacccagaaaggccaaggagccgaagaaggccaaggagcacaaggagccgaagcaaaaagatggggcaaagaaggcacggaagccccgggaggcctcgggcaccaaggaggccaaagagaagaggagctgcactgactctgcagccaggacgaagtccaggaaggccagcaaggagcaaggaccaaccccagtggagaaaaagaagaaaggaaaaaggaaaagtgaaactacagtggagagtttagagctggatcagggcctgacgaacccatctctgcggagtcctgaggagtccactgagtctacagacagccagaaacgacgctcgggaaggcaagtaaagcgcagaaaatacaatgaggacctggacttcaaagtggtggatgatgatggggaaacaattgctgttcttggagctggtcgaacatctgcactctcagcctctacactggcctggcaggcggaggagcctccagaagatgatgcaaacatcattgagaagatcctggcatctaagactgtccaggaggttcacccaggagaacctccgttcgacttggagctgttctacgttaagtatagaaatttttcctacttacattgtaaatgggccacaatggaagagctcgaaaaggatcctcgcatcgcacagaagatcaagcgatttaggaataaacaagcccagatgaagcacatttttacggagcctgatgaagacttgttcaatccagactatgtagaagttgatcgcatcttggaggtggcccacaccaaggatgcagaaacaggggaggaggtaacacattacctggtgaagtggtgctcactaccatatgaagaaagcacgtgggagctagaggaagatgtagatcctgcaaaagttaaagaatttgaatctcttcaagttctccctgaaattaagcatgtggagcggcctgcttcagactcctggcagaaacttgagaagtctcgcgagtataagaacagtaaccagctccgggagtaccagctggaagggatgaactggcttctttttaactggtataacagaaaaaactgtattttggctgatgagatgggcctagggaaaaccatccagtccatcacattcctttcagaaatatttctgagaggaatccacggcccttttctcattatcgcccctctctccaccatcactaactgggagcgggagttccggacatggacagagatgaatgccattgtgtaccacggcagccagatcagcaggcagatgatccagcagtatgaaatggtgtacagagacgcccagggaaaccccctttcaggagtcttcaagttccacgtcgtcatcacaacatttgaaatgatcctagcagactgcccagagttgaagaagattcactggagctgtgtgataattgatgaagcccacagactgaagaataggaactgcaaacttctggagggtctaaagcttatggccctggaacataaagtgcttctcactggaacacccttgcagaactctgtggaggagctcttcagtttgttaaattttctggagccatcacagtttccttcagagaccgctttcttggaggaatttggagatctgaaaacagaggagcaggtaaagaaactgcagtctatcctaaaaccaatgatgcttcggcggctgaaagatgatgtggaaaagaaccttgctcccaaacaagagacgatcattgaggtggaactgaccaatatccagaaaaagtactaccgtgccatcctcgagaagaacttttccttcctgaccaagggggcaaatcagcacaacatgcccaatctcatcaacaccatgatggagctgaggaagtgctgtaaccatccctacctgatcaatggagcagaggagaaaattctagaagatttccgaaaaacccacagccctgatgcccctgactttcagctgcaggccatgattcaggcagcaggaaagcttgtgttgattgataaactactccctaagctgattgcaggtggccacaaagtactcatcttctcccagatggtgcgctgcctcgacatcctagaagattacctcatccagagaagatacacctatgagcgaattgatgggcgagtacggggaaacctgcgccaggcagccatcgaccggttctgtaagccagattcagaccgctttgtctttcttctgtgcaccagagcgggaggcctggggatcaatctcacagctgctgatacctgcatcatatttgattctgactggaacccacaaaatgacttgcaggctcaggcccgatgtcaccgcataggccagagcaaagctgtgaaggtgtatcgcctcatcactcgaaattcctacgagcgcgagatgtttgacaaggccagcctaaagctggggctggacaaggctgttcttcaggacatcaaccgaaagggcggcaccaatggggtacagcagctctcaaaaatggaggtggaggacctactccggaaaggtgcttatggagccttaatggatgaagaagatgaaggctccaagttctgtgaagaagacatagaccagattctgcagaggcgaacgcacaccatcaccatccagtctgaggggaaagggtccacttttgccaaggctagctttgtggcttcaggaaacagaacagatatttccttagatgatcctaacttttggcagaaatgggctaaaatagctgaactagacactgaagcaaagaatgaaaaggaaagcttagtgatcgaccgacctcgcgtgagaaagcagaccaaacactacaactcgtttgaggaagacgagctcatggagttttcagagttagacagcgactcagacgaaaggcccacgagatccaggcgcctcaatgacaaagccaggcgctacctccgagcggagtgcttccgggtagagaagaacctgctcatctttggctggggccggtggaaggacatcctgactcatggccgattcaagtggcatctgaacgagaaggacatggagatgatttgccgtgccctcctggtgtactgtgtcaagcattataagggggacgagaagatcaagagtttcatttgggaactgatcacacctaccaaagatgggcaagcccagaccctccagaaccactcaggcttatctgccccagtccccagagggaggaaggggaagaagacgaagaaccagttgctaatcccagagctaaaggatgcagattggctagccacctgcaaccccgaggtggtcttgcatgatgatggctataagaaacacctcaaacagcactgcaacaaagtacttttgcgagtccggatgctgtactacctaaaagctgaaatactgggagaagcagctgagaaagcatttgaaggatctcctgccagggagctggatgtacctctgcctgacatcgactacatggagatcccagtggactggtgggatgctgaagccgataagtcacttctcattggcgtgttcaagcatggttatgaaaggtacaatgccatgcgagcagacccagcactttgcttcctggagaaagttgggatgcccgatgagaagtccctttctgcagaacagggtgttacagatgggacctcagacattcctgaaagaggcaacacagataaagaagacaatgctgaggacaaagtagatggcctccagaaacaaacggagagttccagtgatggaggtgatggcgtttttagcgaaaagaaggatgacagccgggcagcccaggatggctccgacccagacaaatcgccctggccagtttcctccgccctcacagctcgtctcagacgtctggtcactgtttaccagcgctgcaaccgcaaggaactgtgccggcctgaaattctgggaccaggtaaccaaggatattgggttcaggaagagatgttcaggagaacctcagaaatggacctcatcaacaaggaagcccaaaagaggtggactaggagagaacaagcagacttctatagaacagtgtcttcctttggtgttgtttacgatcaagaaaagaaaacctttgactggacacagttccgcatcatttcccgtttggacaagaagtcggatgagagcctggaacagtatttttatagttttgtggccatgtgccggaatgtctgtcgtctacccacatggaaagatggcggtcccccagataccaccatctacgttgaacccatcactgaggaacgtgctgcaagaactctgtaccgcattgaactgttacggaaagtccgagagcaagtgctcaagtgccctcagctgcatgaacgcctccagctgtgcaggcccagcctctacctcccagtctggtgggagtgtgggaagcatgatcgagacctgctcatcggcactgccaaacatgggctgaaccgcactgactgttacatcatgaacgacccccagctgtccttcctggatgcctatagaaactatgcccagcataaaagatctggcacccaggcaccaggaaatctctgttgcctttaccagaccaactccaagttatatgaatctcttacatattctcaaatgagtaggacttcagagtcccttgaaaatgaacctgaaaatctagtgagagtagaaagcagagatgatcatctcagcctgcctgatgtgacatgtgaaaactttatttctaaagttcaggatgtcatttccatcaaccatgatgaaagtctgctgcctgagtccttagagagcatgatgtatggtaagaaggtgctcagccaagaaccaagctcttttcaggagagcccaagtaccaatactgaatctagaaaagatgttattaccatctcaataagcaaagatgggaactgccagtctggtggccctgaggcagaaatagcttctggccctacttttatgggtagcttagaagcaggaggagtagctcaagcaaacatcaaaaatggaaaacatttgttgatgtctatttcaaaggaaggggagctctgctgcagtgaggcaggacagagacctgaaaacattggccagctggaagccaagtgtttagcttccccttccttgaatccaggaaatgaaagtgggtttgtagatatgtgcagtcttagtgtctgtgactccaaaagaaacctgtcatcagatcagcaattaattgatttattggaaaacaaaagcttagaaagtaaattgattttgagtcagaaccacagtgatgaggaggaagaagaggaggaaaacgaggaggaaaacttagccatggcagtaggcatgggggaaaggccagaggtattgcatctcacggagcccactactaacatctcaagggaaaagaaccaaggcttccaagatgaaaccaagaaaggaagcttagaggtggcaaaccagactcctgggctacagagggctttccccgctccagcagcctgtcagtgccactgcaaacacatggagaggtggatgcatggcctcgagaatgatgaatttgaaatcgagaaacccaaggcttatatcccagatctgttcaaaagtaaaaccaatactatcgccatggagggtgaacccactgctattccatcacagccgtttaaagtgaagcatgagcttttaaaagaaccttggaaagaaagtgcagaggggcaaaacgttttccccacatatcctcttgaaggaagtgagctcaaatcagaagacatggattttgagaataaagatgattatgatagagacggaaactgccatagtcaagattatccagggaagtactctgaagaggagagcaagagctcaacatcgggcatcacaggagacattggggatgagctacaggaggctcgagctcccactattgctcagctgctacaggagaaaactctctattccttctctgagtggccaaaggaccgcgtgataattaaccgcctagataatatctgccacgtggtgttaaaggggaagtggccctctagccagcagtatgagccctcaggcacactgcccaccccggtattaaccagcagtgctggttctcgaaccagcctctcagagccggaagcagcagaacacagcttcagcaacggcgcagcattggcggcccagatccacaaggagagcttcttagctccagtattcacaaaggatgaacaaaagcacaggcgtccctatgagtttgaggtggagagggatgcaaaggctcggggcctggagcagttctctgccacccacgggcacacccctatcatcctcaatggctggcatggggagtcagctatggacctctcctgctcatcagaggggtccccaggagccacatcccctttcccagtgagcgccagcacccctaagattggggctatcagttcacttcagggagcccttggcatggacttgtctgggattctgcaagctggcctgatccatcctgtgactggacagattgtcaatggaagcctcagaagagatgatgcagccacgaggaggcggagagggaggcggaaacatgttgaaggagggatggacctcatctttttgaaggagcagacacttcaggcgggaatcttggaagtccatgaagacccagggcaggccaccttgagcaccacacaccctgaggggccagggcctgccacctcggctcctgagccagctacggcagccagcagccaagccgagaaatccattcccagcaagagtctgcttgactggctaaggcagcaggctgactactccttagaagttcctggctttggggcaaatttttcagacaaaccaaagcagaggaggccacgctgtaaagaacctggaaaattagatgtcagctccctgagcggggaagagagagttcctgccatccccaaggagccaggactgagggggtttcttccagaaaacaagttcaatcacactctggctgagcctattcttcgagatacgggcccccgcaggagggggaggcggcctcggagcgaactcctgaaggctccttccattgtggcagactctccctctggaatggggccactgttcatgaatggactgattgctgggatggacctggtaggacttcagaacatgagaaatatgccaggcatccccctcaccgggctggtggggtttccagctggctttgccacgatgccaacaggtgaagaggtcaaaagtaccctgagcatgctgcccatgatgctgccaggcatggctgctgtgccccagatgtttggtgttgggggactcctcagtccacccatggcaaccacctgcacttccactgctccggcgtctctatcaagcacaacgaaaagtggtacggcagtgactgaaaagactgcggaagacaagccgagtagccatgatgtgaaaacagacactttagctgaggacaagcctggtccaggtccattttctgatcagtctgaacctgcaataactactagtagtcctgtggcttttaacccatttctcatcccaggagtatctcctggactcatttacccatccatgttcctctcccctggtatgggcatggctctgccagccatgcagcaggccagacactcggaaatagtaggtctggagagccagaagaggaagaagaagaagacaaagggggacaaccccaactcccacccagagcctgctcccagctgtgaaagggagcccagcggtgatgagaactgtgccgaacccagtgcccctttgcccgcagagagagaacatggggcacaggctggggagggggcactcaaagactccaacaacgacaccaattagtaatgaactagtccgtaacttgaaagtatttcgatttcttggctttatatatcttgtggaaaggacgatcagttctgccgggtcacgtctcg

SEQ ID NO: 753 - DNA, 1850 bp, Homo sapiens
  source 1..1850: mol_type = genomic DNA
accgccaccatgagcatagagacgctactggaggcggcccgcttcctggaatggcaagcgcagcaacaacagagagcacgtgaggagcaggagcggcttcgcttggagcaggagcgagagcaggaacagaagaaggccaatagcctggccaggctggcacatacccttcctgtggaggaaccccgcatggaggcgccacccctgcctctgtctccaccggctcccccgccggcacccccaccaccacttgccacccctgccccactgactgtcatccctatccctgtggtgaccaactcccctcagcctctacccccacccccacccttgcccgcggcagcccagcctctgcccctggcgcctcgtcagccggccctggttggcgcccccggactcagcattaaggagcctgcccccctgcccagcaggccgcaggtgcccacccctgctcccctactgccggactcgaaggccaccattccacccaatggcagccccaagcctttgcagcccctccccacgcctgtcctgaccatagcgccacaccctggagtccagcctcagctggccccccagcagccgcccccacccacgctggggaccctgaagttggcaccagctgaagaagtcaaatccagtgaacagaagaagaggcccggggggatcggaaccagagaagtccacaacaaattggagaagaacaggagggcccatctgaaagagtgctttgagaccctgaagcggaacatccccaacgtggatgacaagaagacgtccaatctgagcgtgctgcggacggcgctgcggtacatccagtccctgaagaggaaggagaaggaatatgagcatgaaatggagcggctggcacgtgagaagattgccacgcagcagcggctggcagagctcaagcacgagctgagccagtggatggacgtactggagattgaccgcgtgctgcggcagacgggccagcccgaggatgaccaggcctccacctccaccgcctctgagggtgaggacaacatagacgaggatatggaggaggaccgggcgggcctgggcccacctaagctgagccatcgtccccagccggagctgctgaagtccaccctgccaccccccagcaccacccctgcgcctctgcctccacacccacaccctcacccccactccgtggccctacctcctgcccacctccccgtgcagcagcagcagccacagcagaagacccctctgccagcccctcctcccccaccggctgcccctgcccagacactggtgccagctccagcccatctggtggcgacggctgggggtggctccacggtcatcgcccacacagccaccactcacgcttcagtcatccagactgtgaaccacgttctgcaggggccaggcggcaagcacatcgcccacatcgccccctcggcccccagccctgcggtgcaactggcgcctgccacaccccccattgggcacatcactgtgcaccctgccaccctcaaccatgtggcccacctgggctcccagctgcccttgtacccgcagcccgtggcagtgagccacatcgcccacaccctctcgcaccagcaagtcaacggcacggccggcctggggcccccggctactgtcatggcaaagccggccgtgggggctcaggtggtgcaccacccccagctggtgggccagaccgtgctcaaccctgtgaccatggtcaccatgccctccttcccagtcagcacactcaagctggcttagtaatgaactagtccgtaacttgaaagtatttcgatttcttggctttatatatcttgtggaaaggacgaaaagctcaacgggataatatatgg

SEQ ID NO: 754 - DNA, 1034 bp, Homo sapiens
  source 1..1034: mol_type = genomic DNA
accgccaccatgctggcatggcaggacggcggggccaaggcggctccctcccaccacaagatttctttctctgtcctggacatcctggacccacagaaattcacccgcgcagcgctccctgccgtgcgcccggctccccgggaagccaggaaaagtttggcggaggtcgaagcggggaaagatgccagctccagggaccctgtccgacagctggagacccctgatgctgcgggcccaggcgccggccaggcgtcccccctggagggttccgaggcggaagaggaggaggatgcggaggatccgaggaggccgcggctgcgggagcgggctgcgcgcttgctgccgggcctagcgcgctcacctgacgccccggccggggcattggcgtctggggagccctgcgaggacggcgggggcggccctgtgaggtcccccccgggatcccccggctccccgcgtcccaggcgccggcgcctggagcccaactgcgccaagccgcggcgcgcgcgcaccgccttcacctacgagcagctggtggccttggagaacaagttccgggccacgcgctacctgtcagtgtgcgagcgcctgaacctcgcgctgtctctcagcctcaccgagacgcaggtcaaaatctggttccagaatcgcaggaccaagtggaagaagcagaacccgggtgccgacggcgcggcgcaggtggggggtggcgcgccccagccaggggcggcggggggcggcggcggcggcggctcggggggcagtcctggccctcccggcaccggcgctctgcacttccagactttcccctcctactccgcggccaatgtcctcttcccgtccgccgcctccttcccgctgacggctgccgcccccgggagccctttcgcgccgttccttgggccttcctacctgacccccttctacgccccgcgtctatagtaatgaactagtccgtaacttgaaagtatttcgatttcttggctttatatatcttgtggaaaggacgatataacccatatagactattactg

SEQ ID NO: 755 - DNA, 707 bp, Homo sapiens
  source 1..707: mol_type = genomic DNA
accgccaccatgtccttcgccacgctgcgcccggcgccgccgggccgctacctgtaccccgaggtgagcccgctgtcggaggacgaggaccgcggcagcgacagctcgggctccgacgagaaaccctgtcgcgtgcacgcggcgcgctgcggcctccagggcgcccggcggagggcggggggccggcgggccgggggcggggggccagggggccggccaggccgtgagccccggcagcggcacacggcgaacgcgcgcgagcgagaccgcaccaacagcgtgaacacggccttcacggcgctgcgcacgctgatccccaccgagcccgccgaccgcaagctctccaagattgagacgctgcgcctggcctccagctacatctcgcacctgggcaacgtgctgctggcgggcgaggcctgcggcgacggacagccctgccactccgggcccgccttcttccacgcggcgcgcgccggcagccccccgccgccgcccccgccgcctcccgcccgcgacggcgagaacacccagcccaaacagatctgcaccttctgcctcagcaaccagagaaagttgagcaaggaccgcgacagaaagacagcgattcgcagttagtaatgaactagtccgtaacttgaaagtatttcgatttcttggctttatatatcttgtggaaaggacgattcaaagtattgaagtgtgatagc

SEQ ID NO: 756 - DNA, 1436 bp, Homo sapiens
  source 1..1436: mol_type = genomic DNA
accgccaccatgccaaggtcaggggctcccaaagagcgccctgcggagcctctcacccctcccccatcctatggccaccagccacagacagggtctggggagtcttcaggagcctcgggggacaaggaccacctgtacagcacggtatgcaagcctcggtccccaaagcctgcagccccggcggcccctccattctcctcttccagcggtgtcttgggtaccgggctctgtgagctagatcggttgcttcaggaacttaatgccactcagttcaacatcacagatgaaatcatgtctcagttcccatctagcaaggtggcttcaggagagcagaaggaggaccagtctgaagataagaaaagacccagcctcccttccagcccgtctcctggcctcccaaaggcttctgccacctcagccactctggagctggatagactgatggcctcactctctgacttccgcgttcaaaaccatcttccagcctctgggccaactcagccaccggtggtgagctccacaaatgagggctccccatccccaccagagccgactggcaagggcagcctagacaccatgctggggctgctgcagtccgacctcagccgccggggtgttcccacccaggccaaaggcctctgtggctcctgcaataaacctattgctgggcaagtggtgacggctctgggccgcgcctggcaccccgagcacttcgtttgcggaggctgttccaccgccctgggaggcagcagcttcttcgagaaggatggagcccccttctgccccgagtgctactttgagcgcttctcgccaagatgtggcttctgcaaccagcccatccgacacaagatggtgaccgccttgggcactcactggcacccagagcatttctgctgcgtcagttgcggggagcccttcggagatgagggtttccacgagcgcgagggccgcccctactgccgccgggacttcctgcagctgttcgccccgcgctgccagggctgccagggccccatcctggataactacatctcggcgctcagcgcgctctggcacccggactgtttcgtctgcagggaatgcttcgcgcccttctcgggaggcagctttttcgagcacgagggccgcccgttgtgcgagaaccacttccacgcacgacgcggctcgctgtgcgccacgtgtggcctccctgtgaccggccgctgcgtgtcggccctgggtcgccgcttccacccggaccacttcacatgcaccttctgcctgcgcccgctcaccaaggggtccttccaggagcgcgccggcaagccctactgccagccctgcttcctgaagctcttcggctagtaatgaactagtccgtaacttgaaagtatttcgatttcttggctttatatatcttgtggaaaggacgaaataggaggctactctcagtccgg

SEQ ID NO: 757 - DNA, 1487 bp, Homo sapiens
  source 1..1487: mol_type = genomic DNA
accgccaccatggaggacctggatgccctgctctctgacctggagactaccacctcgcacatgccaaggtcaggggctcccaaagagcgccctgcggagcctctcacccctcccccatcctatggccaccagccacagacagggtctggggagtcttcaggagcctcgggggacaaggaccacctgtacagcacggtatgcaagcctcggtccccaaagcctgcagccccggcggcccctccattctcctcttccagcggtgtcttgggtaccgggctctgtgagctagatcggttgcttcaggaacttaatgccactcagttcaacatcacagatgaaatcatgtctcagttcccatctagcaaggtggcttcaggagagcagaaggaggaccagtctgaagataagaaaagacccagcctcccttccagcccgtctcctggcctcccaaaggcttctgccacctcagccactctggagctggatagactgatggcctcactctctgacttccgcgttcaaaaccatcttccagcctctgggccaactcagccaccggtggtgagctccacaaatgagggctccccatccccaccagagccgactggcaagggcagcctagacaccatgctggggctgctgcagtccgacctcagccgccggggtgttcccacccaggccaaaggcctctgtggctcctgcaataaacctattgctgggcaagtggtgacggctctgggccgcgcctggcaccccgagcacttcgtttgcggaggctgttccaccgccctgggaggcagcagcttcttcgagaaggatggagcccccttctgccccgagtgctactttgagcgcttctcgccaagatgtggcttctgcaaccagcccatccgacacaagatggtgaccgccttgggcactcactggcacccagagcatttctgctgcgtcagttgcggggagcccttcggagatgagggtttccacgagcgcgagggccgcccctactgccgccgggacttcctgcagctgttcgccccgcgctgccagggctgccagggccccatcctggataactacatctcggcgctcagcgcgctctggcacccggactgtttcgtctgcagggaatgcttcgcgcccttctcgggaggcagctttttcgagcacgagggccgcccgttgtgcgagaaccacttccacgcacgacgcggctcgctgtgcgccacgtgtggcctccctgtgaccggccgctgcgtgtcggccctgggtcgccgcttccacccggaccacttcacatgcaccttctgcctgcgcccgctcaccaaggggtccttccaggagcgcgccggcaagccctactgccagccctgcttcctgaagctcttcggctagtaatgaactagtccgtaacttgaaagtatttcgatttcttggctttatatatcttgtggaaaggacgatcgcgcacccatgcaatgaagaat

SEQ ID NO: 758 - DNA, 1934 bp, Homo sapiens
  source 1..1934: mol_type = genomic DNA
accgccaccatggactcagtggcctttgaagatgtggctgtgaacttcacacaagaggagtgggctttgctgggtccatcacagaagagtctctacagaaatgtcatgcaggaaaccattaggaacctggactgtatagaaatgaaatgggaggaccagaacattggagatcagtgccaaaatgccaagagaaatctaagaagtcatacatgtgaaattaaagatgacagtcaatgtggagaaacttttggccagattccagatagtattgtgaacaagaacactcctcgagtaaatccatgtgacagtggtgagtgtggagaagtcgtcttgggtcattcgtctcttaattgcaacatcagagttgacactggacacaaatcatgtgagcatcaggaatatggagagaagccatatacacataaacaacgtgggaaagccatcagtcatcagcactccttccagacacatgaaaggccccccaccggaaagaaacccttcgattgtaaagaatgtgcaaaaacctttagttctcttggaaacctccgaagacacatggcggcacaccatggagatggaccttataaatgtaagttgtgtgggaaagcctttgtttggcccagtttatttcatttgcacgaaagaacacacactggagagaaaccgtatgaatgtaagcagtgttctaaagcctttcctttttacagttcctatctaagacatgaaagaatccacacgggagagaaagcgtatgaatgtaagcagtgttccaaagcctttcctgattacagtacctatctaagacatgagagaactcacaccggagagaaaccctataaatgtacacaatgtgggaaagccttcagctgttactattacactcgactacatgaaaggactcacacgggagaacaaccctatgcatgtaagcaatgtgggaaaacgttttatcatcacacaagctttcgaagacacatgataaggcacactggagacggaccacataaatgtaagatatgtgggaaaggctttgattgtcctagttcagttcgaaatcatgaaactactcacactggagagaaaccctatgaatgtaagcagtgtgggaaagtgttatctcatagctcgagctttcgaagtcacatgataacacacacaggagatggaccccagaaatgcaagatatgtgggaaagcctttggttgtcccagtttatttcaaagacatgaaaggactcacactggagagaaaccctatcaatgtaaacaatgtggtaaagccttcagtcttgccggttcccttcgaagacatgaagcaactcacactggagtgaaaccctataaatgtcagtgtgggaaagcctttagtgatctctcttcctttcaaaatcatgagacaactcacactggagagaagccatatgagtgtaaggaatgtgggaaagcattcagttgtttcaaatacctttctcaacataaaaggacccacacagtagaaaaaccttatgagtgtaaaacatgtagaaaagccttcagtcatttcagtaacttaaaagtccatgaaaggattcactctggagagaagccatatgaatgtaaggaatgtggaaaagcattctcttggctcacttgccttctacgacatgaaagaattcacactggagagaaaccctatgaatgtctacaatgtggtaaagccttcactcgttcccgtttccttcgaggacatgaaaaaactcacactggagagaagctgtatgaatgtaaggaatgtgggaaagcattgagttctctccgttccttgcatagacataaaaggactcactggaaagatactctctagtaatgaactagtccgtaacttgaaagtatttcgatttcttggctttatatatcttgtggaaaggacgaggacgtcgtagttaacaactctca

SEQ ID NO: 759 - DNA, 521 bp, Homo sapiens
  source 1..521: mol_type = genomic DNA
accgccaccatgtcccgtcggaaacagacaaatccaaataaagttcactgggatcaagtatttgctgggctagaagagcaagcccgccaggcgatgatgaaaactgattttcctggagaccttggcagtcagcgacaagctatccaacaactaagagatcaggactccagtagcagtgacagtgagggtgatgaagaggagacgacacaagatgaagtctcttcccacacatcagaggaagatggaggggtggtcaaagtggagaaagagttagaaaatacagaacagcctgttggtgggaacgaagtggtagagcacgaggtcacagggaatttgaattctgaccccttgcttgaactctgccagtgtcccctctgccagctagactgcgggagccgggagcagttgattgctcacgtgtaccagtagtaatgaactagtccgtaacttgaaagtatttcgatttcttggctttatatatcttgtggaaaggacgaagggtcctcggatttatagtgcaa

SEQ ID NO: 760 - DNA, 1214 bp, Homo sapiens
  source 1..1214: mol_type = genomic DNA
accgccaccatgtcccgtcggaaacagacaaatccaaataaagttcactgtgacagtgagggtgatgaagaggagacgacacaagatgaagtctcttcccacacatcagaggaagatggaggggtggtcaaagtggagaaagagttagaaaatacagaacagcctgttggtgggaacgaagtggtagagcacgaggtcacagggaatttgaattctgaccccttgcttgaactctgccagtgtcccctctgccagctagactgcgggagccgggagcagttgattgctcacgtgtaccagcacactgcagcagtggtgagcgccaagagctacatgtgtcctgtctgtggccgggcccttagctccccggggtcattgggtcgccacctcttaatccactcggaggaccagcgatctaactgtgctgtgtgtggagcccggttcaccagccatgccacttttaacagtgagaaacttcctgaagtactaaatatggaatccctacccacagtccacaatgagggtccctccagtgctgaggggaaggatattgcctttagtcctccagtgtaccctgctggaattctgcttgtgtgcaacaactgtgctgcctaccgtaaactgctggaagcccagactcccagtgtacgcaagtgggctctacgtcgacagaatgagcctttggaagtacggctgcagcggctggaacgagagcgcacggccaagaagagccggcgggacaatgagacccccgaggagcgggaggtgaggcgcatgagggaccgtgaagccaagcgcttgcagcgcatgcaggagacagacgagcagcgggcacgccggctgcagcgggatcgggaggccatgaggctgaagcgggccaatgaaaccccggaaaagcggcaggcccggctcatccgagagcgagaggccaagcggctcaagaggaggctggagaaaatggacatgatgttgcgagctcagtttggccaggacccttctgccatggcagccttagcagctgaaatgaacttcttccagctgcctgtaagtggggtggagttggacagccagcttctgggcaagatggcctttgaagagcagaacagcagctctctgcactagtaatgaactagtccgtaacttgaaagtatttcgatttcttggctttatatatcttgtggaaaggacgaccctgcctacgtcgaagcgtcgcg

SEQ ID NO: 761 - DNA, 1340 bp, Homo sapiens
  source 1..1340: mol_type = genomic DNA
accgccaccatgtcccgtcggaaacagacaaatccaaataaagttcactgggatcaagtatttgctgggctagaagagcaagcccgccaggcgatgatgaaaactgattttcctggagaccttggcagtcagcgacaagctatccaacaactaagagatcaggactccagtagcagtgacagtgagggtgatgaagaggagacgacacaagatgaagtctcttcccacacatcagaggaagatggaggggtggtcaaagtggagaaagagttagaaaatacagaacagcctgttggtgggaacgaagtggtagagcacgaggtcacagggaatttgaattctgaccccttgcttgaactctgccagtgtcccctctgccagctagactgcgggagccgggagcagttgattgctcacgtgtaccagcacactgcagcagtggtgagcgccaagagctacatgtgtcctgtctgtggccgggcccttagctccccggggtcattgggtcgccacctcttaatccactcggaggaccagcgatctaactgtgctgtgtgtggagcccggttcaccagccatgccacttttaacagtgagaaacttcctgaagtactaaatatggaatccctacccacagtccacaatgagggtccctccagtgctgaggggaaggatattgcctttagtcctccagtgtaccctgctggaattctgcttgtgtgcaacaactgtgctgcctaccgtaaactgctggaagcccagactcccagtgtacgcaagtgggctctacgtcgacagaatgagcctttggaagtacggctgcagcggctggaacgagagcgcacggccaagaagagccggcgggacaatgagacccccgaggagcgggaggtgaggcgcatgagggaccgtgaagccaagcgcttgcagcgcatgcaggagacagacgagcagcgggcacgccggctgcagcgggatcgggaggccatgaggctgaagcgggccaatgaaaccccggaaaagcggcaggcccggctcatccgagagcgagaggccaagcggctcaagaggaggctggagaaaatggacatgatgttgcgagctcagtttggccaggacccttctgccatggcagccttagcagctgaaatgaacttcttccagctgcctgtaagtggggtggagttggacagccagcttctgggcaagatggcctttgaagagcagaacagcagctctctgcactagtaatgaactagtccgtaacttgaaagtatttcgatttcttggctttatatatcttgtggaaaggacgaaacggcctcgttcgtacaaggacc

SEQ ID NO: 762 - DNA, 3347 bp, Homo sapiens
  source 1..3347: mol_type = genomic DNA
accgccaccatgcccaggaggaagcaggagcagcccaagcgccttccctcacatgttagtaggcaggaagaggcggagggagagctcagtgaaggagaacactggtatggaaactcttcagagactccgtcagaagcatcctatggggaagtccaggagaactataagttgtctctggaggaccggatccaggagcagtccacgtccccggacacctccttgggaagcacgactcccagcagccacacgttggagctggtggcactggacagtgaggtcctgcgagactcactgcagtgtcaagatcacctttccccgggagtgtcttctttgtgtgacgatgacccaggctccaacaagcccctgagcagcaatttgaggcggctgctggaggctggttccctcaaactcgatgctgcagccacggctaatggcagagtggagtcccccgtaaacgttggctcgaacctctccttttccccgccttcccaccacgcccagcagctcagtgttctggccaggaagttggccgagaagcaggaacagaatgaccaatacactccaagtaaccgttttatatggaatcaaggtaagtggttgccaaactcaaccaccacctgcagcttgtctccggattcagccatcctaaaactgaaagctgcagccaatgccgttctgcaggacaaatctctcaccaggactgaggagaccatgcgatttgagtccttttcctccccttttagctcccagtctgccagttctaccttggccgctttgtccaagaaggtcagtgaaagaagtttgactcctggtcaggagcaccctccaccggccagctccttcctttccctggcttctatgacctcctcagcggcccttctgaaggaggtggccgcaagggctgcgggcagtcttctggctgagaaatcatcgctgctgcctgaggaccctctaccgcccccgccttcagagaagaaaccagaaaaagtcactccgccacctccaccgccacctccaccacctccaccaccaccaccacaatccctggaattattattactcccagttcctaagggaagagtttctaaaccctccaattcagcctcagaagaggaaagtggaaagcctttccagtgtccaatatgtggtttggttattaaaaggaagagttactggaagcggcacatggtgattcacacaggtttaaaaagtcatcagtgtccgctctgtccattccggtgtgctcgcaaggacaatctcaaatcccacatgaaggttcatcagcaccaggatcggggagagacctttcagtgccagctgtgcccttttacttcctcacgccacttcagcctgaaactccacatgcgttgccatcagcacttcctgaggacagaagccaaggtgaaggaggagatcccagacccagatgtcaagggatctccccacctcagtgacagtgcctgcctggggcagcaaagggaaggaggagggacagagctagtggggaccatgatgacgtctaacactccagagaggactagccagggaggggctggcgtctcgcctttgctggtgaaggaggaacccaaggaagataacggcctgcccacctcctttactttgaatgctgccgacaggcccgccaaccacacaaagctgaaagacccctccgagtatgtggccaacagtgcgtcagcattgttcagccaggacatctctgttaagatggcgtctgattttctcatgaagctgtcagctgcaaatcagaaggagcccatgaatcttaattttaaagtgaaagaggagcctaaggaaggggagtccctaagcacgactttgcctcggtccagctatgtgttcagcccggaatctgaagtgtcagccccaggcgtctctgaggacgcactaaagccccaggaagggaagggaagtgtgctaaggcgggatgtgtcagtcaaagcagcctctgaacttctcatgaaactctcagcggaaagctacaaggaaacacagatggtgaagattaaagaggaacccatggaggttgacatccaggactcccatgtctcgatatcacccagccggaatgttggctacagcactttaatcgggcgagagaaaaccgaacccttacagaagatgccagagggcagagtacccccagagagaaacctcttcagtcaggatatctctgtgaaaatggcttccgagctcctctttcaactgtcagaaaaagtgagcaaagagcacaatcatacaaaagaaaacaccatccggaccacgaccagccctttcttttcagaagacacatttagacaatcaccattcacctccaattcaaaagaactgctgcccagtgactccgtgctgcacggaagaatatcagctccagaaacagaaaagatagtcctagaggcaggaaatggattaccatcctggaaattcaatgaccagctttttccctgtgacgtgtgtgggaaagtgtttggccgacagcagacattgtcccgacacctctcgctgcacacagaggaaagaaaatacaaatgccacttgtgcccctatgctgctaagtgccgtgcaaatctgaaccagcacttgaccgtccattccgtgaagctggtgagtacagacaccgaggacattgtcagcgccgtcacctctgaaggcagtgatgggaagaaacatccttattattacagttgtcacgtgtgtggatttgagaccgagctcaatgtccagtttgtcagccacatgtcactccacgtggacaaggagcagtggatgttttcgatctgctgcactgcctgcgacttcgtcaccatggaggaagcagagataaagactcacattggcaccaagcacacaggggaagacaggaagacccccagcgaatcaaatagcccctcttcatcctccctctcagctctgagtgattcagccaacagcaaagatgattcagatggctcccagaaaaacaagggcgggaacaatctgctggtcatctctgtcatgcctgggagccagccctcactgaacagtgaggaaaagccagagaaagggttcgaatgtgttttttgcaactttgtctgcaagacgaagaacatgtttgagcgtcatctgcagatacacctcatcacccggatgtttgagtgtgatgtgtgccacaagttcatgaagacccccgaacagctgctggagcataagaaatgccacactgtccccaccggtgggctcaactcaggacagtggtagtaatgaactagtccgtaacttgaaagtatttcgatttcttggctttatatatcttgtggaaaggacgattccaagagggcctgtttacgtct

SEQ ID NO: 763 - DNA, 3335 bp, Homo sapiens
  source 1..3335: mol_type = genomic DNA
accgccaccatgcccaggaggaagcaggagcagcccaagcgccttccctcacatgttagtaggcaggaagaggcggagggagagctcagtgaaggagaacactggtatggaaactcttcagagactccgtcagaagcatcctatggggaagtccaggagaactataagttgtctctggaggaccggatccaggagcagtccacgtccccggacacctccttgggaagcacgactcccagcagccacacgttggagctggtggcactggacagtgaggtcctgcgagactcactgcagtgtcaagatcacctttccccgggagtgtcttctttgtgtgacgatgacccaggctccaacaagcccctgagcagcaatttgaggcggctgctggaggctggttccctcaaactcgatgctgcagccacggctaatggcagagtggagtcccccgtaaacgttggctcgaacctctccttttccccgccttcccaccacgcccagcagctcagtgttctggccaggaagttggccgagaagcaggaacagaatgaccaatacactccaagtaaccgttttatatggaatcaaggtaagtggttgccaaactcaaccaccacctgcagcttgtctccggattcagccatcctaaaactgaaagctgcagccaatgccgttctgcaggacaaatctctcaccaggactgaggagaccatgcgatttgagtccttttcctccccttttagctcccagtctgccagttctaccttggccgctttgtccaagaaggtcagtgaaagaagtttgactcctggtcaggagcaccctccaccggccagctccttcctttccctggcttctatgacctcctcagcggcccttctgaaggaggtggccgcaagggctgcgggcagtcttctggctgagaaatcatcgctgctgcctgaggaccctctaccgcccccgccttcagagaagaaaccagaaaaagtcactccgccacctccaccgccacctccaccacctccaccaccaccaccacaatccctggaattattattactcccagttcctaagggaagagtttctaaaccctccaattcagcctcagaagaggaaagtggaaagcctttccagtgtccaatatgtggtttggttattaaaaggaagagttactggaagcggcacatggtgattcacacaggtttaaaaagtcatcagtgtccgctctgtccattccggtgtgctcgcaaggacaatctcaaatcccacatgaaggttcatcagcaccaggatcggggagagacctttcagtgccagctgtgcccttttacttcctcacgccacttcagcctgaaactccacatgcgttgccatcagcacttcctgaggacagaagccaaggtgaaggaggagatcccagacccagatgtcaagggatctccccacctcagtgacagtgcctgcctggggcagcaaagggaaggaggagggacagagctagtggggaccatgatgacgtctaacactccagagaggactagccagggaggggctggcgtctcgcctttgctggtgaaggaggaacccaaggaagataacggcctgcccacctcctttactttgaatgctgccgacaggcccgccaaccacacaaagctgaaagacccctccgagtatgtggccaacagtgcgtcagcattgttcagccaggacatctctgttaagatggcgtctgattttctcatgaagctgtcagctgcaaatcagaaggagcccatgaatcttaattttaaagtgaaagaggagcctaaggaaggggagtccctaagcacgactttgcctcggtccagctatgtgttcagcccggaatctgaagtgtcagccccaggcgtctctgaggacgcactaaagccccaggaagggaagggaagtgtgctaaggcgggatgtgtcagtcaaagcagcctctgaacttctcatgaaactctcagcggaaagctacaaggaaacacagatggtgaagattaaagaggaacccatggaggttgacatccaggactcccatgtctcgatatcacccagccggaatgttggctacagcactttaatcgggcgagagaaaaccgaacccttacagaagatgccagagggcagagtacccccagagagaaacctcttcagtcaggatatctctgtgaaaatggcttccgagctcctctttcaactgtcagaaaaagtgagcaaagagcacaatcatacaaaagaaaacaccatccggaccacgaccagccctttcttttcagaagacacatttagacaatcaccattcacctccaattcaaaagaactgctgcccagtgactccgtgctgcacggaagaatatcagctccagaaacagaaaagatagtcctagaggcaggaaatggattaccatcctggaaattcaatgaccagctttttccctgtgacgtgtgtgggaaagtgtttggccgacagcagacattgtcccgacacctctcgctgcacacagaggaaagaaaatacaaatgccacttgtgcccctatgctgctaagtgccgtgcaaatctgaaccagcacttgaccgtccattccgtgaagctggtgagtacagacaccgaggacattgtcagcgccgtcacctctgaaggcagtgatgggaagaaacatccttattattacagttgtcacgtgtgtggatttgagaccgagctcaatgtccagtttgtcagccacatgtcactccacgtggacaaggagcagtggatgttttcgatctgctgcactgcctgcgacttcgtcaccatggaggaagcagagataaagactcacattggcaccaagcacacaggggaagacaggaagacccccagcgaatcaaatagcccctcttcatcctccctctcagctctgagtgattcagccaacagcaaagatgattcagatggctcccagaaaaacaagggcgggaacaatctgctggtcatctctgtcatgcctgggagccagccctcactgaacagtgaggaaaagccagagaaagggttcgaatgtgttttttgcaactttgtctgcaagacgaagaacatgtttgagcgtcatctgcagatacacctcatcacccggatgtttgagtgtgatgtgtgccacaagttcatgaagacccccgaacagctgctggagcataagaaatgccacactgtccccaccggtgggctcaagtagtaatgaactagtccgtaacttgaaagtatttcgatttcttggctttatatatcttgtggaaaggacgactctaagtagattaaatcagggta

SEQ ID NO: 764 - DNA, 1643 bp, Homo sapiens
  source 1..1643: mol_type = genomic DNA
accgccaccatgactggaaagggcttaggtgaggataccgaagaccgatggggagctggcgccttgggcccctgcgggcggagcggcctgaaaggtggaggttgtgtttgggaggccgaggcaggaggatcacgaggtcaagagatcgagaccatcctggccaacatggaaacctctctgaggtctggtcagattccaaccctggacagcagtgaacacaacctttcccctgagccactggaattggacagaatgccccattctcctctgatctccattcctcatgtgtggtgtcacccagaagaggaggaaagaatgcatgatgaacttctacaagcagtatccaaggggccggtgatgttcagggatgtttccatagacttctctcaagaggaatgggaatgcctggacgctgatcagatgaatttatacaaagaagtgatgttggagaatttcagcaacctggtttcagtgggactttccaattctaagccagctgtgatctccttattggaacaaggaaaagagccctggatggttgatagagagctgactagaggcctgtgttcagatctggaatcaatgtgtgagaccaaaatattatctctaaagaagagacatttcagtcaagtaataattacccgtgaagacatgtctacttttattcagcccacatttcttattccacctcaaaaaactatgagtgaagagaaaccatgggaatgtaagatatgtggaaagacctttaatcaaaactcacaatttatccaacatcagagaattcattttggtgaaaaacactatgaatctaaggagtatgggaagtcctttagtcgtggctcactcgttactcgacatcagaggattcacactggtaaaaaaccctatgaatgtaaggaatgtggcaaggcttttagttgtagttcatatttttctcaacatcagaggattcacactggtgagaaaccctatgaatgtaaggaatgtggaaaagcctttaagtattgctcaaaccttaatgatcatcagagaattcacactggtgagaaaccctatgaatgtaaagtatgtggaaaagcctttactaaaagttcacaactttttctacatctgagaattcatactggtgagaaaccttatgaatgtaaagaatgtgggaaagcctttactcaacactcaaggcttattcagcatcagagaatgcatactggtgagaaaccttatgaatgtaagcagtgtgggaaggcctttaatagtgcctcaacacttactaaccatcacagaattcatgctggtgagaagctctatgaatgtgaagaatgtagaaaggcctttattcagagctcagaacttattcaacatcagagaatccatacagatgaaaaaccatatgaatgtaatgaatgtgggaaggcctttaataaaggctcaaatcttactcgacatcagagaattcacactggtgagaaaccctatgactgtaaggaatgtggaaaggcttttggtagtcgctctgacctcattcgccatgagggaattcatactggttagtaatgaactagtccgtaacttgaaagtatttcgatttcttggctttatatatcttgtggaaaggacgagttcttcgagtaacaatcctgcag

SEQ ID NO: 765 - DNA, 3932 bp, Homo sapiens
  source 1..3932: mol_type = genomic DNA
accgccaccatgcgatccaaggcgagggcgaggaagctagccaaaagtgacggtgacgttgtaaataatatgtatgagcccaaccgggacctgctggccagccacagcgcggaggacgaggccgaggacagtgccatgtcgcccatccccgtggggccaccgtcccccttccccaccagcgaggacttcacccccaaggagggctcgccgtacgaggcccctgtctacattcctgaagacattccgatcccagcagacttcgagctccgagagtcctccatcccaggggctggcctgggggtctgggccaagaggaagatggaagccggggagaggctgggcccctgcgtggtggtgccccgggcggcggcaaaggagacagacttcggatgggagcaaatactgacggacgtggaagtgtcgccccaggaaggctgcatcacaaagatctccgaagacctgggcagtgagaagttctgcgtggatgcaaatcaggcgggggctggcagctggctcaagtacatccgtgtggcgtgctcctgcgatgaccagaacctcaccatgtgtcagatcagtgagcagatttactataaagtcattaaggacattgagccaggtgaggagctgctggtgcacgtgaaggaaggcgtctaccccctgggcacagtgccgcccggcctggacgaggagcccacgttccgctgtgacgagtgtgacgaactcttccagtccaagctggacctgcggcgccataagaagtacacgtgtggctcagtgggggctgcgctctacgagggcctggctgaggagctcaagcccgagggccttggcggtggcagcggccaagcccacgagtgcaaggactgcgagcggatgttccccaacaagtacagcctggagcagcacatggtcatccacacggaggagcgcgagtacaaatgcgaccagtgtcccaaggccttcaactggaagtccaacctcatccgccaccagatgtcccacgacagcggcaaacgcttcgaatgtgaaaactgcgtgaaggtgttcacggaccccagcaaccttcagcggcacatccgctcgcagcacgtgggcgctcgggcccacgcctgccccgactgcgggaagaccttcgccacgtcctccggcctcaagcagcacaagcatatccacagcacggtgaagcctttcatatgtgaggtctgccacaagtcctacacgcagttctccaacctgtgccggcacaagcggatgcacgccgactgccgcacgcagatcaagtgcaaggactgtggccagatgttcagcactacctcctccctcaacaagcaccggcgcttctgcgagggcaagaaccattacacgccgggcggcatctttgccccgggcctgcccttgacccccagccccatgatggacaaggcaaaaccctcccccagcctcaatcacgccagcctgggcttcaacgagtactttccctccaggccgcacccggggagcctgcccttctccacggcgcctcccacgttccccgcactcacccccggcttcccgggcatcttccctccatccttgtacccccggccgcctctgctacctcccacatcgctgctcaagagccccctgaaccacacccaggacgccaagctccccagtcccctggggaacccagccctgcccctggtctccgccgtcagcaacagcagccagggcacgacggcagctgcggggcccgaggagaagttcgagagccgcctggaggactcctgtgtggagaagctgaagaccaggagcagcgacatgtcggacggcagtgactttgaggacgtcaacaccaccacggggaccgacctggacacgaccacggggacgggctcggacctggacagcgacgtggacagcgaccctgacaaggacaagggcaagggcaagtccgccgagggccagcccaagtttgggggcggcttggcgcccccgggggccccgaacagcgtggccgaggtgcctgtcttctattcccagcactcattcttcccgccacccgacgagcagctgctgactgcaacgggcgccgccggggactccatcaaggccatcgcatccattgccgagaagtactttggccccggcttcatggggatgcaggagaagaagctgggctcgctcccctaccactcggcgttccccttccagttcctgcccaacttcccccactccctttaccccttcacggaccgagccctcgcccacaacttgctggtcaaggccgagccaaagtcaccccgggacgccctcaaggtgggcggccccagtgccgagtgcccctttgatctcaccaccaagcccaaagacgtgaagcccatcctgcccatgcccaagggcccctcggcccccgcatccggcgaggagcagccgctggacctgagcatcggcagccgggcccgtgccagccaaaacggcggcgggcgggagccccgcaagaaccacgtctatggggaacgcaagctgggcgccggcgaggggctgccccaggtgtgcccggcgcggatgccccagcagcccccgctccactacgccaagccctcgcccttcttcatggaccccatctacagcagggtagaaaagcggaaggtcacagaccccgtgggagccctgaaggagaagtacctgcggccgtccccgctgctcttccacccccagatgtcagccatagagaccatgacagagaagctggagagctttgcagccatgaaggcggactcgggcagctccctgcagcccctcccccaccaccccttcaacttccggtccccacccccaacgctctccgaccccatcctcaggaagggcaaggagcgatacacgtgcaggtactgtgggaagatcttccccagatcagccaatctcaccagacacctgaggacgcacactggggagcagccgtacaggtgtaagtactgcgaccgctccttcagcatctcttcgaacctccagcggcacgtccggaacatccacaacaaggagaagcctttcaagtgccacctgtgcaaccgctgcttcgggcagcagaccaacctggaccggcacctcaagaagcacgagcacgagaacgcaccagtgagccagcaccccggggtcctcacgaaccacctggggaccagcgcgtcctctcccacctcagagtcggacaaccacgcacttttagacgagaaagaagactcttatttctcggaaatcagaaactttattgccaatagtgagatgaaccaagcatcaacgcgaacagagaaacgggcggacatgcagatcgtggacggcagtgcccagtgtccaggcctagccagtgagaagcaggaggacgtggaggaggaggacgacgatgacctggaggaggacgatgaggacagcctggccgggaagtcgcaggatgacaccgtgtcccccgcacccgagccccaggccgcctacgaggatgaggaggatgaggagccagccgcctccctggccgtgggctttgaccacacccgaaggtgtgctgaggaccacgaaggcggtctgttagctttggagccgatgccgacttttgggaaggggctggacctccgcagagcagctgaggaagcatttgaagttaaagatgtgcttaattccaccttagattctgaggctttaaaacatacactgtgcaggcaggctaagaaccaggcatatgcaatgatgctgtccctttccgaagacactcctctccacaccccctcccagggttctctggacgcttggttgaaggtcactggagccacgtcggagtctggagcatttcaccccatcaaccacctctagtaatgaactagtccgtaacttgaaagtatttcgatttcttggctttatatatcttgtggaaaggacgacgactaaatatgcttcccacgtgc

SEQ ID NO: 766 - DNA, 3638 bp, Homo sapiens
  source 1..3638: mol_type = genomic DNA
accgccaccatgcgatccaaggcgagggcgaggaagctagccaaaagtgacggtgacgttgtaaataatatgtatgagcccaaccgggacctgctggccagccacagcgcggaggacgaggccgaggacagtgccatgtcgcccatccccgtggggccaccgtcccccttccccaccagcgaggacttcacccccaaggagggctcgccgtacgaggcccctgtctacattcctgaagacattccgatcccagcagacttcgagctccgagagtcctccatcccaggggctggcctgggggtctgggccaagaggaagatggaagccggggagaggctgggcccctgcgtggtggtgccccgggcggcggcaaaggagacagacttcggatgggagcaaatactgacggacgtggaagtgtcgccccaggaaggctgcatcacaaagcagatctccgaagacctgggcagtgagaagttctgcgtggatgcaaatcaggcgggggctggcagctggctcaagtacatccgtgtggcgtgctcctgcgatgaccagaacctcaccatgtgtcagatcagtgagcagatttactataaagtcattaaggacattgagccaggtgaggagctgctggtgcacgtgaaggaaggcgtctaccccctgggcacagtgccgcccggcctggacgaggagcccacgttccgctgtgacgagtgtgacgaactcttccagtccaagctggacctgcggcgccataagaagtacacgtgtggctcagtgggggctgcgctctacgagggcctggctgaggagctcaagcccgagggccttggcggtggcagcggccaagcccacgagtgcaaggactgcgagcggatgttccccaacaagtacagcctggagcagcacatggtcatccacacggaggagcgcgagtacaaatgcgaccagtgtcccaaggccttcaactggaagtccaacctcatccgccaccagatgtcccacgacagcggcaaacgcttcgaatgtgaaaactgcgtgaaggtgttcacggaccccagcaaccttcagcggcacatccgctcgcagcacgtgggcgctcgggcccacgcctgccccgactgcgggaagaccttcgccacgtcctccggcctcaagcagcacaagcatatccacagcacggtgaagcctttcatatgtgaggtctgccacaagtcctacacgcagttctccaacctgtgccggcacaagcggatgcacgccgactgccgcacgcagatcaagtgcaaggactgtggccagatgttcagcactacctcctccctcaacaagcaccggcgcttctgcgagggcaagaaccattacacgccgggcggcatctttgccccgggcctgcccttgacccccagccccatgatggacaaggcaaaaccctcccccagcctcaatcacgccagcctgggcttcaacgagtactttccctccaggccgcacccggggagcctgcccttctccacggcgcctcccacgttccccgcactcacccccggcttcccgggcatcttccctccatccttgtacccccggccgcctctgctacctcccacatcgctgctcaagagccccctgaaccacacccaggacgccaagctccccagtcccctggggaacccagccctgcccctggtctccgccgtcagcaacagcagccagggcacgacggcagctgcggggcccgaggagaagttcgagagccgcctggaggactcctgtgtggagaagctgaagaccaggagcagcgacatgtcggacggcagtgactttgaggacgtcaacaccaccacggggaccgacctggacacgaccacggggacgggctcggacctggacagcgacgtggacagcgaccctgacaaggacaagggcaagggcaagtccgccgagggccagcccaagtttgggggcggcttggcgcccccgggggccccgaacagcgtggccgaggtgcctgtcttctattcccagcactcattcttcccgccacccgacgagcagctgctgactgcaacgggcgccgccggggactccatcaaggccatcgcatccattgccgagaagtactttggccccggcttcatggggatgcaggagaagaagctgggctcgctcccctaccactcggcgttccccttccagttcctgcccaacttcccccactccctttaccccttcacggaccgagccctcgcccacaacttgctggtcaaggccgagccaaagtcaccccgggacgccctcaaggtgggcggccccagtgccgagtgcccctttgatctcaccaccaagcccaaagacgtgaagcccatcctgcccatgcccaagggcccctcggcccccgcatccggcgaggagcagccgctggacctgagcatcggcagccgggcccgtgccagccaaaacggcggcgggcgggagccccgcaagaaccacgtctatggggaacgcaagctgggcgccggcgaggggctgccccaggtgtgcccggcgcggatgccccagcagcccccgctccactacgccaagccctcgcccttcttcatggaccccatctacagcagggtagaaaagcggaaggtcacagaccccgtgggagccctgaaggagaagtacctgcggccgtccccgctgctcttccacccccagatgtcagccatagagaccatgacagagaagctggagagctttgcagccatgaaggcggactcgggcagctccctgcagcccctcccccaccaccccttcaacttccggtccccacccccaacgctctccgaccccatcctcaggaagggcaaggagcgatacacgtgcaggtactgtgggaagatcttccccagatcagccaatctcaccagacacctgaggacgcacactggggagcagccgtacaggtgtaagtactgcgaccgctccttcagcatctcttcgaacctccagcggcacgtccggaacatccacaacaaggagaagcctttcaagtgccacctgtgcaaccgctgcttcgggcagcagaccaacctggaccggcacctcaagaagcacgagcacgagaacgcaccagtgagccagcaccccggggtcctcacgaaccacctggggaccagcgcgtcctctcccacctcagagtcggacaaccacgcacttttagacgagaaagaagactcttatttctcggaaatcagaaactttattgccaatagtgagatgaaccaagcatcaacgcgaacagagaaacgggcggacatgcagatcgtggacggcagtgcccagtgtccaggcctagccagtgagaagcaggaggacgtggaggaggaggacgacgatgacctggaggaggacgatgaggacagcctggccgggaagtcgcaggatgacaccgtgtcccccgcacccgagccccaggccgcctacgaggatgaggaggatgaggagccagccgcctccctggccgtgggctttgaccacacccgaaggcatatgcaatagtaatgaactagtccgtaacttgaaagtatttcgatttcttggctttatatatcttgtggaaaggacgaataggtccgagaattcaaccgcct

SEQ ID NO: 767 - DNA, 3875 bp, Homo sapiens
  source 1..3875: mol_type = genomic DNA
accgccaccatgcgatccaaggcgagggcgaggaagctagccaaaagtgacggtgacgttgtaaataatatgtatgagcccaaccgggacctgctggccagccacagcgcggaggacgaggccgaggacagtgccatgtcgcccatccccgtggggccaccgtcccccttccccaccagcgaggacttcacccccaaggagggctcgccgtacgaggcccctgtctacattcctgaagacattccgatcccagcagacttcgagctccgagagtcctccatcccaggggctggcctgggggtctgggccaagaggaagatggaagccggggagaggctgggcccctgcgtggtggtgccccgggcggcggcaaaggagacagacttcggatgggagcaaatactgacggacgtggaagtgtcgccccaggaaggctgcatcacaaagatctccgaagacctgggcagtgagaagttctgcgtggatgcaaatcaggcgggggctggcagctggctcaagtacatccgtgtggcgtgctcctgcgatgaccagaacctcaccatgtgtcagatcagtgagcagatttactataaagtcattaaggacattgagccaggtgaggagctgctggtgcacgtgaaggaaggcgtctaccccctgggcacagtgccgcccggcctggacgaggagcccacgttccgctgtgacgagtgtgacgaactcttccagtccaagctggacctgcggcgccataagaagtacacgtgtggctcagtgggggctgcgctctacgagggcctggctgaggagctcaagcccgagggccttggcggtggcagcggccaagcccacgagtgcaaggactgcgagcggatgttccccaacaagtacagcctggagcagcacatggtcatccacacggaggagcgcgagtacaaatgcgaccagtgtcccaaggccttcaactggaagtccaacctcatccgccaccagatgtcccacgacagcggcaaacgcttcgaatgtgaaaactgcgtgaaggtgttcacggaccccagcaaccttcagcggcacatccgctcgcagcacgtgggcgctcgggcccacgcctgccccgactgcgggaagaccttcgccacgtcctccggcctcaagcagcacaagcatatccacagcacggtgaagcctttcatatgtgaggtctgccacaagtcctacacgcagttctccaacctgtgccggcacaagcggatgcacgccgactgccgcacgcagatcaagtgcaaggactgtggccagatgttcagcactacctcctccctcaacaagcaccggcgcttctgcgagggcaagaaccattacacgccgggcggcatctttgccccgggcctgcccttgacccccagccccatgatggacaaggcaaaaccctcccccagcctcaatcacgccagcctgggcttcaacgagtactttccctccaggccgcacccggggagcctgcccttctccacggcgcctcccacgttccccgcactcacccccggcttcccgggcatcttccctccatccttgtacccccggccgcctctgctacctcccacatcgctgctcaagagccccctgaaccacacccaggacgccaagctccccagtcccctggggaacccagccctgcccctggtctccgccgtcagcaacagcagccagggcacgacggcagctgcggggcccgaggagaagttcgagagccgcctggaggactcctgtgtggagaagctgaagaccaggagcagcgacatgtcggacggcagtgactttgaggacgtcaacaccaccacggggaccgacctggacacgaccacggggacgggctcggacctggacagcgacgtggacagcgaccctgacaaggacaagggcaagggcaagtccgccgagggccagcccaagtttgggggcggcttggcgcccccgggggccccgaacagcgtggccgaggtgcctgtcttctattcccagcactcattcttcccgccacccgacgagcagctgctgactgcaacgggcgccgccggggactccatcaaggccatcgcatccattgccgagaagtactttggccccggcttcatggggatgcaggagaagaagctgggctcgctcccctaccactcggcgttccccttccagttcctgcccaacttcccccactccctttaccccttcacggaccgagccctcgcccacaacttgctggtcaaggccgagccaaagtcaccccgggacgccctcaaggtgggcggccccagtgccgagtgcccctttgatctcaccaccaagcccaaagacgtgaagcccatcctgcccatgcccaagggcccctcggcccccgcatccggcgaggagcagccgctggacctgagcatcggcagccgggcccgtgccagccaaaacggcggcgggcgggagccccgcaagaaccacgtctatggggaacgcaagctgggcgccggcgaggggctgccccaggtgtgcccggcgcggatgccccagcagcccccgctccactacgccaagccctcgcccttcttcatggaccccatctacagcagggtagaaaagcggaaggtcacagaccccgtgggagccctgaaggagaagtacctgcggccgtccccgctgctcttccacccccagatgtcagccatagagaccatgacagagaagctggagagctttgcagccatgaaggcggactcgggcagctccctgcagcccctcccccaccaccccttcaacttccggtccccacccccaacgctctccgaccccatcctcaggaagggcaaggagcgatacacgtgcaggtactgtgggaagatcttccccagatcagccaatctcaccagacacctgaggacgcacactggggagcagccgtacaggtgtaagtactgcgaccgctccttcagcatctcttcgaacctccagcggcacgtccggaacatccacaacaaggagaagcctttcaagtgccacctgtgcaaccgctgcttcgggcagcagaccaacctggaccggcacctcaagaagcacgagcacgagaacgcaccagtgagccagcaccccggggtcctcacgaaccacctggggaccagcgcgtcctctcccacctcagagtcggacaaccacgcacttttagacgagaaagaagactcttatttctcggaaatcagaaactttattgccaatagtgagatgaaccaagcatcaacgcgaacagagaaacgggcggacatgcagatcgtggacggcagtgcccagtgtccaggcctagccagtgagaagcaggaggacgtggaggaggaggacgacgatgacctggaggaggacgatgaggacagcctggccgggaagtcgcaggatgacaccgtgtcccccgcacccgagccccaggccgcctacgaggatgaggaggatgaggagccagccgcctccctggccgtgggctttgaccacacccgaaggtgtgctgaggaccacgaaggcggtctgttagctttggagccgatgccgacttttgggaaggggctggacctccgcagagcagctgaggaagcatttgaagttaaagatgtgcttaattccaccttagattctgaggctttaaaacatacactgtgcaggcaggctaagaaccagggttctctggacgcttggttgaaggtcactggagccacgtcggagtctggagcatttcaccccatcaaccacctctagtaatgaactagtccgtaacttgaaagtatttcgatttcttggctttatatatcttgtggaaaggacgatagatattaagcaacgggctgtta

SEQ ID NO: 768 - DNA, 1817 bp, Homo sapiens
  source 1..1817: mol_type = genomic DNA
accgccaccatggctctaccccggccaagtgaggccgtgcctcaggacaaggtgtgctacccgccggagagcagcccgcagaacctggccgcgtactacacgcctttcccgtcctatggacactacagaaacagcctggccaccgtggaggaagacttccaacctttccggcagctggaggccgcagcgtctgctgcccccgccatgccccccttccccttccggatggcgcctcccttgctgagcccgggtctgggcctacagagggagcctctctacgatctgccctggtacagcaagctgccaccgtggtacccaattccccacgtccccagggaagtgccgcccttcctgagcagcagccacgagtacgcgggtgccagcagtgaagatctgggccaccaaatcattggtggcgacaacgagagtggcccgtgttgtggacctgacactttaattccaccgccccctgcggatgcttctctgttacctgaggggctgaggacctcccagttattaccttgctcacccagcaagcagtcagaggatggtcccaaaccctccaaccaagaagggaagtcccctgctcggttccagttcacggaggaggacctgcacttcgttctgtacggggtcactcccagcctggagcacccagccagcctgcaccatgcgatttcaggcctcctggtccccccagacagctctggatctgattctcttcctcaaactctggataaagactcccttcaacttccagaaggtctatgcctcatgcagacggtgtttggtgaagtcccacattttggtgtgttctgcagtagttttatcgccaaaggagtcaggtttgggccctttcaaggtaaagtggtcaatgccagtgaagtgaagacctacggagacaattctgtgatgtgggagatctttgaagatggtcatttgagccactttatagatggaaaaggaggtacggggaactggatgtcctatgtcaactgtgcccgcttccccaaggagcagaacctagttgctgtgcagtgtcaagggcatatattttatgagagctgcaaagagatccatcagaaccaagagctccttgtgtggtatggagactgctatgagaaatttctggatattcctgtgagccttcaggtcacagagccggggaagcagccatctgggccctctgaagagtctgcagaaggctacagatgtgaaagatgtgggaaggtatttacctacaaatattacagagataagcacctcaagtacaccccctgtgtggacaagggcgataggaaatttccctgttctctctgcaaacgatcctttgagaagcgggaccggcttcggatccacattcttcatgttcatgagaagcaccggcctcacaagtgttctacatgtgggaaatgtttctctcaatcttccagcctaaacaaacacatgcgagtccactctggagacagaccataccagtgtgtgtattgtactaagaggttcacagcctccagcatactccgcacacacatcaggcagcactccggggagaagcccttcaaatgcaagtactgtggtaaatcttttgcatcccatgctgcccatgacagccatgtccggcgttcacacaaggaggatgatggctgctcatgcagcatctgtgggaaaatcttctcagatcaagaaacattctactcccacatgaagtttcatgaagactactagtaatgaactagtccgtaacttgaaagtatttcgatttcttggctttatatatcttgtggaaaggacgagagccacagttcgccacgagctat

SEQ ID NO: 769 - DNA, 3698 bp, Homo sapiens
  source 1..3698: mol_type = genomic DNA
accgccaccatgccccgccgccgccccccggcttccggtgctgcgcagtttccggagcggatcgcaacccggagtccggatccgatcccgctctgcacattccaaaggcaggtgtcagagatggctgaagatgggagcgaagagatcatgttcatctggtgtgaagactgcagccagtaccacgactccgaatgtcccgagctgggcccagtggtcatggtcaaagactcctttgtgttaagcagggcaaggtcatcccttcctcccaacttggagatcagacgactggaagatggagccgagggggtgttcgccatcactcagctcgtcaagcggacacagttcggtccctttgagtccaggagggtcgccaaatgggaaaaggagtctgcatttcccctgaaggtgttccagaaggacgggcaccccgtgtgcttcgacacctccaacgaggatgactgcaactggatgatgctggtgcggccagcggcggaggccgagcaccagaacctgacggcctaccagcacggcagcgacgtgtacttcaccacctccagagacatccccccgggtaccgagctgcgcgtgtggtatgcggccttctatgccaagaagatggacaagcccatgctgaagcaggccggctctggcgtccacgctgcaggcaccccagaaaacagcgcccccgtggagtcggagcccagccagtgggcgtgtaaagtgtgttctgccaccttcctggagctgcagctcctcaatgaacatctgttgggccacttagaacaagccaaaagccttcctccaggcagccaaagcgaggcagcagctcccgagaaggagcaggacacaccccggggggaaccccctgcagtgcccgagagcgagaatgttgccaccaaagaacagaagaaaaagcctcgaagggggagaaaacccaaagtgtccaaagctgagcagcctctagtcatcgtggaagacaaggaacccacagagcaagtggcagagatcattaccgaggtccctccggatgagcctgtgagtgcaacgccagatgagcggatcatggagctggttctggggaagctggccaccaccaccactgacaccagctcggttccaaagttcacccatcatcagaataacaccatcacgctcaagaggagcttaattctctcaagcagacacggcatccggcgcaagctcatcaaacagctcggggagcacaagcgggtttaccagtgcaatatctgcagcaagatcttccagaacagcagcaacctgagcaggcacgtgcgctcgcatggtgacaagctgtttaagtgcgaagagtgtgcaaaattgttcagccgcaaagagagcctaaagcagcacgtttcctacaagcacagcaggaacgaggtggacggcgagtacaggtaccgctgcggcacttgtgagaagaccttccgcatcgagagcgcgctggagttccacaactgcaggacaggactcatagcacaccctggagagggggggcccggcggcagtcggcttagagacctaccagatgacaagacgttccaatgtgagatgtgtttcagattcttctccaccaacagcaacctctccaagcacaagaagaagcacggcgacaagaagtttgcctgtgaggtctgcagcaagatgttctaccgcaaggacgtcatgctggaccaccagcgccggcacctggaaggagtgcggcgagtgaagcgagaggacctggaggccggtggggagaacctggtccgttacaagaaggagccttccgggtgcccggtgtgtggcaaggtgttctcctgccggagcaatatgaacaagcacctgctcacccacggcgacaagaagtacacctgcgagatctgcgggcgcaagttcttccgcgtggatgtgctcagggaccacatccatgtccacttcaaggacatcgcgttgatggatgaccaccagagggaagagtttatcggcaagatcgggatctcctcggaagaaaacgatgacaattctgacgagagcgcagactcggagcctcacaagtacagctgcaagcggtgccagctcaccttcggccgggggaaggagtacctgaagcacatcatggaggtgcacaaggagaagggctatggctgcagcatctgcaaccggcgctttgcactgaaggccacctaccacgcccacatggtcatccaccgtgaaaacctgccggaccccaacgtgcagaagtacatccacccctgcgagatctgcgggcggatcttcaacagcatcgggaacctggagcgccacaagctcatccacacaggtgtgaagagccacgcctgcgagcagtgtgggaagtcctttgccaggaaggacatgctgaaggagcacatgcgtgtgcacgacaatgtccgcgagtacctgtgtgccgagtgtgggaaaggcatgaagaccaagcacgcgctgcgccaccacatgaagctgcacaagggcatcaaggagtacgagtgcaaggagtgccaccgcaggttcgcgcagaaggtcaacatgctcaagcactgcaagcggcacacggggattaaagatttcatgtgtgaattgtgtgggaagacattcagcgagaggaacaccatggagacccacaagctcatccacacagtgggcaagcagtggacgtgctccgtgtgcgacaagaagtacgtgaccgagtacatgctgcagaagcacgttcagctcacacacgacaaggtggaggcgcagagctgccagctgtgcgggaccaaggtgtccaccagggcctccatgagccgacacatgcggcgcaagcaccccgaggtgctcgcggtgaggatcgatgacctggaccacctcccggagaccaccaccatcgacgcctcctccattggcatcgtccagcctgagctgactctggagcaggaggatttggccgaagggaagcacgggaaagctgccaagcgaagtcacaagagaaagcagaagccagaagaggaggcgggtgctccggtgcccgaggacgccaccttcagcgaatactcagagaaagagacggagttcacaggcagtgtaggcgacgagaccaattccgcagtacagagcattcagcaggtagtggtgaccctgggtgacccaaatgtgaccacaccatcgagctcagtcggcttaaccaacatcaccgtgacccccatcaccactgcggccgcgactcagtttaccaatctccagccggtggccgtggggcaccttaccacccctgaacgccagttacagctggacaactcaatcctgaccgtgacctttgataccgtcagcggctctgccatgttgcacaaccgccaaaatgacgtccagatccacccccagccggaagcctcgaacccacagtctgtggcccatttcatcaacctgacgaccctggtcaactccatcacgcccctggggagccagcttagtgaccagcacccgctcacgtggcgggcagtgccccagactgacgtcttgccaccctcgcagccgcaggcacccccacagcaggcggcccagccccaggtgcaggcggagcagcagcagcagcagatgtacagctactagtaatgaactagtccgtaacttgaaagtatttcgatttcttggctttatatatcttgtggaaaggacgaaacgcgatcatcctgtaagcctaa

SEQ ID NO: 770 - DNA, 3638 bp, Homo sapiens
  source 1..3638: mol_type = genomic DNA
accgccaccatgccccgccgccgccccccggcttccggtgctgcgcagtttccggagcggatcgcaacccggagtccggatccgatcccgctctgcacattccaaaggcaggtgtcagagatggctgaagatgggagcgaagagatcatgttcatctggtgtgaagactgcagccagtaccacgactccgaatgtcccgagctgggcccagtggtcatggtcaaagactcctttgtgttaagcagggcaaggtcatcccttcctcccaacttggagatcagacgactggaagatggagccgagggggtgttcgccatcactcagctcgtcaagcggacacagttcggtccctttgagtccaggagggtcgccaaatgggaaaaggagtctgcatttcccctgaaggtgttccagaaggacgggcaccccgtgtgcttcgacacctccaacgaggatgactgcaactggatgatgctggtgcggccagcggcggaggccgagcaccagaacctgacggcctaccagcacggcagcgacgtgtacttcaccacctccagagacatccccccgggtaccgagctgcgcgtgtggtatgcggccttctatgccaagaagatggacaagcccatgctgaagcaggccggctctggcgtccacgctgcaggcaccccagaaaacagcgcccccgtggagtcggagcccagccagtgggcgtgtaaagtgtgttctgccaccttcctggagctgcagctcctcaatgaacatctgttgggccacttagaacaagccaaaagccttcctccaggcagccaaagcgaggcagcagctcccgagaaggagcaggacacaccccggggggaaccccctgcagtgcccgagagcgagaatgttgccaccaaagaacagaagaaaaagcctcgaagggggagaaaacccaaagtgtccaaagctgagcagcctctagtcatcgtggaagacaaggaacccacagagcaagtggcagagatcattaccgaggtccctccggatgagcctgtgagtgcaacgccagatgagcggatcatggagctggttctggggaagctggccaccaccaccactgacaccagctcggttccaaagttcacccatcatcagaataacaccatcacgctcaagaggagcttaattctctcaagcagacacggcatccggcgcaagctcatcaaacagctcggggagcacaagcgggtttaccagtgcaatatctgcagcaagatcttccagaacagcagcaacctgagcaggcacgtgcgctcgcatggtgacaagctgtttaagtgcgaagagtgtgcaaaattgttcagccgcaaagagagcctaaagcagcacgtttcctacaagcacagcaggaacgaggtggacggcgagtacaggtaccgctgcggcacttgtgagaagaccttccgcatcgagagcgcgctggagttccacaactgcaggacagatgacaagacgttccaatgtgagatgtgtttcagattcttctccaccaacagcaacctctccaagcacaagaagaagcacggcgacaagaagtttgcctgtgaggtctgcagcaagatgttctaccgcaaggacgtcatgctggaccaccagcgccggcacctggaaggagtgcggcgagtgaagcgagaggacctggaggccggtggggagaacctggtccgttacaagaaggagccttccgggtgcccggtgtgtggcaaggtgttctcctgccggagcaatatgaacaagcacctgctcacccacggcgacaagaagtacacctgcgagatctgcgggcgcaagttcttccgcgtggatgtgctcagggaccacatccatgtccacttcaaggacatcgcgttgatggatgaccaccagagggaagagtttatcggcaagatcgggatctcctcggaagaaaacgatgacaattctgacgagagcgcagactcggagcctcacaagtacagctgcaagcggtgccagctcaccttcggccgggggaaggagtacctgaagcacatcatggaggtgcacaaggagaagggctatggctgcagcatctgcaaccggcgctttgcactgaaggccacctaccacgcccacatggtcatccaccgtgaaaacctgccggaccccaacgtgcagaagtacatccacccctgcgagatctgcgggcggatcttcaacagcatcgggaacctggagcgccacaagctcatccacacaggtgtgaagagccacgcctgcgagcagtgtgggaagtcctttgccaggaaggacatgctgaaggagcacatgcgtgtgcacgacaatgtccgcgagtacctgtgtgccgagtgtgggaaaggcatgaagaccaagcacgcgctgcgccaccacatgaagctgcacaagggcatcaaggagtacgagtgcaaggagtgccaccgcaggttcgcgcagaaggtcaacatgctcaagcactgcaagcggcacacggggattaaagatttcatgtgtgaattgtgtgggaagacattcagcgagaggaacaccatggagacccacaagctcatccacacagtgggcaagcagtggacgtgctccgtgtgcgacaagaagtacgtgaccgagtacatgctgcagaagcacgttcagctcacacacgacaaggtggaggcgcagagctgccagctgtgcgggaccaaggtgtccaccagggcctccatgagccgacacatgcggcgcaagcaccccgaggtgctcgcggtgaggatcgatgacctggaccacctcccggagaccaccaccatcgacgcctcctccattggcatcgtccagcctgagctgactctggagcaggaggatttggccgaagggaagcacgggaaagctgccaagcgaagtcacaagagaaagcagaagccagaagaggaggcgggtgctccggtgcccgaggacgccaccttcagcgaatactcagagaaagagacggagttcacaggcagtgtaggcgacgagaccaattccgcagtacagagcattcagcaggtagtggtgaccctgggtgacccaaatgtgaccacaccatcgagctcagtcggcttaaccaacatcaccgtgacccccatcaccactgcggccgcgactcagtttaccaatctccagccggtggccgtggggcaccttaccacccctgaacgccagttacagctggacaactcaatcctgaccgtgacctttgataccgtcagcggctctgccatgttgcacaaccgccaaaatgacgtccagatccacccccagccggaagcctcgaacccacagtctgtggcccatttcatcaacctgacgaccctggtcaactccatcacgcccctggggagccagcttagtgaccagcacccgctcacgtggcgggcagtgccccagactgacgtcttgccaccctcgcagccgcaggcacccccacagcaggcggcccagccccaggtgcaggcggagcagcagcagcagcagatgtacagctactagtaatgaactagtccgtaacttgaaagtatttcgatttcttggctttatatatcttgtggaaaggacgaagaaccatgaagcggatttactga

SEQ ID NO: 771 - DNA, 4625 bp, Homo sapiens
  source 1..4625: mol_type = genomic DNA
accgccaccatgccccgccgccgccccccggcttccggtgctgcgcagtttccggagcggatcgcaacccggagtccggatccgatcccgctctgcacattccaaaggcagccgcgcgccgccccggtccagccgccatgccgactgttctttgttacattcgccggctgcgggcaccgttggcgatcggagtcaaaacccggctggatttcccggagccgctccgggatcgccctgcgcgccgcccgcccgccggggtcttcgccgccccggcccgcggccccgcggcccccgccgccgggcggcgtcgtcgccgaggccccaggggatgtcgttatcccccgccctcgggtacagcccatgcgggtcgcacgggggggtccctggacccccaaccccgcgtttagagaagctgagtcctggtcccagattgggaaccagagggtcagtgagcagctcttggaaacatctctagggaatgaggtgtccgacactgagccactgagccctgcgagtgcaggcctgcgacgcaatcctgccctacctcctggaccctttgcacaaaacttttcctgggggaaccaggaaaatctgcccccagccctggggaagattgcgaacggaggaggaactggggcaggcaaggccgaatgcggctatgaaactgagtcacacttgctagagccgcacgagatacctttgaacgtgaatacacacaagttcagtgactgtgagtttccatatgagttttgcacggtctgcttttcacccttcaagctgctggggatgagcggggtggagggcgtgtggaatcagcattcaagaagtgccagcatgcacactttcctaaaccactcagcaacgggcatcagagaagcaggttgcaggaaggacatgccggtgtcagagatggctgaagatgggagcgaagagatcatgttcatctggtgtgaagactgcagccagtaccacgactccgaatgtcccgagctgggcccagtggtcatggtcaaagactcctttgtgttaagcagggcaaggtcttggcctgccagcggacacgtgcacacccaggcggggcaggggatgcggggttatgaggacagggacagggctgacccacagcagcttccagaagcagtccctgcaggcctggtgaggcggctcagtgggcagcagctgccctgccgttccaccctcacctgggggaggctgtgccacctggtggcccagggcaggtcatcccttcctcccaacttggagatcagacgactggaagatggagccgagggggtgttcgccatcactcagctcgtcaagcggacacagttcggtccctttgagtccaggagggtcgccaaatgggaaaaggagtctgcatttcccctgaaggtgttccagaaggacgggcaccccgtgtgcttcgacacctccaacgaggatgactgcaactggatgatgctggtgcggccagcggcggaggccgagcaccagaacctgacggcctaccagcacggcagcgacgtgtacttcaccacctccagagacatccccccgggtaccgagctgcgcgtgtggtatgcggccttctatgccaagaagatggacaagcccatgctgaagcaggccggctctggcgtccacgctgcaggcaccccagaaaacagcgcccccgtggagtcggagcccagccagtgggcgtgtaaagtgtgttctgccaccttcctggagctgcagctcctcaatgaacatctgttgggccacttagaacaagccaaaagccttcctccaggcagccaaagcgaggcagcagctcccgagaaggagcaggacacaccccggggggaaccccctgcagtgcccgagagcgagaatgttgccaccaaagaacagaagaaaaagcctcgaagggggagaaaacccaaagtgtccaaagctgagcagcctctagtcatcgtggaagacaaggaacccacagagcaagtggcagagatcattaccgaggtccctccggatgagcctgtgagtgcaacgccagatgagcggatcatggagctggttctggggaagctggccaccaccaccactgacaccagctcggttccaaagttcacccatcatcagaataacaccatcacgctcaagaggagcttaattctctcaagcagacacggcatccggcgcaagctcatcaaacagctcggggagcacaagcgggtttaccagtgcaatatctgcagcaagatcttccagaacagcagcaacctgagcaggcacgtgcgctcgcatggtgacaagctgtttaagtgcgaagagtgtgcaaaattgttcagccgcaaagagagcctaaagcagcacgtttcctacaagcacagcaggaacgaggtggacggcgagtacaggtaccgctgcggcacttgtgagaagaccttccgcatcgagagcgcgctggagttccacaactgcaggacagatgacaagacgttccaatgtgagatgtgtttcagattcttctccaccaacagcaacctctccaagcacaagaagaagcacggcgacaagaagtttgcctgtgaggtctgcagcaagatgttctaccgcaaggacgtcatgctggaccaccagcgccggcacctggaaggagtgcggcgagtgaagcgagaggacctggaggccggtggggagaacctggtccgttacaagaaggagccttccgggtgcccggtgtgtggcaaggtgttctcctgccggagcaatatgaacaagcacctgctcacccacggcgacaagaagtacacctgcgagatctgcgggcgcaagttcttccgcgtggatgtgctcagggaccacatccatgtccacttcaaggacatcgcgttgatggatgaccaccagagggaagagtttatcggcaagatcgggatctcctcggaagaaaacgatgacaattctgacgagagcgcagactcggagcctcacaagtacagctgcaagcggtgccagctcaccttcggccgggggaaggagtacctgaagcacatcatggaggtgcacaaggagaagggctatggctgcagcatctgcaaccggcgctttgcactgaaggccacctaccacgcccacatggtcatccaccgtgaaaacctgccggaccccaacgtgcagaagtacatccacccctgcgagatctgcgggcggatcttcaacagcatcgggaacctggagcgccacaagctcatccacacaggtgtgaagagccacgcctgcgagcagtgtgggaagtcctttgccaggaaggacatgctgaaggagcacatgcgtgtgcacgacaatgtccgcgagtacctgtgtgccgagtgtgggaaaggcatgaagaccaagcacgcgctgcgccaccacatgaagctgcacaagggcatcaaggagtacgagtgcaaggagtgccaccgcaggttcgcgcagaaggtcaacatgctcaagcactgcaagcggcacacggggattaaagatttcatgtgtgaattgtgtgggaagacattcagcgagaggaacaccatggagacccacaagctcatccacacagtgggcaagcagtggacgtgctccgtgtgcgacaagaagtacgtgaccgagtacatgctgcagaagcacgttcagctcacacacgacaaggtggaggcgcagagctgccagctgtgcgggaccaaggtgtccaccagggcctccatgagccgacacatgcggcgcaagcaccccgaggtgctcgcggtgaggatcgatgacctggaccacctcccggagaccaccaccatcgacgcctcctccattggcatcgtccagcctgagctgactctggagcaggaggatttggccgaagggaagcacgggaaagctgccaagcgaagtcacaagagaaagcagaagccagaagaggaggcgggtgctccggtgcccgaggacgccaccttcagcgaatactcagagaaagagacggagttcacaggcagtgtaggcgacgagaccaattccgcagtacagagcattcagcaggtagtggtgaccctgggtgacccaaatgtgaccacaccatcgagctcagtcggcttaaccaacatcaccgtgacccccatcaccactgcggccgcgactcagtttaccaatctccagccggtggccgtggggcaccttaccacccctgaacgccagttacagctggacaactcaatcctgaccgtgacctttgataccgtcagcggctctgccatgttgcacaaccgccaaaatgacgtccagatccacccccagccggaagcctcgaacccacagtctgtggcccatttcatcaacctgacgaccctggtcaactccatcacgcccctggggagccagcttagtgaccagcacccgctcacgtggcgggcagtgccccagactgacgtcttgccaccctcgcagccgcaggcacccccacagcaggcggcccagccccaggtgcaggcggagcagcagcagcagcagatgtacagctactagtaatgaactagtccgtaacttgaaagtatttcgatttcttggctttatatatcttgtggaaaggacgaccatgaggtaggccaagtgaccca

SEQ ID NO: 772 - DNA, 3527 bp, Homo sapiens
  source 1..3527: mol_type = genomic DNA
accgccaccatggctgaagatgggagcgaagagatcatgttcatctggtgtgaagactgcagccagtaccacgactccgaatgtcccgagctgggcccagtggtcatggtcaaagactcctttgtgttaagcagggcaaggtcatcccttcctcccaacttggagatcagacgactggaagatggagccgagggggtgttcgccatcactcagctcgtcaagcggacacagttcggtccctttgagtccaggagggtcgccaaatgggaaaaggagtctgcatttcccctgaaggtgttccagaaggacgggcaccccgtgtgcttcgacacctccaacgaggatgactgcaactggatgatgctggtgcggccagcggcggaggccgagcaccagaacctgacggcctaccagcacggcagcgacgtgtacttcaccacctccagagacatccccccgggtaccgagctgcgcgtgtggtatgcggccttctatgccaagaagatggacaagcccatgctgaagcaggccggctctggcgtccacgctgcaggcaccccagaaaacagcgcccccgtggagtcggagcccagccagtgggcgtgtaaagtgtgttctgccaccttcctggagctgcagctcctcaatgaacatctgttgggccacttagaacaagccaaaagccttcctccaggcagccaaagcgaggcagcagctcccgagaaggagcaggacacaccccggggggaaccccctgcagtgcccgagagcgagaatgttgccaccaaagaacagaagaaaaagcctcgaagggggagaaaacccaaagtgtccaaagctgagcagcctctagtcatcgtggaagacaaggaacccacagagcaagtggcagagatcattaccgaggtccctccggatgagcctgtgagtgcaacgccagatgagcggatcatggagctggttctggggaagctggccaccaccaccactgacaccagctcggttccaaagttcacccatcatcagaataacaccatcacgctcaagaggagcttaattctctcaagcagacacggcatccggcgcaagctcatcaaacagctcggggagcacaagcgggtttaccagtgcaatatctgcagcaagatcttccagaacagcagcaacctgagcaggcacgtgcgctcgcatggtgacaagctgtttaagtgcgaagagtgtgcaaaattgttcagccgcaaagagagcctaaagcagcacgtttcctacaagcacagcaggaacgaggtggacggcgagtacaggtaccgctgcggcacttgtgagaagaccttccgcatcgagagcgcgctggagttccacaactgcaggacagatgacaagacgttccaatgtgagatgtgtttcagattcttctccaccaacagcaacctctccaagcacaagaagaagcacggcgacaagaagtttgcctgtgaggtctgcagcaagatgttctaccgcaaggacgtcatgctggaccaccagcgccggcacctggaaggagtgcggcgagtgaagcgagaggacctggaggccggtggggagaacctggtccgttacaagaaggagccttccgggtgcccggtgtgtggcaaggtgttctcctgccggagcaatatgaacaagcacctgctcacccacggcgacaagaagtacacctgcgagatctgcgggcgcaagttcttccgcgtggatgtgctcagggaccacatccatgtccacttcaaggacatcgcgttgatggatgaccaccagagggaagagtttatcggcaagatcgggatctcctcggaagaaaacgatgacaattctgacgagagcgcagactcggagcctcacaagtacagctgcaagcggtgccagctcaccttcggccgggggaaggagtacctgaagcacatcatggaggtgcacaaggagaagggctatggctgcagcatctgcaaccggcgctttgcactgaaggccacctaccacgcccacatggtcatccaccgtgaaaacctgccggaccccaacgtgcagaagtacatccacccctgcgagatctgcgggcggatcttcaacagcatcgggaacctggagcgccacaagctcatccacacaggtgtgaagagccacgcctgcgagcagtgtgggaagtcctttgccaggaaggacatgctgaaggagcacatgcgtgtgcacgacaatgtccgcgagtacctgtgtgccgagtgtgggaaaggcatgaagaccaagcacgcgctgcgccaccacatgaagctgcacaagggcatcaaggagtacgagtgcaaggagtgccaccgcaggttcgcgcagaaggtcaacatgctcaagcactgcaagcggcacacggggattaaagatttcatgtgtgaattgtgtgggaagacattcagcgagaggaacaccatggagacccacaagctcatccacacagtgggcaagcagtggacgtgctccgtgtgcgacaagaagtacgtgaccgagtacatgctgcagaagcacgttcagctcacacacgacaaggtggaggcgcagagctgccagctgtgcgggaccaaggtgtccaccagggcctccatgagccgacacatgcggcgcaagcaccccgaggtgctcgcggtgaggatcgatgacctggaccacctcccggagaccaccaccatcgacgcctcctccattggcatcgtccagcctgagctgactctggagcaggaggatttggccgaagggaagcacgggaaagctgccaagcgaagtcacaagagaaagcagaagccagaagaggaggcgggtgctccggtgcccgaggacgccaccttcagcgaatactcagagaaagagacggagttcacaggcagtgtaggcgacgagaccaattccgcagtacagagcattcagcaggtagtggtgaccctgggtgacccaaatgtgaccacaccatcgagctcagtcggcttaaccaacatcaccgtgacccccatcaccactgcggccgcgactcagtttaccaatctccagccggtggccgtggggcaccttaccacccctgaacgccagttacagctggacaactcaatcctgaccgtgacctttgataccgtcagcggctctgccatgttgcacaaccgccaaaatgacgtccagatccacccccagccggaagcctcgaacccacagtctgtggcccatttcatcaacctgacgaccctggtcaactccatcacgcccctggggagccagcttagtgaccagcacccgctcacgtggcgggcagtgccccagactgacgtcttgccaccctcgcagccgcaggcacccccacagcaggcggcccagccccaggtgcaggcggagcagcagcagcagcagatgtacagctactagtaatgaactagtccgtaacttgaaagtatttcgatttcttggctttatatatcttgtggaaaggacgaacgagccctgcgatgtcgagtata

SEQ ID NO: 773 - DNA, 1205 bp, Homo sapiens
  source 1..1205: mol_type = genomic DNA
accgccaccatgatgggctccgtgctcccggctgaggccctggtgctcaagaccgggctgaaggcgccgggactggcgctggccgaggttatcacctccgacatcctgcacagcttcctgtacggccgctggcgcaacgtgctcggggagcagctcttcgaggacaagagccaccacgccagccccaagacagccttcaccgccgaggtgctggcgcagtccttctccggcgaagtgcagaagctgtccagcctggtgctgcctgcggaggtgatcatcgctcagagctccatccctggcgagggcctcggcatcttctccaagacgtggatcaaggcgggaaccgagatgggccccttcaccggccgcgtgatcgccccggagcacgtggacatctgcaagaacaacaacctcatgtgggaggtgttcaatgaggatggcacggtgcgctacttcatcgatgccagccaggaggaccaccggagctggatgacctacatcaagtgtgcacgtaacgaacaggagcagaacctggaggtggtccagatcggcaccagcatcttctacaaggccattgagatgatcccacctgaccaggaactgctggtgtggtacggaaactcacacaacaccttcctggggatcccaggtgtgcccgggctagaggaggaccagaaaaagaacaagcatgaggacttccacccggcggactcggcggctggccccgcgggccgcatgcgatgcgtcatctgccaccgcggcttcaactcgcgcagcaacctgcgctcgcacatgcgcatccacacgctggacaagcccttcgtgtgccgcttctgcaaccgccgcttcagccagtcgtccacgctgcgcaaccacgtgcgcctgcacacgggcgagcgcccctacaagtgccaggtgtgccagagcgcctactcgcagctggccggcctgcgcgcccaccagaagagcgcgcggcaccggccgcccagcaccgcgctgcaggcacactcgcccgcgctgcccgccccgcacgcgcacgcgcccgcgctcgccgccgccgccgccgccgccgccgccgccgccgcgcaccacctgccggccatggtgctgtagtaatgaactagtccgtaacttgaaagtatttcgatttcttggctttatatatcttgtggaaaggacgagccgcacgagctacgtcgcataga

SEQ ID NO: 774 - DNA, 2225 bp, Homo sapiens
  source 1..2225: mol_type = genomic DNA
accgccaccatgcacggagccgccagagcgccagccaccagcgtgagtgccgactgctgcatcccggccggcttgcgcctcggaccggtgcctggtaccttcaagctgggcaagtacctgtcagaccgcagggagcccgggcctaagaaaaaggtgcgcatggtgagaggggagctggtggacgagtcggggggctcccctctggagtggatagggttaatccgggcagccagaaactcccaggaacagactctggaagctattgcagacttacccggaggacagatcttctaccgagcattgcgagacgtccagccaggggaggagctgacagtgtggtattctaactccttggctcagtggttcgacatccccaccacagcgactccgactcacgacgagaaaggggaggagcgctacatctgctggtactgctggaggacgtttagataccccaacagccttaaggcacacctgcgtttccactgcgtgttcagcggcggtggaggcggcgccttcctgcaccacgaacacgcggctcgccaaggcgccgtcccagcggctgatggcctcggtctctccccaaaacccccggcgcccgatttcgccgcgccttcccaggcaggaactttgcgaccccaccccctgggcccgccaccagttcaggcctgcggtgcgcgggagggcatcaagcgcgaggcctcttccgcgccctcggccacctcgccgaccccaggcaagtgggggcagcccaagaagggcaaggagcagctggaccgtgccctggacatgagcggagccgcccgaggacaagggcacttcctcggcatcgtgggcggctcctcggcgggggtcggcagcctggctttctaccccggcgtgcgctcagctttcaagcccgccggcctagcgagggcggcggcggccgctcacggcgacccctaccgggaggagagcagcagcaagcaaggagccggcctcgctttgggcaggctgctgggcgggggccgggcgtgcgggcgccccgggagcggggagaactcggcggcgggcggcgcgggtcaccaccatcaccaccacgcgcaccaccaccaccatcccaagtgcctgctcgctggggacccgccgccgccgccgccgcctggcctgccctgctctggggccctgcgcggcttccctctgctctccgtccccccggaagaggcgtccgccttcaagcacgtggagcgcgccccgcccgcagccgccgcgctgccaggagcgcgttatgcgcagctgccccctgcgccggggttgcccctcgagcgctgcgcgctgccgcccctcgacccgggcggtctcaaagcctatccgggtggtgagtgcagccacctgcccgccgtcatgccggcctttacagtctacaacggggagctgctctacggctcaccggccaccaccgcttattacccgctcaaattgcacttcggcgggctgctgaagtatccggagtccatctcctacttcagcgggcctgcagcggccgccctaagccccgccgagctggggtcgctggccagcatcgaccgagagatcgccatgcacaatcagcagctgtccgagatggctgccgggaagggtcgcggacgcctggactcggggacgttgccaccggccgtcgcggcggcgggaggcaccgggggcggcggcagcggaggcagcggcgcaggtaagcccaagaccggccacctgtgcctctactgtggcaagctgtactcgcgcaagtatgggctcaagatccacatgcggacgcacacgggctacaagccactcaagtgcaaagtctgtctgcggcccttcggcgaccccagcaatctcaacaagcacatccggctgcacgccgagggcaatacgccctaccgctgcgagttctgcggcaaggtacttgtgcgccgccgggacctggagcgacatgtcaagtcccgccaccctggccagagtctgctcgccaaagcgggcgacggcccgggtgccgagcccggctatcccccggagcctggggatcccaagagcgacgacagtgacgtggacgtctgcttcacagacgaccagagcgaccccgaggttgggggcggcggggagcgcgacttgtagtaatgaactagtccgtaacttgaaagtatttcgatttcttggctttatatatcttgtggaaaggacgatccggcattagctaatattcccac

SEQ ID NO: 775 - DNA, 3584 bp, Homo sapiens
  source 1..3584: mol_type = genomic DNA
accgccaccatggattccaaagatgaaagctcgcatgtgtggccgacatctgcagagcatgaacagaatgccgcacaggtgcactttgttccggacacaggaacagtggctcagattgtctataccgatgaccaggttcgccccccacagcaggtggtgtacacggcagatggtgcctcctacacatcagtggatggtccagagcacacgctggtgtacatccacccggtggaagctgcacagactctgtttacagaccccggccaggtagcttatgtccaacaggatgctacagctcagcaggcctcattgccagttcataaccaggtgctgccttccatcgagagtgtagatgggtccgaccctttggcaactctgcagacccctctaggcagactggaggccaaagaggaagaggatgaggatgaggacgaggacactgaggaagatgaggaagaagacggtgaggacacggatctggatgactgggagccagacccgccccggcccttcgacccacacgacttgtggtgtgaggagtgcaataacgcgcatgcttcagtgtgtccgaagcacggccccttgcacccgatccccaaccggccggtgctcacccgggccagggcgagcctccccctggtgctctacatagacaggtttctgggcggggtgttctccaagcggcgcatccccaagcgcacccagtttggccccgtggaggggcctctcgtcaggggctcggagctgaaagactgttacattcacctcaaggtttctcttgataaaggggacaggaaagaaagggatttacatgaagacctatggtttgagttgtctgatgagacgctttgtaactggatgatgtttgtacggccagcccagaatcacctggagcagaacctggtggcttaccagtatggccaccatgtgtattatacaaccataaaaaatgtggagcccaagcaggaactgaaggtgtggtatgccgcatcctatgctgagttcgtgaaccagaaaattcatgacatttctgaggaagaaaggaaagttcttcgagagcaagagaagaattggccctgctatgaatgtaaccgccgatttataagctcggagcagttgcaacagcatctcaattctcatgatgagaaactagatgtgtttagcagaacaagaggcagaggaaggggacgaggcaagaggcgattcggtccaggtcgacggccggggcgtcctccaaaatttatccgcctggaaatcaccagcgaaaatggggaaaagagtgacgatgggacacaggacttgctacattttcccacaaaggagcaatttgatgaggctgaaccagccactctgaatgggctggatcaaccagaacagaccactatcccaatccctcagctgccacaggaaacccagtcttccctggaacatgaaccagaaactcacaccctgcacctgcagccgcagcatgaagagagcgtggtgcccacccagagcacgctgacagccgacgacatgcgcagagccaagcgcatccgattggagctgcagaatgcagctcttcagcatctgtttattcggaagtccttccggccttttaaatgcttgcagtgtgggaaggccttccgggaaaaggacaaactggaccagcacttacgcttccatgggcgggaggggaactgcccactgacctgtgatctctgtaacaagggcttcatcagcagcacatccttggagagccacatgaagctccactcagaccagaagacttactcttgcattttttgcccagaatcctttgaccgccttgatttgttgaaagatcatgtggccattcatatcaatgatggctacttcacctgcccaacttgtaagaaacggttcccagattttatccaggtgaaaaaacacgtgcgcagcttccactcagaaaagatctaccagtgcacagagtgtgacaaggccttctgtcgccccgataaactgcgactccacatgctccggcattcggaccgcaaagacttcctgtgttccacctgtgggaagcaatttaagcgaaaagacaaactacgggaacacatgcagaggatgcataatcctgagagggaggccaagaaagccgaccgcatcagccgctccaagacgttcaagccccgcatcacgtccacagactacgacagcttcacgttcaagtgccgcctgtgcatgatgggcttccggcggcgcggcatgctggtaaatcacttatcgaagagacacccagacatgaagatagaagaggtgccagagttaactctacccatcataaaacccaatcgtgattacttttgtcagtattgcgataaggtttataaaagtgccagcaagcgcaaagcccacattctgaagaaccacccaggagcagagctcccaccgagcattcggaagctccgacccgctggtcctggagagccagaccccatgctgagcacacacacccagctgacgggcaccatcgccacccctcccgtctgctgtccccactgctccaagcagtacagcagcaagaccaagatggtccagcacattcgaaagaagcatccagagttcgcccagctctccaacaccatacacacaccactgacgacagctgtgatcagtgccaccccagcggttttgactacagacagcgccactggagagactgtggtgacgacggacctgctcacccaagcaatgacagaactgtcccagaccttaacgacagactaccgaacgccacaaggggattaccagagaattcagtacatccctgtgtcgcagtcggcgtctggcctccagcagcctcagcacatacagctgcaagtggttcaagtggcctcggccacttcccctcaccagtcacagcagtccactgtggatgttggccagctccatgatcctcagccctacccccagcacgccatccaggtgcagcacatccaggtcagcgagcctaccgcctcggccccgtcctccgcccaggtatctgggcagccgttgagtccctcagcccagcaggctcagcaggggctcagcccctcccacatccagggcagttcttccacacaggggcaggctctgcagcagcagcagcagcagcagcagaattcctctgtgcagcacacgtacctgcccagtgcttggaattccttccgtggctattcatctgagattcaaatgatgacgcttcctccgggtcagtttgtgattacagacagtggtgtggcaactccagttactactggccaggtgaaggcggttacttcgggtcattatgtgttatcagaaagtcaatcagaattggaagaaaagcaaacttctgccctctctggtggagtccaggtcgagccacctgcacacagtgactccctggacccccagaccaacagccaacagcagaccacacagtacatcatcaccaccaccaccaacgggaacggaagcagcgaagtgcatatcaccaaaccatagtaatgaactagtccgtaacttgaaagtatttcgatttcttggctttatatatcttgtggaaaggacgagtgctcgaccaacgcagatgccta

SEQ ID NO: 776 - DNA, 3287 bp, Homo sapiens
  source 1..3287: mol_type = genomic DNA
accgccaccatgtctgcttactctgtgccttcaacttttgcccaggcctcattgccagttcataaccaggtgctgccttccatcgagagtgtagatgggtccgaccctttggcaactctgcagacccctctaggcagactggaggccaaagaggaagaggatgaggatgaggacgaggacactgaggaagatgaggaagaagacggtgaggacacggatctggatgactgggagccagacccgccccggcccttcgacccacacgacttgtggtgtgaggagtgcaataacgcgcatgcttcagtgtgtccgaagcacggccccttgcacccgatccccaaccggccggtgctcacccgggccagggcgagcctccccctggtgctctacatagacaggtttctgggcggggtgttctccaagcggcgcatccccaagcgcacccagtttggccccgtggaggggcctctcgtcaggggctcggagctgaaagactgttacattcacctcaaggtttctcttgataaaggggacaggaaagaaagggatttacatgaagacctatggtttgagttgtctgatgagacgctttgtaactggatgatgtttgtacggccagcccagaatcacctggagcagaacctggtggcttaccagtatggccaccatgtgtattatacaaccataaaaaatgtggagcccaagcaggaactgaaggtgtggtatgccgcatcctatgctgagttcgtgaaccagaaaattcatgacatttctgaggaagaaaggaaagttcttcgagagcaagagaagaattggccctgctatgaatgtaaccgccgatttataagctcggagcagttgcaacagcatctcaattctcatgatgagaaactagatgtgtttagcagaacaagaggcagaggaaggggacgaggcaagaggcgattcggtccaggtcgacggccggggcgtcctccaaaatttatccgcctggaaatcaccagcgaaaatggggaaaagagtgacgatgggacacaggacttgctacattttcccacaaaggagcaatttgatgaggctgaaccagccactctgaatgggctggatcaaccagaacagaccactatcccaatccctcagctgccacaggaaacccagtcttccctggaacatgaaccagaaactcacaccctgcacctgcagccgcagcatgaagagagcgtggtgcccacccagagcacgctgacagccgacgacatgcgcagagccaagcgcatccgattggagctgcagaatgcagctcttcagcatctgtttattcggaagtccttccggccttttaaatgcttgcagtgtgggaaggccttccgggaaaaggacaaactggaccagcacttacgcttccatgggcgggaggggaactgcccactgacctgtgatctctgtaacaagggcttcatcagcagcacatccttggagagccacatgaagctccactcagaccagaagacttactcttgcattttttgcccagaatcctttgaccgccttgatttgttgaaagatcatgtggccattcatatcaatgatggctacttcacctgcccaacttgtaagaaacggttcccagattttatccaggtgaaaaaacacgtgcgcagcttccactcagaaaagatctaccagtgcacagagtgtgacaaggccttctgtcgccccgataaactgcgactccacatgctccggcattcggaccgcaaagacttcctgtgttccacctgtgggaagcaatttaagcgaaaagacaaactacgggaacacatgcagaggatgcataatcctgagagggaggccaagaaagccgaccgcatcagccgctccaagacgttcaagccccgcatcacgtccacagactacgacagcttcacgttcaagtgccgcctgtgcatgatgggcttccggcggcgcggcatgctggtaaatcacttatcgaagagacacccagacatgaagatagaagaggtgccagagttaactctacccatcataaaacccaatcgtgattacttttgtcagtattgcgataaggtttataaaagtgccagcaagcgcaaagcccacattctgaagaaccacccaggagcagagctcccaccgagcattcggaagctccgacccgctggtcctggagagccagaccccatgctgagcacacacacccagctgacgggcaccatcgccacccctcccgtctgctgtccccactgctccaagcagtacagcagcaagaccaagatggtccagcacattcgaaagaagcatccagagttcgcccagctctccaacaccatacacacaccactgacgacagctgtgatcagtgccaccccagcggttttgactacagacagcgccactggagagactgtggtgacgacggacctgctcacccaagcaatgacagaactgtcccagaccttaacgacagactaccgaacgccacaaggggattaccagagaattcagtacatccctgtgtcgcagtcggcgtctggcctccagcagcctcagcacatacagctgcaagtggttcaagtggcctcggccacttcccctcaccagtcacagcagtccactgtggatgttggccagctccatgatcctcagccctacccccagcacgccatccaggtgcagcacatccaggtatctgggcagccgttgagtccctcagcccagcaggctcagcaggggctcagcccctcccacatccagggcagttcttccacacaggggcaggctctgcagcagcagcagcagcagcagcagaattcctctgtgcagcacacgtacctgcccagtgcttggaattccttccgtggctattcatctgagattcaaatgatgacgcttcctccgggtcagtttgtgattacagacagtggtgtggcaactccagttactactggccaggtgaaggcggttacttcgggtcattatgtgttatcagaaagtcaatcagaattggaagaaaagcaaacttctgccctctctggtggagtccaggtcgagccacctgcacacagtgactccctggacccccagaccaacagccaacagcagaccacacagtacatcatcaccaccaccaccaacgggaacggaagcagcgaagtgcatatcaccaaaccatagtaatgaactagtccgtaacttgaaagtatttcgatttcttggctttatatatcttgtggaaaggacgagcacttaatcaatccacgtcaaga

SEQ ID NO: 777 - DNA, 3572 bp, Homo sapiens
  source 1..3572: mol_type = genomic DNA
accgccaccatggattccaaagatgaaagctcgcatgtgtggccgacatctgcagagcatgaacagaatgccgcacaggtgcactttgttccggacacaggaacagtggctcagattgtctataccgatgaccaggttcgccccccacagcaggtggtgtacacggcagatggtgcctcctacacatcagtggatggtccagagcacacgctggtgtacatccacccggtggaagctgcacagactctgtttacagaccccggccaggtagcttatgtccaacaggatgctacagctcagcaggcctcattgccagttcataaccaggtgctgccttccatcgagagtgtagatgggtccgaccctttggcaactctgcagacccctctaggcagactggaggccaaagaggaagaggatgaggatgaggacgaggacactgaggaagatgaggaagaagacggtgaggacacggatctggatgactgggagccagacccgccccggcccttcgacccacacgacttgtggtgtgaggagtgcaataacgcgcatgcttcagtgtgtccgaagcacggccccttgcacccgatccccaaccggccggtgctcacccgggccagggcgagcctccccctggtgctctacatagacaggtttctgggcggggtgttctccaagcggcgcatccccaagcgcacccagtttggccccgtggaggggcctctcgtcaggggctcggagctgaaagactgttacattcacctcaaggtttctcttgataaaggggacaggaaagaaagggatttacatgaagacctatggtttgagttgtctgatgagacgctttgtaactggatgatgtttgtacggccagcccagaatcacctggagcagaacctggtggcttaccagtatggccaccatgtgtattatacaaccataaaaaatgtggagcccaagcaggaactgaaggtgtggtatgccgcatcctatgctgagttcgtgaaccagaaaattcatgacatttctgaggaagaaaggaaagttcttcgagagcaagagaagaattggccctgctatgaatgtaaccgccgatttataagctcggagcagttgcaacagcatctcaattctcatgatgagaaactagatgtgtttagcagaacaagaggcagaggaaggggacgaggcaagaggcgattcggtccaggtcgacggccggggcgtcctccaaaatttatccgcctggaaatcaccagcgaaaatggggaaaagagtgacgatgggacacaggacttgctacattttcccacaaaggagcaatttgatgaggctgaaccagccactctgaatgggctggatcaaccagaacagaccactatcccaatccctcagctgccacaggaaacccagtcttccctggaacatgaaccagaaactcacaccctgcacctgcagccgcagcatgaagagagcgtggtgcccacccagagcacgctgacagccgacgacatgcgcagagccaagcgcatccgaaatgcagctcttcagcatctgtttattcggaagtccttccggccttttaaatgcttgcagtgtgggaaggccttccgggaaaaggacaaactggaccagcacttacgcttccatgggcgggaggggaactgcccactgacctgtgatctctgtaacaagggcttcatcagcagcacatccttggagagccacatgaagctccactcagaccagaagacttactcttgcattttttgcccagaatcctttgaccgccttgatttgttgaaagatcatgtggccattcatatcaatgatggctacttcacctgcccaacttgtaagaaacggttcccagattttatccaggtgaaaaaacacgtgcgcagcttccactcagaaaagatctaccagtgcacagagtgtgacaaggccttctgtcgccccgataaactgcgactccacatgctccggcattcggaccgcaaagacttcctgtgttccacctgtgggaagcaatttaagcgaaaagacaaactacgggaacacatgcagaggatgcataatcctgagagggaggccaagaaagccgaccgcatcagccgctccaagacgttcaagccccgcatcacgtccacagactacgacagcttcacgttcaagtgccgcctgtgcatgatgggcttccggcggcgcggcatgctggtaaatcacttatcgaagagacacccagacatgaagatagaagaggtgccagagttaactctacccatcataaaacccaatcgtgattacttttgtcagtattgcgataaggtttataaaagtgccagcaagcgcaaagcccacattctgaagaaccacccaggagcagagctcccaccgagcattcggaagctccgacccgctggtcctggagagccagaccccatgctgagcacacacacccagctgacgggcaccatcgccacccctcccgtctgctgtccccactgctccaagcagtacagcagcaagaccaagatggtccagcacattcgaaagaagcatccagagttcgcccagctctccaacaccatacacacaccactgacgacagctgtgatcagtgccaccccagcggttttgactacagacagcgccactggagagactgtggtgacgacggacctgctcacccaagcaatgacagaactgtcccagaccttaacgacagactaccgaacgccacaaggggattaccagagaattcagtacatccctgtgtcgcagtcggcgtctggcctccagcagcctcagcacatacagctgcaagtggttcaagtggcctcggccacttcccctcaccagtcacagcagtccactgtggatgttggccagctccatgatcctcagccctacccccagcacgccatccaggtgcagcacatccaggtcagcgagcctaccgcctcggccccgtcctccgcccaggtatctgggcagccgttgagtccctcagcccagcaggctcagcaggggctcagcccctcccacatccagggcagttcttccacacaggggcaggctctgcagcagcagcagcagcagcagcagaattcctctgtgcagcacacgtacctgcccagtgcttggaattccttccgtggctattcatctgagattcaaatgatgacgcttcctccgggtcagtttgtgattacagacagtggtgtggcaactccagttactactggccaggtgaaggcggttacttcgggtcattatgtgttatcagaaagtcaatcagaattggaagaaaagcaaacttctgccctctctggtggagtccaggtcgagccacctgcacacagtgactccctggacccccagaccaacagccaacagcagaccacacagtacatcatcaccaccaccaccaacgggaacggaagcagcgaagtgcatatcaccaaaccatagtaatgaactagtccgtaacttgaaagtatttcgatttcttggctttatatatcttgtggaaaggacgacagcgctagattggcaccgctgta

SEQ ID NO: 778 - DNA, 3173 bp, Homo sapiens
  source 1..3173: mol_type = genomic DNA
accgccaccatgtctgcttactctgtgccttcaacttttgcccaggcctcattgccagttcataaccaggtgctgccttccatcgagagtgtagatgggtccgaccctttggcaactctgcagacccctctaggcagactggaggccaaagaggaagaggatgaggatgaggacgaggacactgaggaagatgaggaagaagacggtgaggacacggatctggatgactgggagccagacccgccccggcccttcgacccacacgacttgtggtgtgaggagtgcaataacgcgcatgcttcagtgtgtccgaagcacggccccttgcacccgatccccaaccggccggtgctcacccgggccagggcgagcctccccctggtgctctacatagacaggtttctgggcggggtgttctccaagcggcgcatccccaagcgcacccagtttggccccgtggaggggcctctcgtcaggggctcggagctgaaagactgttacattcacctcaaggtttctcttgataaaggggacaggaaagaaagggatttacatgaagacctatggtttgagttgtctgatgagacgctttgtaactggatgatgtttgtacggccagcccagaatcacctggagcagaacctggtggcttaccagtatggccaccatgtgtattatacaaccataaaaaatgtggagcccaagcaggaactgaaggtgtggtatgccgcatcctatgctgagttcgtgaaccagaaaattcatgacatttctgaggaagaaaggaaagttcttcgagagcaagagaagaattggccctgctatgaatgtaaccgccgatttataagctcggagcagttgcaacagcatctcaattctcatgatgagaaactagatgtgtttagcagaacaagaggcagaggaaggggacgaggcaagaggcgattcggtccaggtcgacggccggggcgtcctccaaaatttatccgcctggaaatcaccagcgaaaatggggaaaagagtgacgatgggacacaggacttgctacattttcccacaaaggagcaatttgatgaggctgaaccagccactctgaatgggctggatcaaccagaacagaccactatcccaatccctcagctgccacaggaaacccagtcttccctggaacatgaaccagaaactcacaccctgcacctgcagccgcagcatgaagagagcgtggtgcccacccagagcacgctgacagccgacgacatgcgcagagccaagcgcatccgaaatgcagctcttcagcatctgtttattcggaagtccttccggccttttaaatgcttgcagtgtgggaaggccttccgggaaaaggacaaactggaccagcacttacgcttccatgggcgggaggggaactgcccactgacctgtgatctctgtaacaagggcttcatcagcagcacatccttggagagccacatgaagctccactcagaccagaagacttactcttgcattttttgcccagaatcctttgaccgccttgatttgttgaaagatcatgtggccattcatatcaatgatggctacttcacctgcccaacttgtaagaaacggttcccagattttatccaggtgaaaaaacacgtgcgcagcttccactcagaaaagatctaccagtgcacagagtgtgacaaggccttctgtcgccccgataaactgcgactccacatgctccggcattcggaccgcaaagacttcctgtgttccacctgtgggaagcaatttaagcgaaaagacaaactacgggaacacatgcagaggatgcataatcctgagagggaggccaagaaagccgaccgcatcagccgctccaagacgttcaagccccgcatcacgtccacagactacgacagcttcacgttcaagtgccgcctgtgcatgatgggcttccggcggcgcggcatgctggtaaatcacttatcgaagagacacccagacatgaagatagaagaggtgccagagttaactctacccatcataaaacccaatcgtgattacttttgtcagtattgcgataaggtttataaaagtgccagcaagcgcaaagcccacattctgaagaaccacccaggagcagagctcccaccgagcattcggaagctccgacccgctggtcctggagagccagaccccatgctgagcacacacacccagctgacgggcaccatcgccacccctcccgtctgctgtccccactgctccaagcagtacagcagcaagaccaagatggtccagcacattcgaaagaagcatccagagttcgcccagctctccaacaccatacacacaccactgacgacagctgtgatcagtgccaccccagcggttttgactacagacagcgccactggagagactgtggtgacgacggacctgctcacccaagcaatgacagaactgtcccagaccttaacgacagactaccgaacgccacaaggggattaccagagaattcagtacatccctgtgtcgcagtcggcgtctggcctccagcagcctcagcacatacagctgcaagtggttcaagtggcctcggtatctgggcagccgttgagtccctcagcccagcaggctcagcaggggctcagcccctcccacatccagggcagttcttccacacaggggcaggctctgcagcagcagcagcagcagcagcagaattcctctgtgcagcacacgtacctgcccagtgcttggaattccttccgtggctattcatctgagattcaaatgatgacgcttcctccgggtcagtttgtgattacagacagtggtgtggcaactccagttactactggccaggtgaaggcggttacttcgggtcattatgtgttatcagaaagtcaatcagaattggaagaaaagcaaacttctgccctctctggtggagtccaggtcgagccacctgcacacagtgactccctggacccccagaccaacagccaacagcagaccacacagtacatcatcaccaccaccaccaacgggaacggaagcagcgaagtgcatatcaccaaaccatagtaatgaactagtccgtaacttgaaagtatttcgatttcttggctttatatatcttgtggaaaggacgagcctccagttctggtgtagacgaa

SEQ ID NO: 779 - DNA, 1328 bp, Homo sapiens
  source 1..1328: mol_type = genomic DNA
accgccaccatgaataccacagacaacggtgtcaactgtctgtgtgctatctgtggggacagagcaacaggaaaacactatggggcatccagctgtgatgggtgcaagggtttcttcagacgcagcattcgtaagagtcacgtttattcttgcaggttcagtcggcaatgtgttgttgacaaggacaaaaggaatcaatgtagatattgtcgattaagaaagtgttttagagcgggaatgaaaaaagaagctgtacaaaatgaacgtgacagaataagcaccagaagaagcacatttgatggcagcaacatcccctccattaacacactggcacaagctgaagttcggtctcgccagatctcagtctcaagccctgggtcaagcactgacataaacgttaagaaaattgcaagtattggtgatgtctgtgaatctatgaaacagcagctcttagtcttggtggaatgggctaaatatattcctgccttctgtgaattaccattggatgatcaggtggcactgttgagagctcacgcaggggagcacttactgcttggagctacaaagagatccatgatgtataaagatattttgcttttgggaaacaactatgttattcaccgcaacagctgtgaagttgagattagccgtgtggccaatcgtgttctagatgagctggttagaccatttcaagaaatccagattgatgacaatgagtatgcttgtttaaaggcaattgtattttttgatccagatgcaaaagggctaagcgatccagtaaaaattaagaacatgaggttccaagtgcagatcggtttggaggactacatcaatgatcggcagtatgactcccgggggaggtttggagagttgcttctgctcctgcccacactgcagagcatcacgtggcaaatgattgagcaaatacagtttgttaaactttttgggatggttaaaattgacaatctacttcaggaaatgctattaggtggggcttccaatgatggcagtcatctccatcatccaatgcatccacatttgtctcaagacccattaactggacaaactatacttttaggtcccatgtcaacactggttcatgcagaccagatctcaactcctgaaaccccactcccttccccaccacaaggctctgggcaagaacagtacaaaatagctgcaaaccaagcatcagtcatttcacaccagcatctctccaaacaaaagcaattgtagtaatgaactagtccgtaacttgaaagtatttcgatttcttggctttatatatcttgtggaaaggacgacctgtttccgattcaggaggagga

SEQ ID NO: 780 - DNA, 1439 bp, Homo sapiens
  source 1..1439: mol_type = genomic DNA
accgccaccatggacatggcaaattacagtgaagttttggacccaacttacacaactttggagtttgaaactatgcagattctatataattcaagtgatagttctgccccagagacaagtatgaataccacagacaacggtgtcaactgtctgtgtgctatctgtggggacagagcaacaggaaaacactatggggcatccagctgtgatgggtgcaagggtttcttcagacgcagcattcgtaagagtcacgtttattcttgcaggttcagtcggcaatgtgttgttgacaaggacaaaaggaatcaatgtagatattgtcgattaagaaagtgttttagagcgggaatgaaaaaagaagctgtacaaaatgaacgtgacagaataagcaccagaagaagcacatttgatggcagcaacatcccctccattaacacactggcacaagctgaagttcggtctcgccagatctcagtctcaagccctgggtcaagcactgacataaacgttaagaaaattgcaagtattggtgatgtctgtgaatctatgaaacagcagctcttagtcttggtggaatgggctaaatatattcctgccttctgtgaattaccattggatgatcaggtggcactgttgagagctcacgcaggggagcacttactgcttggagctacaaagagatccatgatgtataaagatattttgcttttgggaaacaactatgttattcaccgcaacagctgtgaagttgagattagccgtgtggccaatcgtgttctagatgagctggttagaccatttcaagaaatccagattgatgacaatgagtatgcttgtttaaaggcaattgtattttttgatccagatgcaaaagggctaagcgatccagtaaaaattaagaacatgaggttccaagtgcagatcggtttggaggactacatcaatgatcggcagtatgactcccgggggaggtttggagagttgcttctgctcctgcccacactgcagagcatcacgtggcaaatgattgagcaaatacagtttgttaaactttttgggatggttaaaattgacaatctacttcaggaaatgctattaggtggggcttccaatgatggcagtcatctccatcatccaatgcatccacatttgtctcaagacccattaactggacaaactatacttttaggtcccatgtcaacactggttcatgcagaccagatctcaactcctgaaaccccactcccttccccaccacaaggctctgggcaagaacagtacaaaatagctgcaaaccaagcatcagtcatttcacaccagcatctctccaaacaaaagcaattgtagtaatgaactagtccgtaacttgaaagtatttcgatttcttggctttatatatcttgtggaaaggacgagtcattcttgcaggttgtgttcct

SEQ ID NO: 781 - DNA, 1496 bp, Homo sapiens
  source 1..1496: mol_type = genomic DNA
accgccaccatgcgactctccaaaaccctcgtcgacatggacatggccgactacagtgctgcactggacccagcctacaccaccctggaatttgagaatgtgcaggtgttgacgatgggcaatgacacgtccccatcagaaggcaccaacctcaacgcgcccaacagcctgggtgtcagcgccctgtgtgccatctgcggggaccgggccacgggcaaacactacggtgcctcgagctgtgacggctgcaagggcttcttccggaggagcgtgcggaagaaccacatgtactcctgcagatttagccggcagtgcgtggtggacaaagacaagaggaaccagtgccgctactgcaggctcaagaaatgcttccgggctggcatgaagaaggaagccgtccagaatgagcgggaccggatcagcactcgaaggtcaagctatgaggacagcagcctgccctccatcaatgcgctcctgcaggcggaggtcctgtcccgacagatcacctcccccgtctccgggatcaacggcgacattcgggcgaagaagattgccagcatcgcagatgtgtgtgagtccatgaaggagcagctgctggttctcgttgagtgggccaagtacatcccagctttctgcgagctccccctggacgaccaggtggccctgctcagagcccatgctggcgagcacctgctgctcggagccaccaagagatccatggtgttcaaggacgtgctgctcctaggcaatgactacattgtccctcggcactgcccggagctggcggagatgagccgggtgtccatacgcatccttgacgagctggtgctgcccttccaggagctgcagatcgatgacaatgagtatgcctacctcaaagccatcatcttctttgacccagatgccaaggggctgagcgatccagggaagatcaagcggctgcgttcccaggtgcaggtgagcttggaggactacatcaacgaccgccagtatgactcgcgtggccgctttggagagctgctgctgctgctgcccaccttgcagagcatcacctggcagatgatcgagcagatccagttcatcaagctcttcggcatggccaagattgacaacctgttgcaggagatgctgctgggagggtcccccagcgatgcaccccatgcccaccaccccctgcaccctcacctgatgcaggaacatatgggaaccaacgtcatcgttgccaacacaatgcccactcacctcagcaacggacagatgtccacccctgagaccccacagccctcaccgccaggtggctcagggtctgagccctataagctcctgccgggagccgtcgccacaatcgtcaagcccctctctgccatcccccagccgaccatcaccaagcaggaagttatctagtaatgaactagtccgtaacttgaaagtatttcgatttcttggctttatatatcttgtggaaaggacgataagaaagagatttagcgtcttgg

SEQ ID NO: 782 - DNA, 1430 bp, Homo sapiens
  source 1..1430: mol_type = genomic DNA
accgccaccatggtcagcgtgaacgcgcccctcggggctccagtggagagttcttacgacacgtccccatcagaaggcaccaacctcaacgcgcccaacagcctgggtgtcagcgccctgtgtgccatctgcggggaccgggccacgggcaaacactacggtgcctcgagctgtgacggctgcaagggcttcttccggaggagcgtgcggaagaaccacatgtactcctgcagatttagccggcagtgcgtggtggacaaagacaagaggaaccagtgccgctactgcaggctcaagaaatgcttccgggctggcatgaagaaggaagccgtccagaatgagcgggaccggatcagcactcgaaggtcaagctatgaggacagcagcctgccctccatcaatgcgctcctgcaggcggaggtcctgtcccgacagatcacctcccccgtctccgggatcaacggcgacattcgggcgaagaagattgccagcatcgcagatgtgtgtgagtccatgaaggagcagctgctggttctcgttgagtgggccaagtacatcccagctttctgcgagctccccctggacgaccaggtggccctgctcagagcccatgctggcgagcacctgctgctcggagccaccaagagatccatggtgttcaaggacgtgctgctcctaggcaatgactacattgtccctcggcactgcccggagctggcggagatgagccgggtgtccatacgcatccttgacgagctggtgctgcccttccaggagctgcagatcgatgacaatgagtatgcctacctcaaagccatcatcttctttgacccagatgccaaggggctgagcgatccagggaagatcaagcggctgcgttcccaggtgcaggtgagcttggaggactacatcaacgaccgccagtatgactcgcgtggccgctttggagagctgctgctgctgctgcccaccttgcagagcatcacctggcagatgatcgagcagatccagttcatcaagctcttcggcatggccaagattgacaacctgttgcaggagatgctgctgggagggtcccccagcgatgcaccccatgcccaccaccccctgcaccctcacctgatgcaggaacatatgggaaccaacgtcatcgttgccaacacaatgcccactcacctcagcaacggacagatgtccacccctgagaccccacagccctcaccgccaggtggctcagggtctgagccctataagctcctgccgggagccgtcgccacaatcgtcaagcccctctctgccatcccccagccgaccatcaccaagcaggaagttatctagtaatgaactagtccgtaacttgaaagtatttcgatttcttggctttatatatcttgtggaaaggacgatcacgcgctgacaggcctattgca

SEQ ID NO: 783 - DNA, 1451 bp, Homo sapiens
  source 1..1451: mol_type = genomic DNA
accgccaccatgtcggactggggccagggcttcccccaggacccaccagacacgtccccatcagaaggcaccaacctcaacgcgcccaacagcctgggtgtcagcgccctgtgtgccatctgcggggaccgggccacgggcaaacactacggtgcctcgagctgtgacggctgcaagggcttcttccggaggagcgtgcggaagaaccacatgtactcctgcagatttagccggcagtgcgtggtggacaaagacaagaggaaccagtgccgctactgcaggctcaagaaatgcttccgggctggcatgaagaaggaagccgtccagaatgagcgggaccggatcagcactcgaaggtcaagctatgaggacagcagcctgccctccatcaatgcgctcctgcaggcggaggtcctgtcccgacagatcacctcccccgtctccgggatcaacggcgacattcgggcgaagaagattgccagcatcgcagatgtgtgtgagtccatgaaggagcagctgctggttctcgttgagtgggccaagtacatcccagctttctgcgagctccccctggacgaccaggtggccctgctcagagcccatgctggcgagcacctgctgctcggagccaccaagagatccatggtgttcaaggacgtgctgctcctaggcaatgactacattgtccctcggcactgcccggagctggcggagatgagccgggtgtccatacgcatccttgacgagctggtgctgcccttccaggagctgcagatcgatgacaatgagtatgcctacctcaaagccatcatcttctttgacccagatgccaaggggctgagcgatccagggaagatcaagcggctgcgttcccaggtgcaggtgagcttggaggactacatcaacgaccgccagtatgactcgcgtggccgctttggagagctgctgctgctgctgcccaccttgcagagcatcacctggcagatgatcgagcagatccagttcatcaagctcttcggcatggccaagattgacaacctgttgcaggagatgctgctgggagggtcccccagcgatgcaccccatgcccaccaccccctgcaccctcacctgatgcaggaacatatgggaaccaacgtcatcgttgccaacacaatgcccactcacctcagcaacggacagatgtgtgagtggccccgacccaggggacaggcagccacccctgagaccccacagccctcaccgccaggtggctcagggtctgagccctataagctcctgccgggagccgtcgccacaatcgtcaagcccctctctgccatcccccagccgaccatcaccaagcaggaagttatctagtaatgaactagtccgtaacttgaaagtatttcgatttcttggctttatatatcttgtggaaaggacgatggaattcgcgccggagcctagag

SEQ ID NO: 784 - DNA, 1460 bp, Homo sapiens
  source 1..1460: mol_type = genomic DNA
accgccaccatggtcagcgtgaacgcgcccctcggggctccagtggagagttcttacgacacgtccccatcagaaggcaccaacctcaacgcgcccaacagcctgggtgtcagcgccctgtgtgccatctgcggggaccgggccacgggcaaacactacggtgcctcgagctgtgacggctgcaagggcttcttccggaggagcgtgcggaagaaccacatgtactcctgcagatttagccggcagtgcgtggtggacaaagacaagaggaaccagtgccgctactgcaggctcaagaaatgcttccgggctggcatgaagaaggaagccgtccagaatgagcgggaccggatcagcactcgaaggtcaagctatgaggacagcagcctgccctccatcaatgcgctcctgcaggcggaggtcctgtcccgacagatcacctcccccgtctccgggatcaacggcgacattcgggcgaagaagattgccagcatcgcagatgtgtgtgagtccatgaaggagcagctgctggttctcgttgagtgggccaagtacatcccagctttctgcgagctccccctggacgaccaggtggccctgctcagagcccatgctggcgagcacctgctgctcggagccaccaagagatccatggtgttcaaggacgtgctgctcctaggcaatgactacattgtccctcggcactgcccggagctggcggagatgagccgggtgtccatacgcatccttgacgagctggtgctgcccttccaggagctgcagatcgatgacaatgagtatgcctacctcaaagccatcatcttctttgacccagatgccaaggggctgagcgatccagggaagatcaagcggctgcgttcccaggtgcaggtgagcttggaggactacatcaacgaccgccagtatgactcgcgtggccgctttggagagctgctgctgctgctgcccaccttgcagagcatcacctggcagatgatcgagcagatccagttcatcaagctcttcggcatggccaagattgacaacctgttgcaggagatgctgctgggagggtcccccagcgatgcaccccatgcccaccaccccctgcaccctcacctgatgcaggaacatatgggaaccaacgtcatcgttgccaacacaatgcccactcacctcagcaacggacagatgtgtgagtggccccgacccaggggacaggcagccacccctgagaccccacagccctcaccgccaggtggctcagggtctgagccctataagctcctgccgggagccgtcgccacaatcgtcaagcccctctctgccatcccccagccgaccatcaccaagcaggaagttatctagtaatgaactagtccgtaacttgaaagtatttcgatttcttggctttatatatcttgtggaaaggacgaacatccatctgtcaattaggagct

SEQ ID NO: 785 - DNA, 1289 bp, Homo sapiens
  source 1..1289: mol_type = genomic DNA
accgccaccatggtcagcgtgaacgcgcccctcggggctccagtggagagttcttacgacacgtccccatcagaaggcaccaacctcaacgcgcccaacagcctgggtgtcagcgccctgtgtgccatctgcggggaccgggccacgggcaaacactacggtgcctcgagctgtgacggctgcaagggcttcttccggaggagcgtgcggaagaaccacatgtactcctgcagatttagccggcagtgcgtggtggacaaagacaagaggaaccagtgccgctactgcaggctcaagaaatgcttccgggctggcatgaagaaggaagccgtccagaatgagcgggaccggatcagcactcgaaggtcaagctatgaggacagcagcctgccctccatcaatgcgctcctgcaggcggaggtcctgtcccgacagatcacctcccccgtctccgggatcaacggcgacattcgggcgaagaagattgccagcatcgcagatgtgtgtgagtccatgaaggagcagctgctggttctcgttgagtgggccaagtacatcccagctttctgcgagctccccctggacgaccaggtggccctgctcagagcccatgctggcgagcacctgctgctcggagccaccaagagatccatggtgttcaaggacgtgctgctcctaggcaatgactacattgtccctcggcactgcccggagctggcggagatgagccgggtgtccatacgcatccttgacgagctggtgctgcccttccaggagctgcagatcgatgacaatgagtatgcctacctcaaagccatcatcttctttgacccagatgccaaggggctgagcgatccagggaagatcaagcggctgcgttcccaggtgcaggtgagcttggaggactacatcaacgaccgccagtatgactcgcgtggccgctttggagagctgctgctgctgctgcccaccttgcagagcatcacctggcagatgatcgagcagatccagttcatcaagctcttcggcatggccaagattgacaacctgttgcaggagatgctgctgggaggtccgtgccaagcccaggaggggcggggttggagtggggactccccaggagacaggcctcacacagtgagctcacccctcagctccttggcttccccactgtgccgctttgggcaagttgcttagtaatgaactagtccgtaacttgaaagtatttcgatttcttggctttatatatcttgtggaaaggacgatgtgaggcacgaagtgccaacttg

SEQ ID NO: 786 - DNA, 1199 bp, Homo sapiens
  source 1..1199: mol_type = genomic DNA
accgccaccctggatccgccggccgtggtcgccgagtcggtgtcgtccttgaccatcgccgacgcgttcattgcagccggcgagagctcagctccgaccccgccgcgccccgcgcttcccaggaggttcatctgctccttccctgactgcagcgccaattacagcaaagcctggaagcttgacgcgcacctgtgcaagcacacgggggagagaccatttgtttgtgactatgaagggtgtggcaaggccttcatcagggactaccatctgagccgccacattctgactcacacaggagaaaagccgtttgtttgtgcagccaatggctgtgatcaaaaattcaacacaaaatcaaacttgaagaaacattttgaacgcaaacatgaaaatcaacaaaaacaatatatatgcagttttgaagactgtaagaagacctttaagaaacatcagcagctgaaaatccatcagtgccagcataccaatgaacctctattcaagtgtacccaggaaggatgtgggaaacactttgcatcacccagcaagctgaaacgacatgccaaggcccacgagggctatgtatgtcaaaaaggatgttcctttgtggcaaaaacatggacggaacttctgaaacatgtgagagaaacccataaagaggaaatactatgtgaagtatgccggaaaacatttaaacgcaaagattaccttaagcaacacatgaaaactcatgccccagaaagggatgtatgtcgctgtccaagagaaggctgtggaagaacctatacaactgtgtttaatctccaaagccatatcctctccttccatgaggaaagccgcccttttgtgtgtgaacatgctggctgtggcaaaacatttgcaatgaaacaaagtctcactaggcatgctgttgtacatgatcctgacaagaagaaaatgaagctcaaagtcaaaaaatctcgtgaaaaacggagtttggcctctcatctcagtggatatatccctcccaaaaggaaacaagggcaaggcttatctttgtgtcaaaacggagagtcacccaactgtgtggaagacaagatgctctcgacagttgcagtacttacccttggctagtaatgaactagtccgtaacttgaaagtatttcgatttcttggctttatatatcttgtggaaaggacgacactgtctcatcctgtctggctgg

SEQ ID NO: 787 - DNA, 926 bp, Homo sapiens
  source 1..926: mol_type = genomic DNA
accgccaccatgcacctctgtgggggcaatgggctgctgacccagacagaccccaaggagcaacaaaggcagctgaagaagcagaagaaccgggcagccgcccagcgaagccggcagaagcacacagacaaggcagacgccctgcaccagcagcacgagtctctggaaaaagacaacctcgccctgcggaaggagatccagtccctgcaggccgagctggcgtggtggagccggaccctgcacgtgcatgagcgcctgtgccccatggattgtgcctcctgctcagctccagggctcctgggctgctgggaccaggctgaggggctcctgggccctggcccacagggacaacatggctgccgggagcagctggagctgttccagaccccgggttcctgttacccagctcagccgctctctccaggtccacagcctcatgattctcccagcctcctccagtgccccctgccctcactgtcccttggccccgctgtggttgctgaacctcctgtccagctgtcccccagccctctcctgtttgcctcgcacactggttccagcctgcaggggtcttcctctaagctcagtgccctccagcccagcctcacggcccaaactgcccctccacagcccctcgagctggagcatcccaccagagggaagctggggtcctctcccgacaacccttcctctgccctggggcttgcacgtctgcagagcagggagcacaaacctgctctctcagcagccacttggcaagggctggttgtggatcccagccctcaccctctcctggcctttcctctgctctcctctgctcaagtccacttctagtaatgaactagtccgtaacttgaaagtatttcgatttcttggctttatatatcttgtggaaaggacgaccagagtaagtatagcgaaattaa

SEQ ID NO: 788 - DNA, 671 bp, Homo sapiens
  source 1..671: mol_type = genomic DNA
accgccaccatggattgtgcctcctgctcagctccagggctcctgggctgctgggaccaggctgaggggctcctgggccctggcccacagggacaacatggctgccgggagcagctggagctgttccagaccccgggttcctgttacccagctcagccgctctctccaggtccacagcctcatgattctcccagcctcctccagtgccccctgccctcactgtcccttggccccgctgtggttgctgaacctcctgtccagctgtcccccagccctctcctgtttgcctcgcacactggttccagcctgcaggggtcttcctctaagctcagtgccctccagcccagcctcacggcccaaactgcccctccacagcccctcgagctggagcatcccaccagagggaagctggggtcctctcccgacaacccttcctctgccctggggcttgcacgtctgcagagcagggagcacaaacctgctctctcagcagccacttggcaagggctggttgtggatcccagccctcaccctctcctggcctttcctctgctctcctctgctcaagtccacttctagtaatgaactagtccgtaacttgaaagtatttcgatttcttggctttatatatcttgtggaaaggacgaggaagtcggcctgtggacttgtct

SEQ ID NO: 789 - DNA, 854 bp, Homo sapiens
  source 1..854: mol_type = genomic DNA
accgccaccatggctcctgtgggcaagagaataggtggtttgggggacacacgggttggaggcccgtgcatatcccagcagcacgagtctctggaaaaagacaacctcgccctgcggaaggagatccagtccctgcaggccgagctggcgtggtggagccggaccctgcacgtgcatgagcgcctgtgccccatggattgtgcctcctgctcagctccagggctcctgggctgctgggaccaggctgaggggctcctgggccctggcccacagggacaacatggctgccgggagcagctggagctgttccagaccccgggttcctgttacccagctcagccgctctctccaggtccacagcctcatgattctcccagcctcctccagtgccccctgccctcactgtcccttggccccgctgtggttgctgaacctcctgtccagctgtcccccagccctctcctgtttgcctcgcacactggttccagcctgcaggggtcttcctctaagctcagtgccctccagcccagcctcacggcccaaactgcccctccacagcccctcgagctggagcatcccaccagagggaagctggggtcctctcccgacaacccttcctctgccctggggcttgcacgtctgcagagcagggagcacaaacctgctctctcagcagccacttggcaagggctggttgtggatcccagccctcaccctctcctggcctttcctctgctctcctctgctcaagtccacttctagtaatgaactagtccgtaacttgaaagtatttcgatttcttggctttatatatcttgtggaaaggacgaggatgagcgacacttctaacagcc

SEQ ID NO: 790 - DNA, 2549 bp, Homo sapiens
  source 1..2549: mol_type = genomic DNA
accgccaccatgttccgaaaggcccggcgggtgaacgtgcgcaagcggaacgactccgaagaggaagagcgggaacgcgatgaggagcaggagccgccgccgttgttgccgccgccgggcacgggcgaagaggcgggccccggtggcggcgacagggcccctggcggggagtcgctgctgggcccggggccgtcgccgccttccgcgctgaccccgggcctcggggctgaggccgggggcggcttccccggcggcgcggagcccggcaacgggctgaagccgcgcaagaggcctcgcgagaacaaagaggtgccccgggccagcctgctcagcttccaggacgaggaggaagaaaatgaagaagttttcaaagtgaagaaatcaagttatagcaaaaagatagtaaaattgctcaagaaggaatataaagaagatcttgaaaaatcgaagattaagacagaactcaactcatcagctgaaagtgaacaacctttggacaaaacaggacatgttaaggatacaaatcaagaagatggagttatcatcagtgaacatggtgaagatgaaatggatatggaaagtgaaaaagaggaagaaaagccaaagactggtggagctttttcaaatgctttatcttcattgaatgttcttcgtccaggagaaattccagatgcagcttttatacatgctgcaaggaaaaagcgccaaatggcccgagaattgggagatttcactcctcatgataatgagcctggtaaaggccgccttgttagagaagatgagaatgatgccagtgatgatgaagatgacgatgagaaacgccggatagttttttctgtgaaagaaaagtcacaaagacaaaaaattgctgaggaaataggaattgaggggagtgatgatgatgctttagtaactggagaacaggatgaagagctcagccgatgggaacaggagcagataaggaaaggaattaatatccctcaggttcaagccagtcaacccgcagaagtgaatatgtactaccagaacacttaccagacaatgccttacggctcatcctatggcattccttatagttatacggcctatggatcatcagatgccaaatctcaaaaaacagataatacagtccctttcaaaactcccagtaatgagatgactcccgttactattgatttggtaaagaaacagcttaaagacaggttggactccatgaaagaattgcacaaaacaaatcgacagcagcatgagaaacatctgcaaagccgagtggactctaccagggctattgaaagattagaagggtcttctgggggtattggtgaacggtataaatttttgcaagaaatgcgagggtatgtccaagacttgcttgagtgtttcagtgaaaaggtgccactgattaatgaacttgaatcagcaatacatcagctgtacaaacagcgagcttcccgccttgtccaaagacgacaagatgatattaaagatgaatcttcggagttttcaagccattcaaacaaagctctgatggcaccaaatcttgactcctttggacgcgatcgggcactgtatcaagagcatgcaaaacgtcgcattgcagagcgggaggccaggaggactcgtcgtagacaagccagagaacaaaccggtaagatggcagatcaccttgaaggcctttccagtgatgatgaagaaacttctacagatattactaatttcaatctggaaaaagatcgaatttcaaaagaatccggcaaagtttttgaagatgtccttgaaagtttctattcaattgactgtattaaatcacagtttgaagcatggcgttcaaaatactacacatcctacaaagatgcttacattggcctttgtttgccaaaattattcaaccccctcatacgacttcagctcctcacttggactcctcttgaggcaaaatgtcgtgactttgagaatatgctgtggtttgaatctttgctgttttatggttgtgaagaacgagagcaagaaaaagatgatgtagatgttgccctactacctaccattgtggaaaaggtgattcttcctaaactaacagtgatagctgaaaatatgtgggaccctttttctacaacacagacttcaagaatggtgggaattacactaaaattaatcaatggatatccttcagtagtgaatgcagaaaataaaaatacacaggtatacctaaaggcacttttattgagaatgagaagaactttagatgatgatgtatttatgcccttatatcccaaaaatgtcttagaaaataaaaattctgggccttacttgttttttcaacgacagttttggtcttcagttaaggtcataaaacccccattccagagagggtcctgccccatacccagaaggaaagaatgctgctcagagaggccaagaagaatctggacggacaggccttgtgttgtcttctcttagtaatgaactagtccgtaacttgaaagtatttcgatttcttggctttatatatcttgtggaaaggacgacttatagccattggctcttctcac

SEQ ID NO: 791 - DNA, 2855 bp, Homo sapiens
  source 1..2855: mol_type = genomic DNA
accgccaccatgttccgaaaggcccggcgggtgaacgtgcgcaagcggaacgactccgaagaggaagagcgggaacgcgatgaggagcaggagccgccgccgttgttgccgccgccgggcacgggcgaagaggcgggccccggtggcggcgacagggcccctggcggggagtcgctgctgggcccggggccgtcgccgccttccgcgctgaccccgggcctcggggctgaggccgggggcggcttccccggcggcgcggagcccggcaacgggctgaagccgcgcaagaggcctcgcgagaacaaagaggtgccccgggccagcctgctcagcttccaggacgaggaggaagaaaatgaagaagttttcaaagtgaagaaatcaagttatagcaaaaagatagtaaaattgctcaagaaggaatataaagaagatcttgaaaaatcgaagattaagacagaactcaactcatcagctgaaagtgaacaacctttggacaaaacaggacatgttaaggatacaaatcaagaagatggagttatcatcagtgaacatggtgaagatgaaatggatatggaaagtgaaaaagaggaagaaaagccaaagactggtggagctttttcaaatgctttatcttcattgaatgttcttcgtccaggagaaattccagatgcagcttttatacatgctgcaaggaaaaagcgccaaatggcccgagaattgggagatttcactcctcatgataatgagcctggtaaaggccgccttgttagagaagatgagaatgatgccagtgatgatgaagatgacgatgagaaacgccggatagttttttctgtgaaagaaaagtcacaaagacaaaaaattgctgaggaaataggaattgaggggagtgatgatgatgctttagtaactggagaacaggatgaagagctcagccgatgggaacaggagcagataaggaaaggaattaatatccctcaggttcaagccagtcaacccgcagaagtgaatatgtactaccagaacacttaccagacaatgccttacggctcatcctatggcattccttatagttatacggcctatggatcatcagatgccaaatctcaaaaaacagataatacagtccctttcaaaactcccagtaatgagatgactcccgttactattgatttggtaaagaaacagcttaaagacaggttggactccatgaaagaattgcacaaaacaaatcgacagcagcatgagaaacatctgcaaagccgagtggactctaccagggctattgaaagattagaagggtcttctgggggtattggtgaacggtataaatttttgcaagaaatgcgagggtatgtccaagacttgcttgagtgtttcagtgaaaaggtgccactgattaatgaacttgaatcagcaatacatcagctgtacaaacagcgagcttcccgccttgtccaaagacgacaagatgatattaaagatgaatcttcggagttttcaagccattcaaacaaagctctgatggcaccaaatcttgactcctttggacgcgatcgggcactgtatcaagagcatgcaaaacgtcgcattgcagagcgggaggccaggaggactcgtcgtagacaagccagagaacaaaccggtaagatggcagatcaccttgaaggcctttccagtgatgatgaagaaacttctacagatattactaatttcaatctggaaaaagatcgaatttcaaaagaatccggcaaagtttttgaagatgtccttgaaagtttctattcaattgactgtattaaatcacagtttgaagcatggcgttcaaaatactacacatcctacaaagatgcttacattggcctttgtttgccaaaattattcaaccccctcatacgacttcagctcctcacttggactcctcttgaggcaaaatgtcgtgactttgagaatatgctgtggtttgaatctttgctgttttatggttgtgaagaacgagagcaagaaaaagatgatgtagatgttgccctactacctaccattgtggaaaaggtgattcttcctaaactaacagtgatagctgaaaatatgtgggaccctttttctacaacacagacttcaagaatggtgggaattacactaaaattaatcaatggatatccttcagtagtgaatgcagaaaataaaaatacacaggtatacctaaaggcacttttattgagaatgagaagaactttagatgatgatgtatttatgcccttatatcccaaaaatgtcttagaaaataaaaattctgggccttacttgttttttcaacgacagttttggtcttcagttaagctgttaggcaattttcttcagtggtatggcattttctcaaataaaactctgcaagagttatcaatagatggtttattaaatcgatatattctcatggcttttcagaattcagaatatggagatgacagcatcaaaaaagcccaaaatgtaatcaattgtttccccaaacaatggttcatgaatctgaaaggagaaaggactatttctcagttagaaaacttttgccgataccttgtacacttagcggatacaatttatagaaatagtatcgggtgttctgatgtggaaaaaagaaatgcaagggaaaacataaaacagatagtaaaactccttgcaagtgttcgagctttggatcatgctatgtctgttgcaagtgaccacaatgtgaaagaatttaagtctttgatcgaaggaaaatagtaatgaactagtccgtaacttgaaagtatttcgatttcttggctttatatatcttgtggaaaggacgaagcgactttgggattggtgggacg

SEQ ID NO: 792 - DNA, 7646 bp, Homo sapiens
  source 1..7646: mol_type = genomic DNA
accgccaccatgtcgggatccacacagcctgtggcacagacgtggagggccactgagccccgctacccgccccacagcctttcctacccagtgcagatcgcccggacgcacacggacgtcgggctcctggagtaccagcaccactcccgcgactatgcctcccacctgtcgcccggctccatcatccagccccagcggcggaggccctccctgctgtctgagttccagcccgggaatgaacggtcccaggagctccacctgcggccagagtcccactcatacctgcccgagctggggaagtcagagatggagttcattgaaagcaagcgccctcggctagagctgctgcctgaccccctgctgcgaccgtcacccctgctggccacgggccagcctgcgggatctgaagacctcaccaaggaccgtagcctgacgggcaagctggaaccggtgtctccccccagccccccgcacactgaccctgagctggagctggtgccgccacggctgtccaaggaggagctgatccagaacatggaccgcgtggaccgagagatcaccatggtagagcagcagatctctaagctgaagaagaagcagcaacagctggaggaggaggctgccaagccgcccgagcctgagaagcccgtgtcaccgccgcccatcgagtcgaagcaccgcagcctggtgcagatcatctacgacgagaaccggaagaaggctgaagctgcacatcggattctggaaggcctggggccccaggtggagctgccgctgtacaaccagccctccgacacccggcagtatcatgagaacatcaaaataaaccaggcgatgcggaagaagctaatcttgtacttcaagaggaggaatcacgctcggaaacaatgggagcagaagttctgccagcgctatgaccagctcatggaggcctgggagaagaaggtggagcgcatcgagaacaacccccggcggcgggccaaggagagcaaggtgcgcgagtactacgagaagcagttccctgagatccgcaagcagcgcgagctgcaggagcgcatgcagagcagggtgggccagcggggcagtgggctgtccatgtcggccgcccgcagcgagcacgaggtgtcagagatcatcgatggcctctcagagcaggagaacctggagaagcagatgcgccagctggccgtgatcccgcccatgctgtacgacgctgaccagcagcgcatcaagttcatcaacatgaacgggcttatggccgaccccatgaaggtgtacaaagaccgccaggtcatgaacatgtggagtgagcaggagaaggagaccttccgggagaagttcatgcagcatcccaagaactttggcctgatcgcatcattcctggagaggaagacagtggctgagtgcgtcctctattactacctgactaagaagaatgagaactataagagcctggtgagacggagctatcggcgccgcggcaagagccagcagcagcaacaacagcagcagcagcagcagcagcagcagcagcagcagcccatgccccgcagcagccaggaggagaaagatgagaaggagaaggaaaaggaggcggagaaggaggaggagaagccggaggtggagaacgacaaggaagacctcctcaaggagaagacagacgacacctcaggggaggacaacgacgagaaggaggctgtggcctccaaaggccgcaaaactgccaacagccagggaagacgcaaaggccgcatcacccgctcaatggctaatgaggccaacagcgaggaggccatcaccccccagcagagcgccgagctggcctccatggagctgaatgagagttctcgctggacagaagaagaaatggaaacagccaagaaaggtctcctggaacacggccgcaactggtcggccatcgcccggatggtgggctccaagactgtgtcgcagtgtaagaacttctacttcaactacaagaagaggcagaacctcgatgagatcttgcagcagcacaagctgaagatggagaaggagaggaacgcgcggaggaagaagaagaaagcgccggcggcggccagcgaggaggctgcattcccgcccgtggtggaggatgaggagatggaggcgtcgggcgtgagcggaaatgaggaggagatggtggaggaggctgaagccttacatgcctctgggaatgaggtgcccagaggggaatgcagtggcccagccactgtcaacaacagctcagacaccgagagcatcccctctcctcacactgaggccgccaaggacacagggcagaatgggcccaagcccccagccaccctgggcgccgacgggccacccccagggccacccaccccaccaccggaggacatcccggcccccactgagcccaccccggcctctgaagccaccggagcccctacgcccccaccagcacccccatcgccctctgcacctcctcctgtggtccccaaggaggagaaggaggaggagaccgcagcagcgcccccagtggaggagggggaggagcagaagccccccgcggctgaggagctggcagtggacacagggaaggccgaggagcccgtcaagagcgagtgcacggaggaagccgaggaggggccggccaagggcaaggacgcggaggccgctgaggccacggccgagggggcgctcaaggcagagaagaaggagggcgggagcggcagggccaccacagccaagagctcgggcgccccccaggacagcgactccagtgctacctgcagtgcagacgaggtggatgaggccgagggcggcgacaagaaccggctgctgtccccaaggcccagcctcctcaccccgactggcgacccccgggccaatgcctcaccccagaagccactggacctgaagcagctgaagcagcgagcggctgccatcccccccatccaggtcaccaaagtccatgagcccccccgggaggacgcagctcccaccaagccagctcccccagccccaccgccaccgcaaaacctgcagccggagagcgacgcccctcagcagcctggcagcagcccccggggcaagagcaggagcccggcaccccccgccgacaaggaggccttcgcagccgaggcccagaagctgcctggggaccccccttgctggacttccggcctgcccttccccgtgcccccccgtgaggtgatcaaggcctccccgcatgccccggacccctcagccttctcctacgctccacctggtcacccactgcccctgggcctccatgacactgcccggcccgtcctgccgcgcccacccaccatctccaacccgcctcccctcatctcctctgccaagcaccccagcgtcctcgagaggcaaataggtgccatctcccaaggaatgtcggtccagctccacgtcccgtactcagagcatgccaaggccccggtgggccctgtcaccatggggctgcccctgcccatggaccccaaaaagctggcacccttcagcggagtgaagcaggagcagctgtccccacggggccaggctgggccaccggagagcctgggggtgcccacagcccaggaggcgtccgtgctgagagggacagctctgggctcagttccgggcggaagcatcaccaaaggcattcccagcacacgggtgccctcggacagcgccatcacataccgcggctccatcacccacggcacgccagctgacgtcctgtacaagggcaccatcaccaggatcatcggcgaggacagcccgagtcgcttggaccgcggccgggaggacagcctgcccaagggccacgtcatctacgaaggcaagaagggccacgtcttgtcctatgagggtggcatgtctgtgacccagtgctccaaggaggacggcagaagcagctcaggacccccccatgagacggccgcccccaagcgcacctatgacatgatggagggccgcgtgggcagagccatctcctcagccagcatcgaaggtctcatgggccgtgccatcccgccggagcgacacagcccccaccacctcaaagagcagcaccacatccgcgggtccatcacacaagggatccctcggtcctacgtggaggcacaggaggactacctgcgtcgggaggccaagctcctaaagcgggagggcacgcctccgcccccaccgccctcacgggacctgaccgaggcctacaagacgcaggccctgggccccctgaagctgaagccggcccatgagggcctggtggccacggtgaaggaggcgggccgctccatccatgagatcccgcgcgaggagctgcggcacacgcccgagctgcccctggccccgcggccgctcaaggagggctccatcacgcagggcaccccgctcaagtacgacaccggcgcgtccaccactggctccaaaaagcacgacgtacgctccctcatcggcagccccggccggacgttcccacccgtgcacccgctggatgtgatggccgacgcccgggcactggaacgtgcctgctacgaggagagcctgaagagccggccagggaccgccagcagctcggggggctccattgcgcgcggcgccccggtcattgtgcctgagctgggtaagccgcggcagagccccctgacctatgaggaccacggggcaccctttgccggccacctcccacgaggttcgcccgtgaccacgcgggagcccacgccgcgcctgcaggagggcagcctttcgtccagcaaggcatcccaggaccgaaagctgacgtcgacgcctcgtgagatcgccaagtccccgcacagcaccgtgcccgagcaccacccacaccccatctcgccctatgagcacctgcttcggggcgtgagtggcgtggacctgtatcgcagccacatccccctggccttcgaccccacctccataccccgcggcatccctctggacgcagccgctgcctactacctgccccgacacctggcccccaaccccacctacccgcacctgtacccaccctacctcatccgcggctaccccgacacggcggcgctggagaaccggcagaccatcatcaatgactacatcacctcgcagcagatgcaccacaacgcggccaccgccatggcccagcgagctgatatgctgaggggcctctcgccccgcgagtcctcgctggcactcaactacgctgcgggtccccgaggcatcatcgacctgtcccaagtgccacacctgcctgtgctcgtgcccccgacaccaggcaccccagccaccgccatggaccgccttgcctacctccccaccgcgccccagcccttcagcagccgccacagcagctccccactctccccaggaggtccaacacacttgacaaaaccaaccaccacgtcctcgtccgagcgggagcgagaccgggatcgagagcgggaccgggatcgggagcgggaaaagtccatcctcacgtccaccacgacggtggagcacgcacccatctggagacctggtacagagcagagcagcggcagcagcggcgggggtgggggcagcagcagccgccccgcctcccactcccatgcccaccagcactcgcccatctcccctcggacccaggatgccctccagcagagacccagtgtgcttcacaacacaggcatgaagggtatcatcaccgctgtggagcccagcacgcccacggtcctgaggtccacctccacctcctcacccgttcgcccggctgccacattcccacctgccacccactgcccactgggcggcaccctcgatggggtctaccctaccctcatggagcccgtcttgctgcccaaggaggccccccgggtcgcccggccagagcggccccgagcagacaccggccatgccttcctcgccaagcccccagcccgctccgggctggagcccgcctcctcccccagcaagggctcggagccccggcccctagtgcctcctgtctctggccacgccaccatcgcccgcacccctgcgaagaacctcgcacctcaccacgccagcccggacccgccggcgccacctgcctcggcctcggacccgcaccgggaaaagactcaaagtaaacccttttccatccaggaactggaactccgttctctgggttaccacggcagcagctacagccccgaaggggtggagcccgtcagccctgtgagctcacccagtctgacccacgacaaggggctccccaagcacctggaagagctcgacaagagccacctggagggggagctgcggcccaagcagccaggccccgtgaagcttggcggggaggccgcccacctcccacacctgcggccgctgcctgagagccagccctcgtccagcccgctgctccagaccgccccaggggtcaaaggtcaccagcgggtggtcaccctggcccagcacatcagtgaggtcatcacacaggactacacccggcaccacccacagcagctcagcgcacccctgcccgcccccctctactccttccctggggccagctgccccgtcctggacctccgccgcccacccagtgacctctacctcccgcccccggaccatggtgccccggcccgtggctccccccacagcgaagggggcaagaggtctccagagccaaacaagacgtcggtcttgggtggtggtgaggacggtattgaacctgtgtccccaccggagggcatgacggagccagggcactcccggagtgctgtgtacccgctgctgtaccgggatggggaacagacggagcccagcaggatgggctccaagtctccaggcaacaccagccagccgccagccttcttcagcaagctgaccgagagcaactccgccatggtcaagtccaagaagcaagagatcaacaagaagctgaacacccacaaccggaatgagcctgaatacaatatcagccagcctgggacggagatcttcaatatgcccgccatcaccggaacaggccttatgacctatagaagccaggcggtgcaggaacatgccagcaccaacatggggctggaggccataattagaaaggcactcatgggtaaatatgaccagtgggaagagtccccgccgctcagcgccaatgcttttaaccctctgaatgccagtgccagcctgcccgctgctatgcccataaccgctgctgacggacggagtgaccacacactcacctcgccaggtggcggcgggaaggccaaggtctctggcagacccagcagccgaaaagccaagtccccggccccgggcctggcatctggggaccggccaccctctgtctcctcagtgcactcggagggagactgcaaccgccggacgccgctcaccaaccgcgtgtgggaggacaggccctcgtccgcaggttccacgccattcccctacaaccccctgatcatgcggctgcaggcgggtgtcatggcttccccacccccaccgggcctccccgcgggcagcgggcccctcgctggcccccaccacgcctgggacgaggagcccaagccactgctctgctcgcagtacgagacactctccgacagcgagtagtaatgaactagtccgtaacttgaaagtatttcgatttcttggctttatatatcttgtggaaaggacgaccagctagccagataatacagaag

SEQ ID NO: 793 - DNA, 7478 bp, Homo sapiens
  source 1..7478: mol_type = genomic DNA
accgccaccatgtcgggatccacacagcctgtggcacagacgtggagggccactgagccccgctacccgccccacagcctttcctacccagtgcagatcgcccggacgcacacggacgtcgggctcctggagtaccagcaccactcccgcgactatgcctcccacctgtcgcccggctccatcatccagccccagcggcggaggccctccctgctgtctgagttccagcccgggaatgaacggtcccaggagctccacctgcggccagagtcccactcatacctgcccgagctggggaagtcagagatggagttcattgaaagcaagcgccctcggctagagctgctgcctgaccccctgctgcgaccgtcacccctgctggccacgggccagcctgcgggatctgaagacctcaccaaggaccgtagcctgacgggcaagctggaaccggtgtctccccccagccccccgcacactgaccctgagctggagctggtgccgccacggctgtccaaggaggagctgatccagaacatggaccgcgtggaccgagagatcaccatggtagagcagcagatctctaagctgaagaagaagcagcaacagctggaggaggaggctgccaagccgcccgagcctgagaagcccgtgtcaccgccgcccatcgagtcgaagcaccgcagcctggtgcagatcatctacgacgagaaccggaagaaggctgaagctgcacatcggattctggaaggcctggggccccaggtggagctgccgctgtacaaccagccctccgacacccggcagtatcatgagaacatcaaaataaaccaggcgatgcggaagaagctaatcttgtacttcaagaggaggaatcacgctcggaaacaatgggagcagaagttctgccagcgctatgaccagctcatggaggcctgggagaagaaggtggagcgcatcgagaacaacccccggcggcgggccaaggagagcaaggtgcgcgagtactacgagaagcagttccctgagatccgcaagcagcgcgagctgcaggagcgcatgcagagggtgggccagcggggcagtgggctgtccatgtcggccgcccgcagcgagcacgaggtgtcagagatcatcgatggcctctcagagcaggagaacctggagaagcagatgcgccagctggccgtgatcccgcccatgctgtacgacgctgaccagcagcgcatcaagttcatcaacatgaacgggcttatggccgaccccatgaaggtgtacaaagaccgccaggtcatgaacatgtggagtgagcaggagaaggagaccttccgggagaagttcatgcagcatcccaagaactttggcctgatcgcatcattcctggagaggaagacagtggctgagtgcgtcctctattactacctgactaagaagaatgagaactataagagcctggtgagacggagctatcggcgccgcggcaagagccagcagcagcaacaacagcagcagcagcagcagcagcagcagcagcagcagcccatgccccgcagcagccaggaggagaaagatgagaaggagaaggaaaaggaggcggagaaggaggaggagaagccggaggtggagaacgacaaggaagacctcctcaaggagaagacagacgacacctcaggggaggacaacgacgagaaggaggctgtggcctccaaaggccgcaaaactgccaacagccagggaagacgcaaaggccgcatcacccgctcaatggctaatgaggccaacagcgaggaggccatcaccccccagcagagcgccgagctggcctccatggagctgaatgagagttctcgctggacagaagaagaaatggaaacagccaagaaaggtctcctggaacacggccgcaactggtcggccatcgcccggatggtgggctccaagactgtgtcgcagtgtaagaacttctacttcaactacaagaagaggcagaacctcgatgagatcttgcagcagcacaagctgaagatggagaaggagaggaacgcgcggaggaagaagaagaaagcgccggcggcggccagcgaggaggctgcattcccgcccgtggtggaggatgaggagatggaggcgtcgggcgtgagcggaaatgaggaggagatggtggaggaggctgaagccactgtcaacaacagctcagacaccgagagcatcccctctcctcacactgaggccgccaaggacacagggcagaatgggcccaagcccccagccaccctgggcgccgacgggccacccccagggccacccaccccaccaccggaggacatcccggcccccactgagcccaccccggcctctgaagccaccggagcccctacgcccccaccagcacccccatcgccctctgcacctcctcctgtggtccccaaggaggagaaggaggaggagaccgcagcagcgcccccagtggaggagggggaggagcagaagccccccgcggctgaggagctggcagtggacacagggaaggccgaggagcccgtcaagagcgagtgcacggaggaagccgaggaggggccggccaagggcaaggacgcggaggccgctgaggccacggccgagggggcgctcaaggcagagaagaaggagggcgggagcggcagggccaccacagccaagagctcgggcgccccccaggacagcgactccagtgctacctgcagtgcagacgaggtggatgaggccgagggcggcgacaagaaccggctgctgtccccaaggcccagcctcctcaccccgactggcgacccccgggccaatgcctcaccccagaagccactggacctgaagcagctgaagcagcgagcggctgccatcccccccatccaggtcaccaaagtccatgagcccccccgggaggacgcagctcccaccaagccagctcccccagccccaccgccaccgcaaaacctgcagccggagagcgacgcccctcagcagcctggcagcagcccccggggcaagagcaggagcccggcaccccccgccgacaaggaggcagagaagcctgtgttcttcccagccttcgcagccgaggcccagaagctgcctggggaccccccttgctggacttccggcctgcccttccccgtgcccccccgtgaggtgatcaaggcctccccgcatgccccggacccctcagccttctcctacgctccacctggtcacccactgcccctgggcctccatgacactgcccggcccgtcctgccgcgcccacccaccatctccaacccgcctcccctcatctcctctgccaagcaccccagcgtcctcgagaggcaaataggtgccatctcccaaggaatgtcggtccagctccacgtcccgtactcagagcatgccaaggccccggtgggccctgtcaccatggggctgcccctgcccatggaccccaaaaagctggcacccttcagcggagtgaagcaggagcagctgtccccacggggccaggctgggccaccggagagcctgggggtgcccacagcccaggaggcgtccgtgctgagagggacagctctgggctcagttccgggcggaagcatcaccaaaggcattcccagcacacgggtgccctcggacagcgccatcacataccgcggctccatcacccacggcacgccagctgacgtcctgtacaagggcaccatcaccaggatcatcggcgaggacagcccgagtcgcttggaccgcggccgggaggacagcctgcccaagggccacgtcatctacgaaggcaagaagggccacgtcttgtcctatgagggtggcatgtctgtgacccagtgctccaaggaggacggcagaagcagctcaggacccccccatgagacggccgcccccaagcgcacctatgacatgatggagggccgcgtgggcagagccatctcctcagccagcatcgaaggtctcatgggccgtgccatcccgccggagcgacacagcccccaccacctcaaagagcagcaccacatccgcgggtccatcacacaagggatccctcggtcctacgtggaggcacaggaggactacctgcgtcgggaggccaagctcctaaagcgggagggcacgcctccgcccccaccgccctcacgggacctgaccgaggcctacaagacgcaggccctgggccccctgaagctgaagccggcccatgagggcctggtggccacggtgaaggaggcgggccgctccatccatgagatcccgcgcgaggagctgcggcacacgcccgagctgcccctggccccgcggccgctcaaggagggctccatcacgcagggcaccccgctcaagtacgacaccggcgcgtccaccactggctccaaaaagcacgacgtacgctccctcatcggcagccccggccggacgttcccacccgtgcacccgctggatgtgatggccgacgcccgggcactggaacgtgcctgctacgaggagagcctgaagagccggccagggaccgccagcagctcggggggctccattgcgcgcggcgccccggtcattgtgcctgagctgggtaagccgcggcagagccccctgacctatgaggaccacggggcaccctttgccggccacctcccacgaggttcgcccgtgaccacgcgggagcccacgccgcgcctgcaggagggcagcctttcgtccagcaaggcatcccaggaccgaaagctgacgtcgacgcctcgtgagatcgccaagtccccgcacagcaccgtgcccgagcaccacccacaccccatctcgccctatgagcacctgcttcggggcgtgagtggcgtggacctgtatcgcagccacatccccctggccttcgaccccacctccataccccgcggcatccctctggacgcagccgctgcctactacctgccccgacacctggcccccaaccccacctacccgcacctgtacccaccctacctcatccgcggctaccccgacacggcggcgctggagaaccggcagaccatcatcaatgactacatcacctcgcagcagatgcaccacaacgcggccaccgccatggcccagcgagctgatatgctgaggggcctctcgccccgcgagtcctcgctggcactcaactacgctgcgggtccccgaggcatcatcgacctgtcccaagtgccacacctgcctgtgctcgtgcccccgacaccaggcaccccagccaccgccatggaccgccttgcctacctccccaccgcgccccagcccttcagcagccgccacagcagctccccactctccccaggaggtccaacacacttgacaaaaccaaccaccacgtcctcgtccgagcgggagcgagaccgggatcgagagcgggaccgggatcgggagcgggaaaagtccatcctcacgtccaccacgacggtggagcacgcacccatctggagacctggtacagagcagagcagcggcagcagcggcgggggtgggggcagcagcagccgccccgcctcccactcccatgcccaccagcactcgcccatctcccctcggacccaggatgccctccagcagagacccagtgtgcttcacaacacaggcatgaagggtatcatcaccgctgtggagcccagcacgcccacggtcctgaggtccacctccacctcctcacccgttcgcccggctgccacattcccacctgccacccactgcccactgggcggcaccctcgatggggtctaccctaccctcatggagcccgtcttgctgcccaaggaggccccccgggtcgcccggccagagcggccccgagcagacaccggccatgccttcctcgccaagcccccagcccgctccgggctggagcccgcctcctcccccagcaagggctcggagccccggcccctagtgcctcctgtctctggccacgccaccatcgcccgcacccctgcgaagaacctcgcacctcaccacgccagcccggacccgccggcgccacctgcctcggcctcggacccgcaccgggaaaagactcaaagtaaacccttttccatccaggaactggaactccgttctctgggttaccacggcagcagctacagccccgaaggggtggagcccgtcagccctgtgagctcacccagtctgacccacgacaaggggctccccaagcacctggaagagctcgacaagagccacctggagggggagctgcggcccaagcagccaggccccgtgaagcttggcggggaggccgcccacctcccacacctgcggccgctgcctgagagccagccctcgtccagcccgctgctccagaccgccccaggggtcaaaggtcaccagcgggtggtcaccctggcccagcacatcagtgaggtcatcacacaggactacacccggcaccacccacagcagctcagcgcacccctgcccgcccccctctactccttccctggggccagctgccccgtcctggacctccgccgcccacccagtgacctctacctcccgcccccggaccatggtgccccggcccgtggctccccccacagcgaagggggcaagaggtctccagagccaaacaagacgtcggtcttgggtggtggtgaggacggtattgaacctgtgtccccaccggagggcatgacggagccagggcactcccggagtgctgtgtacccgctgctgtaccgggatggggaacagacggagcccagcaggatgggctccaagtctccaggcaacaccagccagccgccagccttcttcagcaagctgaccgagagcaactccgccatggtcaagtccaagaagcaagagatcaacaagaagctgaacacccacaaccggaatgagcctgaatacaatatcagccagcctgggacggagatcttcaatatgcccgccatcaccggaacaggccttatgacctatagaagccaggcggtgcaggaacatgccagcaccaacatggggctggaggccataattagaaaggcactcatgggtggcggcgggaaggccaaggtctctggcagacccagcagccgaaaagccaagtccccggccccgggcctggcatctggggaccggccaccctctgtctcctcagtgcactcggagggagactgcaaccgccggacgccgctcaccaaccgcgtgtgggaggacaggccctcgtccgcaggttccacgccattcccctacaaccccctgatcatgcggctgcaggcgggtgtcatggcttccccacccccaccgggcctccccgcgggcagcgggcccctcgctggcccccaccacgcctgggacgaggagcccaagccactgctctgctcgcagtacgagacactctccgacagcgagtagtaatgaactagtccgtaacttgaaagtatttcgatttcttggctttatatatcttgtggaaaggacgatgcataggccttgtattgcttgtt

SEQ ID NO: 794 - DNA, 7616 bp, Homo sapiens
  source 1..7616: mol_type = genomic DNA
accgccaccatgtcgggatccacacagcctgtggcacagacgtggagggccactgagccccgctacccgccccacagcctttcctacccagtgcagatcgcccggacgcacacggacgtcgggctcctggagtaccagcaccactcccgcgactatgcctcccacctgtcgcccggctccatcatccagccccagcggcggaggccctccctgctgtctgagttccagcccgggaatgaacggtcccaggagctccacctgcggccagagtcccactcatacctgcccgagctggggaagtcagagatggagttcattgaaagcaagcgccctcggctagagctgctgcctgaccccctgctgcgaccgtcacccctgctggccacgggccagcctgcgggatctgaagacctcaccaaggaccgtagcctgacgggcaagctggaaccggtgtctccccccagccccccgcacactgaccctgagctggagctggtgccgccacggctgtccaaggaggagctgatccagaacatggaccgcgtggaccgagagatcaccatggtagagcagcagatctctaagctgaagaagaagcagcaacagctggaggaggaggctgccaagccgcccgagcctgagaagcccgtgtcaccgccgcccatcgagtcgaagcaccgcagcctggtgcagatcatctacgacgagaaccggaagaaggctgaagctgcacatcggattctggaaggcctggggccccaggtggagctgccgctgtacaaccagccctccgacacccggcagtatcatgagaacatcaaaataaaccaggcgatgcggaagaagctaatcttgtacttcaagaggaggaatcacgctcggaaacaatgggagcagaagttctgccagcgctatgaccagctcatggaggcctgggagaagaaggtggagcgcatcgagaacaacccccggcggcgggccaaggagagcaaggtgcgcgagtactacgagaagcagttccctgagatccgcaagcagcgcgagctgcaggagcgcatgcagagggtgggccagcggggcagtgggctgtccatgtcggccgcccgcagcgagcacgaggtgtcagagatcatcgatggcctctcagagcaggagaacctggagaagcagatgcgccagctggccgtgatcccgcccatgctgtacgacgctgaccagcagcgcatcaagttcatcaacatgaacgggcttatggccgaccccatgaaggtgtacaaagaccgccaggtcatgaacatgtggagtgagcaggagaaggagaccttccgggagaagttcatgcagcatcccaagaactttggcctgatcgcatcattcctggagaggaagacagtggctgagtgcgtcctctattactacctgactaagaagaatgagaactataagagcctggtgagacggagctatcggcgccgcggcaagagccagcagcagcaacaacagcagcagcagcagcagcagcagcagcagcagcagcccatgccccgcagcagccaggaggagaaagatgagaaggagaaggaaaaggaggcggagaaggaggaggagaagccggaggtggagaacgacaaggaagacctcctcaaggagaagacagacgacacctcaggggaggacaacgacgagaaggaggctgtggcctccaaaggccgcaaaactgccaacagccagggaagacgcaaaggccgcatcacccgctcaatggctaatgaggccaacagcgaggaggccatcaccccccagcagagcgccgagctggcctccatggagctgaatgagagttctcgctggacagaagaagaaatggaaacagccaagaaaggtctcctggaacacggccgcaactggtcggccatcgcccggatggtgggctccaagactgtgtcgcagtgtaagaacttctacttcaactacaagaagaggcagaacctcgatgagatcttgcagcagcacaagctgaagatggagaaggagaggaacgcgcggaggaagaagaagaaagcgccggcggcggccagcgaggaggctgcattcccgcccgtggtggaggatgaggagatggaggcgtcgggcgtgagcggaaatgaggaggagatggtggaggaggctgaagccactgtcaacaacagctcagacaccgagagcatcccctctcctcacactgaggccgccaaggacacagggcagaatgggcccaagcccccagccaccctgggcgccgacgggccacccccagggccacccaccccaccaccggaggacatcccggcccccactgagcccaccccggcctctgaagccaccggagcccctacgcccccaccagcacccccatcgccctctgcacctcctcctgtggtccccaaggaggagaaggaggaggagaccgcagcagcgcccccagtggaggagggggaggagcagaagccccccgcggctgaggagctggcagtggacacagggaaggccgaggagcccgtcaagagcgagtgcacggaggaagccgaggaggggccggccaagggcaaggacgcggaggccgctgaggccacggccgagggggcgctcaaggcagagaagaaggagggcgggagcggcagggccaccacagccaagagctcgggcgccccccaggacagcgactccagtgctacctgcagtgcagacgaggtggatgaggccgagggcggcgacaagaaccggctgctgtccccaaggcccagcctcctcaccccgactggcgacccccgggccaatgcctcaccccagaagccactggacctgaagcagctgaagcagcgagcggctgccatcccccccatccaggtcaccaaagtccatgagcccccccgggaggacgcagctcccaccaagccagctcccccagccccaccgccaccgcaaaacctgcagccggagagcgacgcccctcagcagcctggcagcagcccccggggcaagagcaggagcccggcaccccccgccgacaaggaggcagagaagcctgtgttcttcccagccttcgcagccgaggcccagaagctgcctggggaccccccttgctggacttccggcctgcccttccccgtgcccccccgtgaggtgatcaaggcctccccgcatgccccggacccctcagccttctcctacgctccacctggtcacccactgcccctgggcctccatgacactgcccggcccgtcctgccgcgcccacccaccatctccaacccgcctcccctcatctcctctgccaagcaccccagcgtcctcgagaggcaaataggtgccatctcccaaggaatgtcggtccagctccacgtcccgtactcagagcatgccaaggccccggtgggccctgtcaccatggggctgcccctgcccatggaccccaaaaagctggcacccttcagcggagtgaagcaggagcagctgtccccacggggccaggctgggccaccggagagcctgggggtgcccacagcccaggaggcgtccgtgctgagagggacagctctgggctcagttccgggcggaagcatcaccaaaggcattcccagcacacgggtgccctcggacagcgccatcacataccgcggctccatcacccacggcacgccagctgacgtcctgtacaagggcaccatcaccaggatcatcggcgaggacagcccgagtcgcttggaccgcggccgggaggacagcctgcccaagggccacgtcatctacgaaggcaagaagggccacgtcttgtcctatgagggtggcatgtctgtgacccagtgctccaaggaggacggcagaagcagctcaggacccccccatgagacggccgcccccaagcgcacctatgacatgatggagggccgcgtgggcagagccatctcctcagccagcatcgaaggtctcatgggccgtgccatcccgccggagcgacacagcccccaccacctcaaagagcagcaccacatccgcgggtccatcacacaagggatccctcggtcctacgtggaggcacaggaggactacctgcgtcgggaggccaagctcctaaagcgggagggcacgcctccgcccccaccgccctcacgggacctgaccgaggcctacaagacgcaggccctgggccccctgaagctgaagccggcccatgagggcctggtggccacggtgaaggaggcgggccgctccatccatgagatcccgcgcgaggagctgcggcacacgcccgagctgcccctggccccgcggccgctcaaggagggctccatcacgcagggcaccccgctcaagtacgacaccggcgcgtccaccactggctccaaaaagcacgacgtacgctccctcatcggcagccccggccggacgttcccacccgtgcacccgctggatgtgatggccgacgcccgggcactggaacgtgcctgctacgaggagagcctgaagagccggccagggaccgccagcagctcggggggctccattgcgcgcggcgccccggtcattgtgcctgagctgggtaagccgcggcagagccccctgacctatgaggaccacggggcaccctttgccggccacctcccacgaggttcgcccgtgaccacgcgggagcccacgccgcgcctgcaggagggcagcctttcgtccagcaaggcatcccaggaccgaaagctgacgtcgacgcctcgtgagatcgccaagtccccgcacagcaccgtgcccgagcaccacccacaccccatctcgccctatgagcacctgcttcggggcgtgagtggcgtggacctgtatcgcagccacatccccctggccttcgaccccacctccataccccgcggcatccctctggacgcagccgctgcctactacctgccccgacacctggcccccaaccccacctacccgcacctgtacccaccctacctcatccgcggctaccccgacacggcggcgctggagaaccggcagaccatcatcaatgactacatcacctcgcagcagatgcaccacaacgcggccaccgccatggcccagcgagctgatatgctgaggggcctctcgccccgcgagtcctcgctggcactcaactacgctgcgggtccccgaggcatcatcgacctgtcccaagtgccacacctgcctgtgctcgtgcccccgacaccaggcaccccagccaccgccatggaccgccttgcctacctccccaccgcgccccagcccttcagcagccgccacagcagctccccactctccccaggaggtccaacacacttgacaaaaccaaccaccacgtcctcgtccgagcgggagcgagaccgggatcgagagcgggaccgggatcgggagcgggaaaagtccatcctcacgtccaccacgacggtggagcacgcacccatctggagacctggtacagagcagagcagcggcagcagcggcgggggtgggggcagcagcagccgccccgcctcccactcccatgcccaccagcactcgcccatctcccctcggacccaggatgccctccagcagagacccagtgtgcttcacaacacaggcatgaagggtatcatcaccgctgtggagcccagcacgcccacggtcctgaggtccacctccacctcctcacccgttcgcccggctgccacattcccacctgccacccactgcccactgggcggcaccctcgatggggtctaccctaccctcatggagcccgtcttgctgcccaaggaggccccccgggtcgcccggccagagcggccccgagcagacaccggccatgccttcctcgccaagcccccagcccgctccgggctggagcccgcctcctcccccagcaagggctcggagccccggcccctagtgcctcctgtctctggccacgccaccatcgcccgcacccctgcgaagaacctcgcacctcaccacgccagcccggacccgccggcgccacctgcctcggcctcggacccgcaccgggaaaagactcaaagtaaacccttttccatccaggaactggaactccgttctctgggttaccacggcagcagctacagccccgaaggggtggagcccgtcagccctgtgagctcacccagtctgacccacgacaaggggctccccaagcacctggaagagctcgacaagagccacctggagggggagctgcggcccaagcagccaggccccgtgaagcttggcggggaggccgcccacctcccacacctgcggccgctgcctgagagccagccctcgtccagcccgctgctccagaccgccccaggggtcaaaggtcaccagcgggtggtcaccctggcccagcacatcagtgaggtcatcacacaggactacacccggcaccacccacagcagctcagcgcacccctgcccgcccccctctactccttccctggggccagctgccccgtcctggacctccgccgcccacccagtgacctctacctcccgcccccggaccatggtgccccggcccgtggctccccccacagcgaagggggcaagaggtctccagagccaaacaagacgtcggtcttgggtggtggtgaggacggtattgaacctgtgtccccaccggagggcatgacggagccagggcactcccggagtgctgtgtacccgctgctgtaccgggatggggaacagacggagcccagcaggatgggctccaagtctccaggcaacaccagccagccgccagccttcttcagcaagctgaccgagagcaactccgccatggtcaagtccaagaagcaagagatcaacaagaagctgaacacccacaaccggaatgagcctgaatacaatatcagccagcctgggacggagatcttcaatatgcccgccatcaccggaacaggccttatgacctatagaagccaggcggtgcaggaacatgccagcaccaacatggggctggaggccataattagaaaggcactcatgggtaaatatgaccagtgggaagagtccccgccgctcagcgccaatgcttttaaccctctgaatgccagtgccagcctgcccgctgctatgcccataaccgctgctgacggacggagtgaccacacactcacctcgccaggtggcggcgggaaggccaaggtctctggcagacccagcagccgaaaagccaagtccccggccccgggcctggcatctggggaccggccaccctctgtctcctcagtgcactcggagggagactgcaaccgccggacgccgctcaccaaccgcgtgtgggaggacaggccctcgtccgcaggttccacgccattcccctacaaccccctgatcatgcggctgcaggcgggtgtcatggcttccccacccccaccgggcctccccgcgggcagcgggcccctcgctggcccccaccacgcctgggacgaggagcccaagccactgctctgctcgcagtacgagacactctccgacagcgagtagtaatgaactagtccgtaacttgaaagtatttcgatttcttggctttatatatcttgtggaaaggacgacggatgtctagatcctccagacgt

SEQ ID NO: 795 - DNA, 7424 bp, Homo sapiens
  source 1..7424: mol_type = genomic DNA
accgccaccatgtcaagttcaggttatcctcccaaccaaggagcattcagcacagaacaaagtcgttatcctcctcactctgtccagtatacatttcccaacacccgccaccagcaggagttcgcagtccctgattatcgttcctctcatcttgaagtgagtcaggcatcacagcttttgcagcaacagcagcagcaacagcttcgaaggcgaccttccttgctttcagaatttcacccaggttctgacaggcctcaagaaaggagaactagttatgaaccgtttcatccaggcccatccccagtggatcatgattcactggaatcgaagcgaccacgtctggaacaggtttctgattctcattttcagcgtgtcagtgctgcggttttgcctttagtgcacccgctgccagaagggctgagggcttctgcagatgctaagaaggatccagcattcggaggcaaacatgaagctccatcctctccaatttcggggcaaccatgtggagatgatcaaaatgcttcaccttcaaaactctcaaaggaagagttaatacagagtatggatcgtgtagatcgagaaattgcaaaagtagaacagcagatccttaaactgaaaaagaaacaacaacagcttgaagaagaggcagctaaacctcctgagcctgagaagcccgtgtcccctcctcctgtggagcagaaacaccgcagtattgtccaaattatttatgatgagaatcggaaaaaagcagaagaagctcataaaatttttgaaggtcttggcccaaaagttgaactgccactgtataaccagccatcagataccaaggtgtaccatgagaacatcaagacaaaccaggtgatgaggaaaaaactcattttattttttaaaagaagaaatcatgcaagaaaacaaagggaacaaaaaatctgccagcgttatgatcagctcatggaggcatgggagaaaaaagtggacagaatagaaaataatcctcggaggaaagctaaagaaagcaaaacaagggaatactatgaaaagcagtttccagaaattcgaaaacaaagagaacagcaagaaagatttcagcgagttgggcagaggggagctggtctttcagccaccattgctaggagtgagcatgagatttctgaaattattgatgggctctctgagcaggagaataatgagaaacaaatgcggcagctctctgtgattccacctatgatgtttgatgcagaacaaagacgagtcaagttcattaacatgaatgggcttatggaggaccctatgaaagtgtataaagataggcagtttatgaatgtttggactgaccatgaaaaggagatctttaaggacaagtttatccagcatccaaaaaactttggactaattgcatcatacttggagaggaagagtgttcctgattgtgttttgtattactatttaaccaagaaaaatgagaattataaagccctcgtcagaaggaattatgggaaacgcagaggcagaaaccagcaaattgctcgaccctcgcaagaagaaaaagtagaagaaaaagaagaggataaagcagaaaaaacagaaaaaaaagaagaagaaaagaaagatgaagaggaaaaagatgaaaaagaagactccaaagaaaataccaaggaaaaggacaagatagatggtacagcagaagaaactgaggaaagagagcaagccacaccccgggggcgaaagactgccaacagtcagggccgccgtaagggccggatcaccaggtccatgacaaacgaagctgcagctgccagtgctgcagccgcagcggctactgaagagcccccaccacctctgccaccgccaccagaacccatttctacagagcctgtggagacctctcgatggacagaagaagaaatggaagttgctaaaaaaggtctagtagaacatggtcgtaactgggcagcaattgctaaaatggtgggaacgaaaagtgaagctcaatgtaaaaacttctattttaactataaaaggcgacacaatcttgacaacctcttacagcagcataaacagaaaacttcacgaaaacctcgtgaagagcgagatgtgtctcaatgtgaaagtgtcgcttccactgtttctgctcaggaggatgaagatattgaagcctccaatgaagaagaaaatccagaagacagcgaagttgaagctgtcaagcccagcgaggacagtcctgaaaatgctacttctcgaggaaacacagaacctgcggttgagcttgagcccaccacggaaactgcacccagtacatctccctccttagcagttccaagtacaaaaccagctgaagatgaaagtgtggagacccaggtgaatgacagcatcagtgctgagacagcagagcagatggatgtagatcagcaggagcacagtgctgaagagggttctgtttgtgatcccccacccgctaccaaagctgactctgtggacgttgaagtgagggtgccagaaaaccatgcatctaaagttgaaggtgataataccaaagaaagagacttggatagagccagtgagaaggtggaacctagagatgaagatttggtggtagctcagcaaataaatgcccaaaggcccgagccccagtcagacaatgattccagtgccacgtgcagcgctgatgaggatgtggatggagagccagagaggcagagaatgtttcctatggactcaaagccttcactgttaaaccccactggatctatactcgtctcatctccgttaaaaccaaatccactggatctgccacagcttcagcatcgagctgctgttatcccaccaatggtatcctgcaccccatgtaacataccaattggaaccccagtgagcggctatgctctctaccagcgacacattaaagcaatgcatgagtcagcactcctggaggagcagcggcagagacaagaacagatagatttggaatgtagaagttctacaagtccatgtggcacatccaagagtccaaacagagagtgggaagtccttcagcctgctccacatcaagtgataactaatctccctgaaggcgttcggcttccgacaactcgaccaaccaggccaccgccccctctcatcccgtcatccaaaaccacagtggcttcagaaaaaccatcttttataatgggaggctccatctcacagggaacaccaggcacttatttgacttctcataatcaggcttcctacactcaagaaacacccaagccgtcagtgggatctatctctcttggactgccacggcaacaggaatctgccaaatcagctactttgccctacatcaagcaggaagaattttctccccgaagccaaaactcacaacctgagggtctgttggtcagggcccaacatgaaggtgtagtcagaggtaccgcaggagccatacaagaaggaagtataactcggggaactccaaccagcaaaatttcagtggagagcattccatccctacggggctctatcactcagggcaccccggctctgccccagactggcataccaacagaggctttggtgaaggggtccatttcgagaatgcccattgaagacagcagtcctgagaaaggcagagaggaagctgcatccaaaggccatgttatttatgaaggcaaaagtggacatatcttgtcatatgataatattaagaatgcccgagaagggactaggagtccaagaacagctcatgaaatcagtttaaagagaagctatgaatcagtggaaggaaatataaagcaagggatgtcaatgagggagtctcctgtatcagcaccgttagaggggctgatatgccgagcattacccagggggagtcctcattctgacctcaaagaaaggactgtattgtctggctccataatgcaggggacaccaagagcaacaactgaaagctttgaagatggccttaaatatcccaaacaaattaaaagggaaagtcctcccatacgagcatttgaaggtgccattaccaaaggaaaaccatatgatggcatcaccaccatcaaagaaatggggcgttccattcatgagattccaaggcaagatattttaactcaggaaagtcggaaaactccagaagtggtccagagcacacggccgataattgagggttccatttcccagggcacaccaataaagtttgacaacaactcaggtcaatctgccatcaaacacaatgtcaaatccttaatcacggggcctagcaaactatcccgtggaatgcctccgctggaaattgtgccagagaacataaaagtggtagaacggggaaaatatgaggatgtgaaagcaggcgagaccgtgcgttcccggcacacgtcagtggtaagctctggcccctccgttcttaggtccacactgcatgaagctcccaaagcacaactgagccctgggatttatgatgacaccagtgcacggaggacccctgtgagttatcaaaacaccatgtccagaggctcacccatgatgaacagaacttctgatgttacaatttcttctaacaagtctaccaatcatgaaaggaaatcgacactgacccctacccagagggaaagtatcccagcgaagtctccagtgcctggggtggaccctgtcgtgagccacagtccgtttgatccccatcacagaggcagcactgcaggcgaggtttatcggagccacctgcccacgcacttggatccagccatgccttttcacagggctttggatcctgcagcggctgcttacctgtttcagagacagctttcaccaactccaggttacccaagtcagtatcagctttacgcaatggagaacacaagacagacaatcttaaatgattacattacctcacaacagatgcaagtgaacttgcgtccagatgtggccagaggactctccccaagagagcagccactgggtctcccatacccagcaacgagaggaatcattgacctgaccaatatgcctccaacaattttagtgcctcatccagggggaacaagcactcctcccatggacagaatcacttatattcctggtacacagattactttccctcccaggccgtacaactctgcttccatgtctccaggacacccaacacaccttgcagctgctgcaagtgctgagagggaacgggaacgggagcgggagaaggagcgggagcgggaacggattgctgcagcttcctccgacctctacctgcggccaggctcagaacagcctggccgacctggcagtcatggatatgttcgctccccttccccttcagtaagaactcaggagaccatgttgcaacagagacccagtgttttccaaggaaccaatggaaccagtgtaatcacacctttggatccaactgctcagctacgaatcatgccactgcctgctgggggcccttcaataagccaaggcctgccagcctcccgttacaacactgctgcggatgccctggctgctcttgtggatgctgcagcttctgcaccccagatggatgtgtccaaaacaaaagagagtaagcatgaagctgccaggttagaagaaaatttgagaagcaggtcagcagcagttagtgaacagcagcagctagagcagaaaaccctggaggtggagaagagatctgttcagtgtttatacacttcttcagcctttccaagtggcaagccccagcctcattcttcagtagtttattctgaggctgggaaagataaagggcctcctccaaaatccagatatgaggaagagctaaggaccagagggaagactaccattactgcagctaacttcatagacgtgatcatcacccggcaaattgcctcggacaaggatgcgagggaacgtggctctcaaagttcagactcttctagtagcttatcttctcacaggtatgaaacacctagcgatgctattgaggtgataagtcctgccagctcacctgcgccaccccaggagaaactgcagacctatcagccagaggttgttaaggcaaatcaagcggaaaatgatcctaccagacaatatgaaggaccattacatcactatcgaccacagcaggaatcaccatctccccaacaacagctgcccccttcttcacaggcagagggaatggggcaagtgcccaggacccatcggctgatcacacttgctgatcacatctgtcaaattatcacacaagattttgctagaaatcaagtttcctcgcagactccccagcagcctcctacttctacattccagaactcaccttctgctttggtatctacacctgtgaggactaaaacatcaaaccgttacagcccagaatcccaggctcagtctgtccatcatcaaagaccaggttcaagggtctctccagaaaatcttgtggacaaatccaggggaagtaggcctggaaaatccccagagaggagtcacgtctcttcggagccctacgagcccatctccccaccccaggttccggttgtgcatgagaaacaggacagcttgctgctcttgtctcagaggggcgcagagcctgcagagcagaggaatgatgcccgctcaccagggagtataagctacttgccttcattcttcaccaagcttgaaaatacatcacccatggttaaatcaaagaagcaggagatttttcgtaagttgaactcctctggtggaggtgactctgatatggcagctgctcagccaggaactgagatctttaatctgccagcagttactacgtcaggctcagttagctctagaggccattcttttgctgatcctgccagtaatcttgggctggaagacattatcaggaaggctctcatgggaagctttgatgacaaagttgaggatcatggagttgtcatgtcccagcctatgggagtagtgcctggtactgccaacacctcagttgtgaccagtggtgagacacgaagagaggaaggggacccatcacctcattcaggaggagtttgcaaaccaaagctgatcagcaagtcaaacagcaggaaatctaagtctcctatacctgggcaaggctacttaggaacggaacggccctcttcagtctcctctgtacattcagaaggggattaccataggcagacgccagggtgggcctgggaagacaggccctcttcaacaggctcaactcagtttccttataaccctctgactatgcggatgctcagcagtactccaccaacaccgattgcatgtgctccctctgcggtgaaccaagcagctcctcaccaacagaacaggatctgggagcgagagcctgccccactgctctcagcacagtacgagaccctgtcggatagtgatgactagtaatgaactagtccgtaacttgaaagtatttcgatttcttggctttatatatcttgtggaaaggacgatgcacggtggccaataacggagac

SEQ ID NO: 796 - DNA, 2846 bp, Homo sapiens
  source 1..2846: mol_type = genomic DNA
accgccaccatgtcaagttcaggttatcctcccaaccaaggagcattcagcacagaacaaagtcgttatcctcctcactctgtccagtatacatttcccaacacccgccaccagcaggatccagcattcggaggcaaacatgaagctccatcctctccaatttcggggcaaccatgtggagatgatcaaaatgcttcaccttcaaaactctcaaaggaagagttaatacagagtatggatcgtgtagatcgagaaattgcaaaagtagaacagcagatccttaaactgaaaaagaaacaacaacagcttgaagaagaggcagctaaacctcctgagcctgagaagcccgtgtcccctcctcctgtggagcagaaacaccgcagtattgtccaaattatttatgatgagaatcggaaaaaagcagaagaagctcataaaatttttgaaggtcttggcccaaaagttgaactgccactgtataaccagccatcagataccaaggtgtaccatgagaacatcaagacaaaccaggtgatgaggaaaaaactcattttattttttaaaagaagaaatcatgcaagaaaacaaagggaacaaaaaatctgccagcgttatgatcagctcatggaggcatgggagaaaaaagtggacagaatagaaaataatcctcggaggaaagctaaagaaagcaaaacaagggaatactatgaaaagcagtttccagaaattcgaaaacaaagagaacagcaagaaagatttcagcgagttgggcagaggggagctggtctttcagccaccattgctaggagtgagcatgagatttctgaaattattgatgggctctctgagcaggagaataatgagaaacaaatgcggcagctctctgtgattccacctatgatgtttgatgcagaacaaagacgagtcaagttcattaacatgaatgggcttatggaggaccctatgaaagtgtataaagataggcagtttatgaatgtttggactgaccatgaaaaggagatctttaaggacaagtttatccagcatccaaaaaactttggactaattgcatcatacttggagaggaagagtgttcctgattgtgttttgtattactatttaaccaagaaaaatgagaattataaagccctcgtcagaaggaattatgggaaacgcagaggcagaaaccagcaaattgctcgaccctcgcaagaagaaaaagtagaagaaaaagaagaggataaagcagaaaaaacagaaaaaaaagaagaagaaaagaaagatgaagaggaaaaagatgaaaaagaagactccaaagaaaataccaaggaaaaggacaagatagatggtacagcagaagaaactgaggaaagagagcaagccacaccccgggggcgaaagactgccaacagtcagggccgccgtaagggccggatcaccaggtccatgacaaacgaagctgcagctgccagtgctgcagccgcagcggctactgaagagcccccaccacctctgccaccgccaccagaacccatttctacagagcctgtggagacctctcgatggacagaagaagaaatggaagttgctaaaaaaggtctagtagaacatggtcgtaactgggcagcaattgctaaaatggtgggaacgaaaagtgaagctcaatgtaaaaacttctattttaactataaaaggcgacacaatcttgacaacctcttacagcagcataaacagaaaacttcacgaaaacctcgtgaagagcgagatgtgtctcaatgtgaaagtgtcgcttccactgtttctgctcaggaggatgaagatattgaagcctccaatgaagaagaaaatccagaagacagcgaaggtgcagaaaatagttctgatacagaaagtgctccttctccttcaccagttgaagctgtcaagcccagcgaggacagtcctgaaaatgctacttctcgaggaaacacagaacctgcggttgagcttgagcccaccacggaaactgcacccagtacatctccctccttagcagttccaagtacaaaaccagctgaagatgaaagtgtggagacccaggtgaatgacagcatcagtgctgagacagcagagcagatggatgtagatcagcaggagcacagtgctgaagagggttctgtttgtgatcccccacccgctaccaaagctgactctgtggacgttgaagtgagggtgccagaaaaccatgcatctaaagttgaaggtgataataccaaagaaagagacttggatagagccagtgagaaggtggaacctagagatgaagatttggtggtagctcagcaaataaatgcccaaaggcccgagccccagtcagacaatgattccagtgccacgtgcagcgctgatgaggatgtggatggagagccagagaggcagagaatgtttcctatggactcaaagccttcactgttaaaccccactggatctatactcgtctcatctccgttaaaaccaaatccactggatctgccacagcttcagcatcgagctgctgttatcccaccaatggtatcctgcaccccatgtaacataccaattggaaccccagtgagcggctatgctctctaccagcgacacattaaagcaatgcatgagtcagcactcctggaggagcagcggcagagacaagaacagatagatttggaatgtagaagttctacaagtccatgtggcacatccaagagtccaaacagagagtgggaaggtaggtagtaatgaactagtccgtaacttgaaagtatttcgatttcttggctttatatatcttgtggaaaggacgacatatacagctgggagttacccaa

SEQ ID NO: 797 - DNA, 7115 bp, Homo sapiens
  source 1..7115: mol_type = genomic DNA
accgccaccatgtcaagttcaggttatcctcccaaccaaggagcattcagcacagaacaaagtcgttatcctcctcactctgtccagtatacatttcccaacacccgccaccagcaggagttcgcagtccctgattatcgttcctctcatcttgaagtgagtcaggcatcacagcttttgcagcaacagcagcagcaacagcttcgaaggcgaccttccttgctttcagaatttcacccaggttctgacaggcctcaagaaaggagaactagttatgaaccgtttcatccaggcccatccccagtggatcatgattcactggaatcgaagcgaccacgtctggaacaggtttctgattctcattttcagcgtgtcagtgctgcggttttgcctttagtgcacccgctgccagaagggctgagggcttctgcagatgctaagaaggatccagcattcggaggcaaacatgaagctccatcctctccaatttcggggcaaccatgtggagatgatcaaaatgcttcaccttcaaaactctcaaaggaagagttaatacagagtatggatcgtgtagatcgagaaattgcaaaagtagaacagcagatccttaaactgaaaaagaaacaacaacagcttgaagaagaggcagctaaacctcctgagcctgagaagcccgtgtcccctcctcctgtggagcagaaacaccgcagtattgtccaaattatttatgatgagaatcggaaaaaagcagaagaagctcataaaatttttgaaggtcttggcccaaaagttgaactgccactgtataaccagccatcagataccaaggtgtaccatgagaacatcaagacaaaccaggtgatgaggaaaaaactcattttattttttaaaagaagaaatcatgcaagaaaacaaagggaacaaaaaatctgccagcgttatgatcagctcatggaggcatgggagaaaaaagtggacagaatagaaaataatcctcggaggaaagctaaagaaagcaaaacaagggaatactatgaaaagcagtttccagaaattcgaaaacaaagagaacagcaagaaagatttcagcgagttgggcagaggggagctggtctttcagccaccattgctaggagtgagcatgagatttctgaaattattgatgggctctctgagcaggagaataatgagaaacaaatgcggcagctctctgtgattccacctatgatgtttgatgcagaacaaagacgagtcaagttcattaacatgaatgggcttatggaggaccctatgaaagtgtataaagataggcagtttatgaatgtttggactgaccatgaaaaggagatctttaaggacaagtttatccagcatccaaaaaactttggactaattgcatcatacttggagaggaagagtgttcctgattgtgttttgtattactatttaaccaagaaaaatgagaattataaagccctcgtcagaaggaattatgggaaacgcagaggcagaaaccagcaaattgctcgaccctcgcaagaagaaaaagtagaagaaaaagaagaggataaagcagaaaaaacagaaaaaaaagaagaagaaaagaaagatgaagaggaaaaagatgaaaaagaagactccaaagaaaataccaaggaaaaggacaagatagatggtacagcagaagaaactgaggaaagagagcaagccacaccccgggggcgaaagactgccaacagtcagggccgccgtaagggccggatcaccaggtccatgacaaacgaagctgcagctgccagtgctgcagccgcagcggctactgaagagcccccaccacctctgccaccgccaccagaacccatttctacagagcctgtggagacctctcgatggacagaagaagaaatggaagttgctaaaaaaggtctagtagaacatggtcgtaactgggcagcaattgctaaaatggtgggaacgaaaagtgaagctcaatgtaaaaacttctattttaactataaaaggcgacacaatcttgacaacctcttacagcagcataaacagaaaacttcacgaaaacctcgtgaagagcgagatgtgtctcaatgtgaaagtgtcgcttccactgtttctgctcaggaggatgaagatattgaagcctccaatgaagaagaaaatccagaagacagcgaaggtgcagaaaatagttctgatacagaaagtgctccttctccttcaccagttgaagctgtcaagcccagcgaggacagtcctgaaaatgctacttctcgaggaaacacagaacctgcggttgagcttgagcccaccacggaaactgcacccagtacatctccctccttagcagttccaagtacaaaaccagctgaagatgaaagtgtggagacccaggtgaatgacagcatcagtgctgagacagcagagcagatggatgtagatcagcaggagcacagtgctgaagagggttctgtttgtgatcccccacccgctaccaaagctgactctgtggacgttgaagtgagggtgccagaaaaccatgcatctaaagttgaaggtgataataccaaagaaagagacttggatagagccagtgagaaggtggaacctagagatgaagatttggtggtagctcagcaaataaatgcccaaaggcccgagccccagtcagacaatgattccagtgccacgtgcagcgctgatgaggatgtggatggagagccagagaggcagagaatgtttcctatggactcaaagccttcactgttaaaccccactggatctatactcgtctcatctccgttaaaaccaaatccactggatctgccacagcttcagcatcgagctgctgttatcccaccaatggtatcctgcaccccatgtaacataccaattggaaccccagtgagcggctatgctctctaccagcgacacattaaagcaatgcatgagtcagcactcctggaggagcagcggcagagacaagaacagatagatttggaatgtagaagttctacaagtccatgtggcacatccaagagtccaaacagagagtgggaagtccttcagcctgctccacatcaagtgataactaatctccctgaaggcgttcggcttccgacaactcgaccaaccaggccaccgccccctctcatcccgtcatccaaaaccacagtggcttcagaaaaaccatcttttataatgggaggctccatctcacagggaacaccaggcacttatttgacttctcataatcaggcttcctacactcaagaaacacccaagccgtcagtgggatctatctctcttggactgccacggcaacaggaatctgccaaatcagctactttgccctacatcaagcaggaagaattttctccccgaagccaaaactcacaacctgagggtctgttggtcagggcccaacatgaaggtgtagtcagaggtaccgcaggagccatacaagaaggaagtataactcggggaactccaaccagcaaaatttcagtggagagcattccatccctacggggctctatcactcagggcaccccggctctgccccagactggcataccaacagaggctttggtgaaggggtccatttcgagaatgcccattgaagacagcagtcctgagaaaggcagagaggaagctgcatccaaaggccatgttatttatgaaggcaaaagtggacatatcttgtcatatgataatattaagaatgcccgagaagggactaggagtccaagaacagctcatgaaatcagtttaaagagaagctatgaatcagtggaaggaaatataaagcaagggatgtcaatgagggagtctcctgtatcagcaccgttagaggggctgatatgccgagcattacccagggggagtcctcattctgacctcaaagaaaggactgtattgtctggctccataatgcaggggacaccaagagcaacaactgaaagctttgaagatggccttaaatatcccaaacaaattaaaagggaaagtcctcccatacgagcatttgaaggtgccattaccaaaggaaaaccatatgatggcatcaccaccatcaaagaaatggggcgttccattcatgagattccaaggcaagatattttaactcaggaaagtcggaaaactccagaagtggtccagagcacacggccgataattgagggttccatttcccagggcacaccaataaagtttgacaacaactcaggtcaatctgccatcaaacacaatgtcaaatccttaatcacggggcctagcaaactatcccgtggaatgcctccgctggaaattgtgccagagaacataaaagtggtagaacggggaaaatatgaggatgtgaaagcaggcgagaccgtgcgttcccggcacacgtcagtggtaagctctggcccctccgttcttaggtccacactgcatgaagctcccaaagcacaactgagccctgggatttatgatgacaccagtgcacggaggacccctgtgagttatcaaaacaccatgtccagaggctcacccatgatgaacagaacttctgatgttacaatttcttctaacaagtctaccaatcatgaaaggaaatcgacactgacccctacccagagggaaagtatcccagcgaagtctccagtgcctggggtggaccctgtcgtgagccacagtccgtttgatccccatcacagaggcagcactgcaggcgaggtttatcggagccacctgcccacgcacttggatccagccatgccttttcacagggctttggatcctgcagcggctgcttacctgtttcagagacagctttcaccaactccaggttacccaagtcagtatcagctttacgcaatggagaacacaagacagacaatcttaaatgattacattacctcacaacagatgcaagtgaacttgcgtccagatgtggccagaggactctccccaagagagcagccactgggtctcccatacccagcaacgagaggaatcattgacctgaccaatatgcctccaacaattttagtgcctcatccagggggaacaagcactcctcccatggacagaatcacttatattcctggtacacagattactttccctcccaggccgtacaactctgcttccatgtctccaggacacccaacacaccttgcagctgctgcaagtgctgagagggaacgggaacgggagcgggagaaggagcgggagcgggaacggattgctgcagcttcctccgacctctacctgcggccaggctcagaacagcctggccgacctggcagtcatggatatgttcgctccccttccccttcagtaagaactcaggagaccatgttgcaacagagacccagtgttttccaaggaaccaatggaaccagtgtaatcacacctttggatccaactgctcagctacgaatcatgccactgcctgctgggggcccttcaataagccaaggcctgccagcctcccgttacaacactgctgcggatgccctggctgctcttgtggatgctgcagcttctgcaccccagatggatgtgtccaaaacaaaagagatatcttctcacaggtatgaaacacctagcgatgctattgaggtgataagtcctgccagctcacctgcgccaccccaggagaaactgcagacctatcagccagaggttgttaaggcaaatcaagcggaaaatgatcctaccagacaatatgaaggaccattacatcactatcgaccacagcaggaatcaccatctccccaacaacagctgcccccttcttcacaggcagagggaatggggcaagtgcccaggacccatcggctgatcacacttgctgatcacatctgtcaaattatcacacaagattttgctagaaatcaagtttcctcgcagactccccagcagcctcctacttctacattccagaactcaccttctgctttggtatctacacctgtgaggactaaaacatcaaaccgttacagcccagaatcccaggctcagtctgtccatcatcaaagaccaggttcaagggtctctccagaaaatcttgtggacaaatccaggggaagtaggcctggaaaatccccagagaggagtcacgtctcttcggagccctacgagcccatctccccaccccaggttccggttgtgcatgagaaacaggacagcttgctgctcttgtctcagaggggcgcagagcctgcagagcagaggaatgatgcccgctcaccagggagtataagctacttgccttcattcttcaccaagcttgaaaatacatcacccatggttaaatcaaagaagcaggagatttttcgtaagttgaactcctctggtggaggtgactctgatatggcagctgctcagccaggaactgagatctttaatctgccagcagttactacgtcaggctcagttagctctagaggccattcttttgctgatcctgccagtaatcttgggctggaagacattatcaggaaggctctcatgggaagctttgatgacaaagttgaggatcatggagttgtcatgtcccagcctatgggagtagtgcctggtactgccaacacctcagttgtgaccagtggtgagacacgaagagaggaaggggacccatcacctcattcaggaggagtttgcaaaccaaagctgatcagcaagtcaaacagcaggaaatctaagtctcctatacctgggcaaggctacttaggaacggaacggccctcttcagtctcctctgtacattcagaaggggattaccataggcagacgccagggtgggcctgggaagacaggccctcttcaacaggctcaactcagtttccttataaccctctgactatgcggatgctcagcagtactccaccaacaccgattgcatgtgctccctctgcggtgaaccaagcagctcctcaccaacagaacaggatctgggagcgagagcctgccccactgctctcagcacagtacgagaccctgtcggatagtgatgactagtaatgaactagtccgtaacttgaaagtatttcgatttcttggctttatatatcttgtggaaaggacgactggtaatcgcgcataaccaaaca

SEQ ID NO: 798 - DNA, 3281 bp, Homo sapiens
  source 1..3281: mol_type = genomic DNA
accgccaccatgtcaggtgtgatggtcggctcccacgcggacatggcgccggcctctactgcggagggggccggggagaagccaggccctgcggcccctgccccggcggcccagtacgaatgtggggagtgtggcaagtcattccggtggtcgtcccggctcctgcaccaccagcgcacgcacacaggcgagcggccctacaagtgcccagactgccccaaggctttcaaaggctcctcggccctgctctaccaccagcgaggccacacgggcgagcggccctaccagtgccccgactgtcccaaggccttcaagcgctcctctctgctgcagatccaccgtagcgtgcacaccggcctgcgggccttcatctgcggccagtgcggcctggccttcaagtggtcgtcccactaccagtaccacttaaggcagcacacaggcgagcgcccctacccgtgcccggactgccccaaggccttcaagaactcgtccagcctgcggcgccaccgccacgtgcacaccggcgagcggccctacacctgtggagtctgcgggaagagcttcacgcagagcaccaacctgcggcagcaccagcgcgtgcacacgggcgagcggcccttccgctgcccgctctgccccaagaccttcacccactcctccaacctgctgctgcaccagcgcacgcacggcgccgcccccgccccgggtaccgcctccgcggccccgcccccccagtcccgggagcccggcaaggtcttcgtgtgcgacgcctacctgcagcggcacctccagccccacagcccgcccgcgcctcccgccccgccgcccccgcccccgcccgtggtgcctgagctctttttggcggcggcggagaccacggtggagctggtgtaccgctgcgatggctgcgagcagggattcagcagcgaggagctgctcctggagcaccagccgtgccccgggcccgatgcggcgccccagccccaggaggcacccgccgaggcgcccaaggccgaccagccaccgtcccctctgccgcagccccctcctcccgccgccgcccccgcgcctggctttgcctgtctgccctgcggcaagtccttccggacggtggctgggctctcccgccaccagcacagccacggggctgccggcgggcaagcgttccgctgcggcagctgcgacggctccttcccgcagctggccagcctcctggcgcatcagcagtgccacgtggaagaggccgcggccgggcgcccgcccccgcaggctgaggctgcggaggtgacctgcccccaggaaccgctggcgcctgccgcccccgtcccgccgccacccccgtccgcccccgcttctgcggagcggccctacaaatgtgccgagtgcggcaagtccttcaagggctcctccgggctgcgctaccacctgcgggaccacacgggcgagcggccctaccagtgtggcgagtgcggcaaggccttcaagcgctcctccctgctggccatccaccagcgggtgcacacgggcctgcgggccttcacctgtggccagtgcggcctcaccttcaagtggtcgtcccactaccagtaccacctgcggctgcactctggcgagcggccctacgcctgcggggagtgtggcaaggccttccgcaacacgtcgtgcctgcgtcgccaccgccacgtgcacactggcgagaggccccacgcctgcggtgtctgcggcaagagcttcgcgcagacctccaacctgcggcagcaccagcgcgtgcacacgggcgagcggcccttccgctgcccgctctgccccaagaccttcacccactcctccaacctgctgctgcaccagcgcacgcactcggcggagcgccccttcacctgccccatctgcggtcgcggcttcgttatggccgcctatctgcagcggcacctgaggacgcacgccccggccaacacgcctcccagcaccacagcccctgccgccggcccccagccccctgctccactggctgctgcgcgggccccgccagccacccaagatgtccacgtcctgccccacctccaggccacgctctccctcgaggtggcggggggcacggcccaggccccgagcttggggccagcagcgcccaactctcagacgttcctcctggtgcaaactgcccagggcctccagctgatccccagcagcgtgcagccccctacacctccgccccctcccgcacctcccaagctcatcctgctgccctcctccagtgctggggctgggggcggccgtgcaaggcagggcccgcgggcagtggggaaagcgggccagggggcgggagtggtctggctgccaggccctgggggtctaggggtgcagggagcggccagcgctggggccagcgggacagggcagagcctcatcgttctgcagaatgtggggggtggggaggcagggccacaggaaatgagtggggtgcagctccagcccctccgaccagccccagaagtaaccacggtccagctccagccagcgcaggaggtgaccacagtccagctccagccagcacaggaagtaaccacggtccagctccagccagcacaggaggtgaccacggtccagctccagcccgtggccggccagctctccaattccagtgggggagctgtggctactgaggcacccaacctgctggttgttcagagcggggcagctgaggagttgctcactggcccgggccccggggaggcgggggatggcgaggccagcactggtgtggtccaggatgtcctctttgagacactccagacggacgagggcttgcagagcgtgctggtgctgagcggggccgatggcgaacagactcgactctgcgtacaggaggtagaaacacttcctcctgggctgacggagccgcctgccaccggcccacccggacagaaactcctcatcatccgcagcgccccagccactgagctgctggacagcagcaacactggaggaggcaccgccacgctgcagctcctggccccaccgccgtcaggcccagcctcgggccccgcggggctccccggggctccagcctcccagatggtgcaagtggtccccgcaggagctgggcctggtgttatgacccctcagggcctgccctccatccagattgtccagactctacccgcagtccagctggtgcacacgttttagtaatgaactagtccgtaacttgaaagtatttcgatttcttggctttatatatcttgtggaaaggacgacggaggcggttcactccgctagga

SEQ ID NO: 799 - DNA, 2711 bp, Homo sapiens
  source 1..2711: mol_type = genomic DNA
accgccaccatggagcccgagactgcgctgtggggcccggatctgcagggtccggaacagagccccaacgatgctcacagaggtgccgagagtgaaaacgaagaggagagccctcggcaggaaagttctggggaggagatcatcatgggagacccggctcagagtccagaatccaaggactcaacagagatgtccctggagagatcctcccaggacccctctgtcccccagaaccccccaaccccactgggtcactccaatcccttggaccaccagatccccctggaccccccagccccggaggtagtccctaccccatctgactggaccaaggcctgcgaggccagctggcagtggggcgctctcaccacatggaacagccccccagtcgtccccgccaacgagcccagcctgcgggagctggtgcagggccgcccggcgggggcggagaagccctacatctgcaacgagtgcggcaagagcttcagccagtggtccaagctgctgcggcaccagcgcatccacacgggagagcggcccaacacctgctccgagtgcggcaagagcttcacgcagagctcgcacctggtgcagcaccagcgcacgcacaccggcgagaagccctacaagtgccccgactgcggcaagtgcttcagctggagctccaacctggtgcagcaccagcgcacgcacacgggagagaagccctacaagtgcacggagtgcgagaaagccttcacccagagcaccaacctcatcaagcaccagcgatcccacaccggcgagaagccctacaagtgcggcgagtgccgccgggctttctaccgcagctcggacctcatccagcaccaggccacccacacaggcgagaaaccctacaagtgccccgagtgcgggaagcgcttcggccagaaccacaacctcctcaagcaccagaagatccacgcgggcgagaagccataccgctgcaccgagtgcgggaagagcttcatccagagctcggagctgacccagcaccagcgcacgcacacaggcgagaagccctacgagtgcctagagtgcggcaagagcttcggccacagctccaccctcatcaagcaccagcggactcacctgcgcgaggacccgttcaagtgcccagtgtgcggcaagaccttcaccctgagcgccacgttgctgcggcaccagcgcacgcacacgggcgagcggccctacaagtgcccagagtgcggcaagagcttcagcgtcagctccaacctcatcaaccaccagcgcatccaccgcggcgagcggccctacatctgcgccgactgcggcaagagcttcatcatgagctccacccttatccgccaccagcgcatccacaccggtgagaagccctacaagtgttccgactgcggcaagagcttcatccgcagctcccaccttatccagcaccgccgcacgcacaccggcgagaagccctacaagtgccccgagtgcggcaagagcttcagccagagctccaaccttattacccacgtccgcacgcacatggacgagaacctgttcgtgtgctccgactgcgggaaggccttcctggaagcccacgagctggagcagcaccgggtgatccatgagagggggaagaccccagcgcgtagggcccagggcgacagcctgctggggctcggggacccctccctgctgaccccgccgccgggagccaagccgcacaagtgtctcgtgtgcggaaagggcttcaacgacgagggcatcttcatgcaacatcagaggatccacatcggagaaaacccctacaaaaatgcagacggcctcatcgcacacgcagcccccaaacctcctcagttacgatccccaaggctccctttcagagggaattcctaccccggggctgcggagggcagagcggaggcccccggacagccccttaagccgccggagggtcaggagggcttcagccagaggcgggggctgctgtcctccaagacctacatctgctcccactgcggagagagcttcctggatcgctctgtgctcctccagcatcagctcacccacggcaacgaaaagccctttctctttcctgattatagaattggcctaggggaaggcgcagggcccagccccttcttaagtgggaagccctttaaatgccctgaatgcaaacaaagctttggcctcagctctgagctgctgctgcaccagaaagtccatgcaggcgggaagagctcccagaagagtccagagctggggaagagctcttccgtcctcctggagcatctcaggagccccctgggggccagaccctaccgctgctcagattgcagggcctccttcctcgaccgcgtggccctcacccggcaccaagaaacccacacccaggaaaaaccccccaatcccgaggacccccctccagaggcagtcaccctgtccacagatcaggaaggtgagggcgagacccctacccccacagagagcagcagccatggggaagggcaaaaccccaaaaccctagtggaagaaaagccctatctgtgccccgagtgtggagccggcttcacagaagtcgcagccctcctgctccataggagctgccacccaggtgtctccctgtagtaatgaactagtccgtaacttgaaagtatttcgatttcttggctttatatatcttgtggaaaggacgagaatttccagctcttggaatggcc

SEQ ID NO: 800 - DNA, 2699 bp, Homo sapiens
  source 1..2699: mol_type = genomic DNA
accgccaccatgtctttgcaagactccactctttccagagaggggaaaccagagggagagattatggctgctgtgtttttctcagttggacgcctgagccctgaagttacccagccagatgaagatcttcaccttcaggcagaagaaacacaattggtaaaggaatcggtgacatttaaggatgtggctatagacttcacattggaggagtggaggttgatggaccctacacagaggaacctgcacaaggatgtgatgctagagaattacaggaatctggtctccctggggcttgcagtttccaaaccagacatgatatctcatttggagaatgggaaaggaccatgggtgacggtgagagaaatttcaagaattccctatcctgacatggagcccaaacctgcaaccaagaaggctacacgaacaaaggctatttctgaagatttatcacaggaggccatactagagaaacttacagagaatggtctgtgggattccagaatggaagggttatggaaatggaatgataggatattgagattacaaaataatcaggagaatcatttgagtcaaagaataattccactcaagaagactcccactagtcaaagaggctttagatttgaatctattcttattccagaaccaggcattgccacagaagagcttcacagcagatgccaaacacaagaggaaaatttcacagagaatttaaatttgattacagatacccatttggggaagataatttgcaaggagatgaaaggcagcaaagccataaggcagacttcagaactaactttggggaaaaaatccaataataaggaaaaaccctacaaatgtagtacatgcgaaaaggcctttcattatagatcattgctcattcaacatcaaagaactcatactaaagaaaaaccttatgaatgtaatgaatgtgggaaaacattcagccagccttcatatctcagtcagcacaaaaaaatccacactggagaaaaaccctataaatgtaatgaatgtggaaaggccttcattgcttcttcatcacttatggtacatcagagaattcacactaaagagaaaccttatcagtgtaatgtgtgtgggaaatcttttagccagtgtgcccgtcttaatcagcaccagagaattcaaactggagagaaaccctataaatgtagtgaatgcgggaaagcttttagtgataaatcaaaacttgcaagacatcaggaaactcacaatggtgagaaaccctacaaatgtgatgattgtgggaaagcctttaggaacaagtcatatcttagtgtacatcagaagacccacactgaagagaaaccatatcagtgcaacgagtgtgggaagtcttttaagaataccacaatttttaatgtgcatcagaggattcatactggagagaaaccttttagatgtaacgaatgtggaaaagcctatagaagtaattcaagccttatcgtacatataagaactcacactggggaaaaaccctatgaatgtaatgaatgtgggaaagcattcaaccgcatcgcaaatttcacagaacatcagcgaattcacacaggagaaaaaccctataaatgtaatgaatgtgggaaagcattcattaattattcatgccttactgtacaccacagaatgcatacaggagagaaaccttataaatgtactgaatgtggaaaggccttcatgcgttcttcttctctaattatacatcagcgtattcatactgaagagaaaccttatctgtgcaatgaatgtggggagtctttcagaataaaatcacacttaactgtacatcagagaattcacactggagagaaaccatataaatgtactgactgcgagagggcattcaccaaaatggtaaatctcaaggagcatcagaaaattcatactggagtgaaaccctataaatgttatgactgtggaaagtcctttaggactaaatcataccttattgtacatcagaggacccatactggagaaaaaccatataaatgtaatgaatgtgagaaagccttcactaatacatcacagcttaccgtgcaccaacgaaggcatactggagagaagccctataaatgcaatgaatgtggaaaggttttcacaagtaactcaggctttaatacacatcaaagaacacatactggagagaaaccatttaaatgtaatgactgtgggaaagcatttagccagatggtacatgtcacagaacatcagaaaatccatagtggagagaagccctataagtgtgatgtctgtggaaaagccttcaggaggggttcttaccttacagtgcattggagaacacacactggagaaaaaccctacacctgtaaggaatgtggaaagggttgtattactctatcacagctaaccctacatcagagaattcatactggggagaggccctataaatgtgaagaatgtggaaaagccttcagaactaactcagactttactgtacacttgaggatgcatactggagaaaaaccctataaatgtaatgaatgtggaaaagccttcaggagtagttcgagccttactgtacatcaaagaatacatcaaagagaaactcagttaatatagtaatgaactagtccgtaacttgaaagtatttcgatttcttggctttatatatcttgtggaaaggacgatacactgtagccgcatagatgcga

SEQ ID NO: 801 - DNA, 1220 bp, Homo sapiens
  source 1..1220: mol_type = genomic DNA
accgccaccatggattcagtggtctttgaggatgtagatgtgaacttcacccaggaggagtgggctttgctggatccttcccagaagaatctctacagagatgtgatgcaggaaaccttcaggaacctggcttctgtaggaaaaaaatggaaagatcagaaaattgaagatgagtacaaaaatcccaggagaaacctaagaggtcttatgggagagagactcttagaaagtaagaaagatcatcagcatggagaaattttgacccaggttccagatgacatgctgaagaagaaaactccccgagtaaaatcatgtggagaagtcagcgtgggtcatgcatcccttaataggcaccacagagctgacactggacacaagccatatgagtatcaggaatatggacagaagccatataaatgtacatactgtaagaaagccttcagtgatctcccctactttcgaacacatgaatgggctcacactggggggaaaccttatgattgtgaggaatgtggaaaaagctttatttcccgttcaagcattcgaagacacaggataatgcacagtggagatggaccctacaaatgtaacttttgtgggaaagccttgatgtgtctcagtttgtatcttatccacaaacgaactcacactggagagaaaccatatgaatgtaaacagtgtggtaaagcctttagtcattctggtagccttcgaatacatgaaagaactcacactggagagaagccttatgaatgcagtgagtgtgggaaagcattccatagttccacatgcctccatgcacataaaataactcacactggggagaagccgtatgaatgtaaacagtgtgggaaagcctttgtttctttcaattccgttcgatatcatgaaagaactcacactggagagaagccctatgaatgtaagcaatgtgggaaagccttcagatctgcctcgcaccttcgaacacatggaaggactcacactggagagaaaccctatgaatgtaaacaatgtggtaaagcctttggatgtgcctcgagcgttaaaatccatgaaaggactcacactggagaaaaaccctgtagctccaacacttcgaaaggccaaggcgagaagattgcttagtaatgaactagtccgtaacttgaaagtatttcgatttcttggctttatatatcttgtggaaaggacgaacgtgagcttcatttcggtagtcg

SEQ ID NO: 802 - DNA, 1688 bp, Homo sapiens
  source 1..1688: mol_type = genomic DNA
accgccaccatgggaccattgcaatttagagatgtggccatagaattctctctggaggagtggcattgcctggacactgcacagcggaatttatataggaatgtgatgttagagaactacagtaacctggtcttccttggtattactgtttctaagccagacctgatcacctgtctggagcaaggaagaaaacctttgaccatgaagagaaatgagatgatagccaaaccctcagtaatgtgttctcattttgcccaagacctttggccagagcagagcatgaaagattctttccaaaaagtggtactgagaagatatgaaaaatgtgaacatgacaatttacagttaaaaaaaggatgtataagtgtggatgagtgtaaggtgcacaaagaaggttataatgaacttaaccaatgtttgacaactaccccaagaaaaatatgtcaatgtgataaatatgtgaaagtccttcatcaatttccaaattcaaacggacaaaagagaggacatactgggaaaaaacctttcaaatatatagaatgtggcaaagcttttaagcagttctcaactcttactacacataagaaaattcatactggagggaaaccctacaaatgtgaagaatgtggcaaagcctttaaccactcttgtagccttactagacataagaaaattcatactggagagaaaccctacaaatgtgaagaatgtggcaaagcctttaagcactcctccactcttactacacataagagaaatcatactggagagaaaccctacaagtgtgataaatgtggcaaagcctttatgtcatcctcaacccttagtaaacatgagataattcatacggaaaagaaaccctacaaatgtgaagaatgtggcaaagccttcaaccggtcctcaacccttactacacataagataattcatactggagaaaaaccctacaaatgtgaagaatgtgacaaagcctttaagtactcctatacccttactacacataaaagaattcatactgaagacaaaccctacaaatgtgaagaatgtggcaaagcctttaagtactcctctacccttactacacataagagaattcatactggagagaaaccctacaaatgtgaagaatgtggcaaagccttcaagcggtcttcagaccttactacgcataagataattcatactggagagaaaccctacaaatgtgaagaatgtggcaaagcttttaagtactcctctaaccttactacacataagaaaattcatactggagagagaccctacaaatgtgaagaatgtggcaaagccttcaaccagtcctcaatccttactacacataggagaattcatactggagagaaattctacaaatgtgaagaatgtggcaaagcttttaagtgctcctctaaccttactacacataagaaaattcatactggagagagaccctacaaatgtgaagaatgtggcaaagccttcaaccagtcctcaatccttactacacatgagagaatcatactggagagaaattctacaaatgtgaagaatgtggcaaagccttcaagcggtcctcacaccttactacacataagatagtaatgaactagtccgtaacttgaaagtatttcgatttcttggctttatatatcttgtggaaaggacgataaactaaggaccatgtagtatag

SEQ ID NO: 803 - DNA, 1487 bp, Homo sapiens
  source 1..1487: mol_type = genomic DNA
accgccaccatggattcagtggcctttgaggatgtggctgtgaacttcaccctggaggagtgggctttgctggatccttcccagaagaatctctacagggatgtgatgcgggaaaccttcaggaacctggcttctgtaggaaaacaatgggaagaccagaacattgaagacccattcaaaattcccaggagaaatataagtcatattccagagagactctgtgaaagtaaagaaggtggtcaaggtgaagaaaccttcagccagattccagatggtattctgaacaagaaaactcctggagtaaaaccgtgtgaaagcagtgtgtgtggagaagttggcatgggtccttcatcacttaataggcacatcagagatcacactggacgtgaaccaaatgaatatcaggaatatggaaagaagtcatatacacgtaaccagtgtggacgagccttgagttatcatcgctcttttccagtacgtgaaaggactcatcctggaggaaagccctatgattgtaaggaatgtggagaaacctttatttctcttgtaagcattcgaagacacatgttaacgcataggggaggtgtaccttacaaatgtaaggtgtgtgggaaagcctttgattatcccagtttatttcgtatacatgaaagaagtcacactggagagaaaccttatgaatgcaagcaatgtgggaaagccttcagttgttccagttacattagaatacatgaaaggactcacactggagataaaccctatgaatgcaagcagtgtgggaaagctttcagttgttccaagtacattcgaatccatgaacgaactcacacaggagagaaaccctacgaatgtaaacagtgcggtaaagcctttaggtgcgccagttctgttcgaagtcacgagaggactcacaccggagagaaactttttgaatgtaaggaatgcgggaaggctttgacttgtcttgcaagtgttagaagacacatgataaagcacactggcaatggaccttataaatgtaaggtgtgtgggaaagcctttgatttccccagttcatttcgaatccatgaaaggacccacactggagagaaaccctatgattgtaagcaatgtgggaaagccttcagttgttccagttcgtttcgaaaacatgaaagaattcacactggagagaaaccctataaatgtacaaaatgtgggaaagccttcagtcgttccagttacttccgaatccatgaaagaactcacactggagagaaaccctatgaatgtaagcaatgtgggaaagccttcagtcgatccacttactttcgagtacatgaaaaaattcatactggagagaaaccctatgagaaccctaaccctaacgcttcagttgtcccagttctttcatagtaatgaactagtccgtaacttgaaagtatttcgatttcttggctttatatatcttgtggaaaggacgaaggaagtgcttatgaacgatttac

SEQ ID NO: 804 - DNA, 1028 bp, Homo sapiens
  source 1..1028: mol_type = genomic DNA
accgccaccatggtggggggcctgccagggaatgtttcccagcaccttgactttgggagcagcctagagcagccacaaggtcattggataattaagacaaagtcaaagaggagacatttcacagatacctcagccaggcaccatgaggcctatgaggtcaagaatggagagaagtttgagaaattaggaaaaaatattagcgtcagcacacaactcactacaaatcagacaaatcctagtggtcagatatcttatgaatgtggacaatgtggcagatatttcattcaaatggcagacttccaccgacatgagaaatgtcacactggtgaaaagtcttttgaatgcaaagaatgtggaaaatacttcagatataactcattacttattcggcatcagataattcacactggaaagaaaccatttaaatgtaaagaatgtggaaaaggtttaagttcagacacagccttgattcagcatcagagaatccacactggagaaaagccctatgaatgtaaggagtgcggcaaggccttcagtagcagctctgtcttcctccagcaccagaggttccacactggggagaagctctatgaatgtaacgaatgttggaaaactttcagttgcagctcaagtttcactgtccatcagcgaatgcacactggggagaaaccttatgaatgtaaagagtgtggaaaacgattaagctccaacacagccttgactcagcatcagcgaattcacactggggagaagccctttgaatgtaaggagtgtgggaaggcattcaatcagaaaataaccctgattcagcaccagcgagttcacactggcgagaaaccttatgagtgtaaagtgtgtggtaaaaccttcagctggtgtggaagattcattctgcatcagaaactacacactcagaagacacctgtccaagcatagtaatgaactagtccgtaacttgaaagtatttcgatttcttggctttatatatcttgtggaaaggacgacgtcgactaaacgtgacgggctgt

SEQ ID NO: 805 - DNA, 1370 bp, Homo sapiens
  source 1..1370: mol_type = genomic DNA
accgccaccatgttccagaccgcttggcgccaggaaccagtgacctttgaggatgtggctgtgtacttcacccagaatgaatgggccagcctggactctgtgcagagggccctgtacagggaagtgatgctggagaattatgcaaatgtggcttccctggcattcccattcaccacgcctgttctggtctcccagctggagcaaggggaactgccatggggcctcgatccctgggaacctatgggcagggaggctctcagaggtatctgtccaggggatgaggccagaactgagaaggaaggattaactccaaaggatcatgtgtccaaagaaacagagtccttcagactgatggtggggggcctgccagggaatgtttcccagcaccttgactttgggagcagcctagagcagccacaaggtcattggataattaagacaaagtcaaagaggagacatttcacagatacctcagccaggcaccatgaggcctatgaggtcaagaatggagagaagtttgagaaattaggaaaaaatattagcgtcagcacacaactcactacaaatcagacaaatcctagtggtcagatatcttatgaatgtggacaatgtggcagatatttcattcaaatggcagacttccaccgacatgagaaatgtcacactggtgaaaagtcttttgaatgcaaagaatgtggaaaatacttcagatataactcattacttattcggcatcagataattcacactggaaagaaaccatttaaatgtaaagaatgtggaaaaggtttaagttcagacacagccttgattcagcatcagagaatccacactggagaaaagccctatgaatgtaaggagtgcggcaaggccttcagtagcagctctgtcttcctccagcaccagaggttccacactggggagaagctctatgaatgtaacgaatgttggaaaactttcagttgcagctcaagtttcactgtccatcagcgaatgcacactggggagaaaccttatgaatgtaaagagtgtggaaaacgattaagctccaacacagccttgactcagcatcagcgaattcacactggggagaagccctttgaatgtaaggagtgtgggaaggcattcaatcagaaaataaccctgattcagcaccagcgagttcacactggcgagaaaccttatgagtgtaaagtgtgtggtaaaaccttcagctggtgtggaagattcattctgcatcagaaactacacactcagaagacacctgtccaagcatagtaatgaactagtccgtaacttgaaagtatttcgatttcttggctttatatatcttgtggaaaggacgacagtacttcatttccgattgcaga

SEQ ID NO: 806 - DNA, 575 bp, Homo sapiens
  source 1..575: mol_type = genomic DNA
accgccaccatgctccaaacaacttggcctcaggagtcagtgacctttgaggatgtggctgtttacttcacccagaatcaatgggccagcctcgaccctgcgcagagggccctgtacggggaggtgatgctggagaattatgcaaatgtggcttctctggtagcgtttccattccccaaacctgctctgatctcccacctggagagaggggaagcaccatggggcccagatccctgggacaccgagattctgagaggcatcagtcaaggtggtgagtcctggatcaaaaatgaagggctagttataaagcaggaagcctctgaagaaacagagttgcacagaatgccagtaggaggacttctcaggaacgtttctcagcactttgattttaaaaggaaggcactgaagcagactttcaatctaaatccaaatctgatacttcgaggtggatcagttgaggtcaggagtttgagaccagcctagtaatgaactagtccgtaacttgaaagtatttcgatttcttggctttatatatcttgtggaaaggacgaaattattcacgggtgagccgtcta

SEQ ID NO: 807 - DNA, 923 bp, Homo sapiens
  source 1..923: mol_type = genomic DNA
accgccaccatggacatgcctgaggtcctcaagtccctgctggagcactctctgccttggccagagaagagaacagataaggaaaaggggaaggaaaagctggaggaggacgaggccgcagccgccagcaccatggctgtctcagcctccctcatgccacccatctgggacaagaccatcccatatgatggcgaatctttccacctggagtacatggacctggatgagttcctgctggagaatggcatccccgccagccccacccacctggcccacaacctgctgctgcctgtagcagagctagaagggaaggagtctgccagctcttccacagcatccccaccatcctcctccactgccatctttcagccctctgaaaccgtgtccagcacagaatcttccctggagaaggagagggagactcccagtcccatcgaccccaattgtgtggaagtggatgtgaacttcaatccggaccccgccgacctggtgctctccagtgtgccaggcggggagctcttcaaccctcggaagcacaagtttgctgaggaggacctgaagccccagcctatgatcaaaaaggccaagaaggtctttgtccccgacgagcagaaggatgaaaagtactggacaagacgcaagaagaacaacgtggcagctaaacggtcacgggatgcccggcgcctgaaagagaatcagatcaccatccgggcagccttcctggagaaggagaacacagccctgcggacggaggtggccgagctacgcaaggaggtgggcaagtgcaagaccatcgtgtccaagtatgagaccaaatacgggcccttgtagtaatgaactagtccgtaacttgaaagtatttcgatttcttggctttatatatcttgtggaaaggacgagcccagtccgagccacctgattgt

SEQ ID NO: 808 - DNA, 1013 bp, Homo sapiens
  source 1..1013: mol_type = genomic DNA
accgccaccatgtccgacgcgggcggcggaaagaagccgcctgtggacccgcaggcaggacccggtccggggccggggcgcgcagctggggaaaggggcctgtcggggtccttccccctggtcctgaagaagctgatggagaaccccccgcgcgaggcgcgcctcgataaggaaaaggggaaggaaaagctggaggaggacgaggccgcagccgccagcaccatggctgtctcagcctccctcatgccacccatctgggacaagaccatcccatatgatggcgaatctttccacctggagtacatggacctggatgagttcctgctggagaatggcatccccgccagccccacccacctggcccacaacctgctgctgcctgtagcagagctagaagggaaggagtctgccagctcttccacagcatccccaccatcctcctccactgccatctttcagccctctgaaaccgtgtccagcacagaatcttccctggagaaggagagggagactcccagtcccatcgaccccaattgtgtggaagtggatgtgaacttcaatccggaccccgccgacctggtgctctccagtgtgccaggcggggagctcttcaaccctcggaagcacaagtttgctgaggaggacctgaagccccagcctatgatcaaaaaggccaagaaggtctttgtccccgacgagcagaaggatgaaaagtactggacaagacgcaagaagaacaacgtggcagctaaacggtcacgggatgcccggcgcctgaaagagaatcagatcaccatccgggcagccttcctggagaaggagaacacagccctgcggacggaggtggccgagctacgcaaggaggtgggcaagtgcaagaccatcgtgtccaagtatgagaccaaatacgggcccttgtagtaatgaactagtccgtaacttgaaagtatttcgatttcttggctttatatatcttgtggaaaggacgaattcccagatagtcgctttgagca

SEQ ID NO: 809 - DNA, 1592 bp, Homo sapiens
  source 1..1592: mol_type = genomic DNA
accgccaccatggagctcccctctcccgagtctgaggaagtccacgagcccagattaggggagctcttgggaaatccagaaggtcagagcctggggagttccccctctcaggacaggggctgcaagcaggtgacagtgacccattggaagatccagacaggagagacagctcaagtgtgcaccaagtcaggaagaaaccatattctgaactcagaccttcttctgcttcagagagagctcatagagggggaagccaatccttgcgatatctgtggcaaaaccttcacgtttaattcggacctagttaggcatcggatttcgcatgctggggagaaaccttacacgtgcgatcagtgtgggaaaggctttggccagagctcacaccttatggagcatcagagaattcacactggagagagactctacgtctgtaatgtgtgtgggaaagacttcattcactattcaggtctcattgagcatcagcgcgttcattcaggagaaaagcccttcaaatgtgcgcagtgtgggaaggcgttttgtcacagttcagacctgattaggcaccagagagttcacaccagagagagaccttttgaatgcaaagagtgtgggaaaggcttcagtcagagctccttacttattcgccatcagaggattcacacgggagaaaggccctatgagtgcaatgaatgtgggaaatccttcataaggagctcgagcctcattcgccattatcagatccacacagaagtgaaacagtatgaatgcaaagaatgtgggaaggcattccgtcatcgctcagaccttattgaacaccagagaattcacaccggagagagaccctttgaatgcaatgagtgtgggaaagcctttattcggagttcaaagctcattcagcatcagaggatccatactggggagaggccttacgtatgcaatgagtgtgggaagcgcttcagccagacgtcaaacttcacccagcatcagagaattcacactggagagaaactctatgaatgtaacgagtgtgggaaagctttctttctgagttcataccttattcgacaccagaaaatccacactggagagagagtgtatgaatgtaaggaatgtgggaaagcgtttctccagaaagcccatctcactgagcaccagaagatccactctggggacaggcccttcgaatgtaaagactgtgggaaagccttcatccagagctccaagctgcttctgcaccagattattcacactggagaaaagccctatgtgtgcagttattgtgggaaaggctttattcagaggtcaaacttccttcaacaccagaaaattcatactgaagagaagctctatgaatgtagtcagtatgggagagattttaactcaactacaaacgttaaaaataatcaaagggttcaccaagagggactctccttgagtaaggcccccatacatttgggtgagaggtctgtagataagggggaacacacaggtaacttatagtaatgaactagtccgtaacttgaaagtatttcgatttcttggctttatatatcttgtggaaaggacgactgtccctatgttgtgaaggaata

SEQ ID NO: 810 - DNA, 1712 bp, Homo sapiens
  source 1..1712: mol_type = genomic DNA
accgccaccatgattttgttgtcttttgtttcagattctaatgtaggaactggtgagaagaaggtgactgaagcctggatttctgaggatgaaaactcacataggacgacgtcagacagactcacggtgatggagctcccctctcccgagtctgaggaagtccacgagcccagattaggggagctcttgggaaatccagaaggtcagagcctggggagttccccctctcaggacaggggctgcaagcaggtgacagtgacccattggaagatccagacaggagagacagctcaagtgtgcaccaagtcaggaagaaaccatattctgaactcagaccttcttctgcttcagagagagctcatagagggggaagccaatccttgcgatatctgtggcaaaaccttcacgtttaattcggacctagttaggcatcggatttcgcatgctggggagaaaccttacacgtgcgatcagtgtgggaaaggctttggccagagctcacaccttatggagcatcagagaattcacactggagagagactctacgtctgtaatgtgtgtgggaaagacttcattcactattcaggtctcattgagcatcagcgcgttcattcaggagaaaagcccttcaaatgtgcgcagtgtgggaaggcgttttgtcacagttcagacctgattaggcaccagagagttcacaccagagagagaccttttgaatgcaaagagtgtgggaaaggcttcagtcagagctccttacttattcgccatcagaggattcacacgggagaaaggccctatgagtgcaatgaatgtgggaaatccttcataaggagctcgagcctcattcgccattatcagatccacacagaagtgaaacagtatgaatgcaaagaatgtgggaaggcattccgtcatcgctcagaccttattgaacaccagagaattcacaccggagagagaccctttgaatgcaatgagtgtgggaaagcctttattcggagttcaaagctcattcagcatcagaggatccatactggggagaggccttacgtatgcaatgagtgtgggaagcgcttcagccagacgtcaaacttcacccagcatcagagaattcacactggagagaaactctatgaatgtaacgagtgtgggaaagctttctttctgagttcataccttattcgacaccagaaaatccacactggagagagagtgtatgaatgtaaggaatgtgggaaagcgtttctccagaaagcccatctcactgagcaccagaagatccactctggggacaggcccttcgaatgtaaagactgtgggaaagccttcatccagagctccaagctgcttctgcaccagattattcacactggagaaaagccctatgtgtgcagttattgtgggaaaggctttattcagaggtcaaacttccttcaacaccagaaaattcatactgaagagaagctctatgaatgtagtcagtatgggagagattttaactcaactacaaacgttaaaaataatcaaagggttcaccaagagggactctccttgagtaaggcccccatacatttgggtgagaggtctgtagataagggggaacacacaggtaacttatagtaatgaactagtccgtaacttgaaagtatttcgatttcttggctttatatatcttgtggaaaggacgagaggaaacacatcgacctggcctt

SEQ ID NO: 811 - DNA, 1601 bp, Homo sapiens
  source 1..1601: mol_type = genomic DNA
accgccaccatgcgagtgctaacattcagggatgtggctgtagaattctccccagaagagtgggaatgcctggactctgctcagcagcgtttgtatagggatgtgatgttagagaactacggaaacctgttctccttgggtcttgctatctttaagccagacttgattacctatctggagcaaagaaaagagccttggaatgcgaggagacagaagacagtagccaaacacccagctggctctttgcattttactgcagagatattgctggagcacgacataaacgattcatttcaaaaagtgatcctgagaaaatctggaagctgtgaccttaatactttacgtttaaagaaagactaccaacgtgtgggtaattgcaaggggcagaaaagcagttataatggcattcatcaatgtttgtcagctacccgtagcaaaacctgtcaatataataaatgtggcaaagcttttgggttgtgctcaatcttcactgaacataagaaaatttttagcagagagaaatgctacaaatgtgaagaatgtggcaaagactgtaggttgtcagattttaccatacagaagagaattcatactgcagatagaagttacaaatgtgaagaatgtggcaaagcctgtaaaaagttctcaaaccttactgaacataatagagttcatactggaaagaaaccctacaaatgtgaagaatgtggcaaaacatttacctgttcctcagcccttactaaacacaagagaaatcatactggagacagaccctacaaatgcgaagaatgtcacaaagcctttaggtgttgctcagaccttactaaacataagagaattcatactggagagaaaccctacaaatgtaaagaatgtcacaaagcctttaggtgttgctcagaccttactaaacataagagaattcatactggagagaaaccctacaaatgtaatgaatgtggaaaagcttttatgtggatctcggcccttagtcaacataacagaattcatactggagagaaaccctacatttgtgaagaatgtggcaaagcctttacctactcctcaacccttattagccacaagagaattcatatggaattgagaccttacaaatgtgaagaatgtggcaaaacctttaagtggttctcagacctgactaatcataagagaattcacactggagagaaaccctacaaatgtgaagaatgtggcaaaagctttacctgctcctcaaaccttattaaacacaagagaattcatatggaagtgagaccttacaaatgtgaagaatgtggcaaaacctttaagtggttcccagacctgactaatcataagagaattcacactggagagaagccctacaaatgtgaagaatgtggcaaaacctttacctgctcctcaagccttattaaacacaagagaagtcatactggagacagacctacaagtgcaaagaatgtggcaaagcctttaggtggttctcagaccttactaaacataaggtagtaatgaactagtccgtaacttgaaagtatttcgatttcttggctttatatatcttgtggaaaggacgaagcatagtgaacaagtatggagtc

SEQ ID NO: 812 - DNA, 3008 bp, Homo sapiens
  source 1..3008: mol_type = genomic DNA
accgccaccatggcagaagatgatccatatttgggaaggcctgaacaaatgtttcatttggatccttctttgactcatacaatatttaatccagaagtatttcaaccacagatggcactgccaacagatggcccataccttcaaatattagagcaacctaaacagagaggatttcgtttccgttatgtatgtgaaggcccatcccatggtggactacctggtgcctctagtgaaaagaacaagaagtcttaccctcaggtcaaaatctgcaactatgtgggaccagcaaaggttattgttcagttggtcacaaatggaaaaaatatccacctgcatgcccacagcctggtgggaaaacactgtgaggatgggatctgcactgtaactgctggacccaaggacatggtggtcggcttcgcaaacctgggtatacttcatgtgacaaagaaaaaagtatttgaaacactggaagcacgaatgacagaggcgtgtataaggggctataatcctggactcttggtgcaccctgaccttgcctatttgcaagcagaaggtggaggggaccggcagctgggagatcgggaaaaagagctaatccgccaagcagctctgcagcagaccaaggagatggacctcagcgtggtgcggctcatgtttacagcttttcttccggatagcactggcagcttcacaaggcgcctggaacccgtggtatcagacgccatctatgacagtaaagcccccaatgcatccaacttgaaaattgtaagaatggacaggacagctggatgtgtgactggaggggaggaaatttatcttctttgtgacaaagttcagaaagatgacatccagattcgattttatgaagaggaagaaaatggtggagtctgggaaggatttggagatttttcccccacagatgttcatagacaatttgccattgtcttcaaaactccaaagtataaagatattaatattacaaaaccagcctctgtgtttgtccagcttcggaggaaatctgacttggaaactagtgaaccaaaacctttcctctactatcctgaaatcaaagataaagaagaagtgcagaggaaacgtcagaagctcatgcccaatttttcggatagtttcggcggtggtagtggtgctggagctggaggcggaggcatgtttggtagtggcggtggaggagggggcactggaagtacaggtccagggtatagcttcccacactatggatttcctacttatggtgggattactttccatcctggaactactaaatctaatgctgggatgaagcatggaaccatggacactgaatctaaaaaggaccctgaaggttgtgacaaaagtgatgacaaaaacactgtaaacctctttgggaaagttattgaaaccacagagcaagatcaggagcccagcgaggccaccgttgggaatggtgaggtcactctaacgtatgcaacaggaacaaaagaagagagtgctggagttcaggataacctctttctagagaaggctatgcagcttgcaaagaggcatgccaatgcccttttcgactacgcggtgacaggagacgtgaagatgctgctggccgtccagcgccatctcactgctgtgcaggatgagaatggggacagtgtcttacacttagcaatcatccaccttcattctcaacttgtgagggatctactagaagtcacatctggtttgatttctgatgacattatcaacatgagaaatgatctgtaccagacgcccttgcacttggcagtgatcactaagcaggaagatgtggtggaggatttgctgagggctggggccgacctgagccttctggaccgcttgggtaactctgttttgcacctagctgccaaagaaggacatgataaagttctcagtatcttactcaagcacaaaaaggcagcactacttcttgaccaccccaacggggacggtctgaatgccattcatctagccatgatgagcaatagcctgccatgtttgctgctgctggtggccgctggggctgacgtcaatgctcaggagcagaagtccgggcgcacagcactgcacctggctgtggagcacgacaacatctcattggcaggctgcctgctcctggagggtgatgcccatgtggacagtactacctacgatggaaccacacccctgcatatagcagctgggagagggtccaccaggctggcagctcttctcaaagcagcaggagcagatcccctggtggagaactttgagcctctctatgacctggatgactcttgggaaaatgcaggagaggatgaaggagttgtgcctggaaccacgcctctagatatggccaccagctggcaggtatttgacatattaaatgggaaaccatatgagccagagtttacatctgatgatttactagcacaaggagacatgaaacagctggctgaagatgtgaagctgcagctgtataagttactagaaattcctgatccagacaaaaactgggctactctggcgcagaaattaggtctggggatacttaataatgccttccggctgagtcctgctccttccaaaacacttatggacaactatgaggtctctgggggtacagtcagagagctggtggaggccctgagacaaatgggctacaccgaagcaattgaagtgatccaggcagcctccagcccagtgaagaccacctctcaggcccactcgctgcctctctcgcctgcctccacaaggcagcaaatagacgagctccgagacagtgacagtgtctgcgacagcggcgtggagacatccttccgcaaactcagctttaccgagtctctgaccagtggtgcctcactgctaactctcaacaaaatgccccatgattatgggcaggaaggacctctagaaggcaaaatttagtaatgaactagtccgtaacttgaaagtatttcgatttcttggctttatatatcttgtggaaaggacgagtgcgctttgcttcaccggaacgt

SEQ ID NO: 813 - DNA, 3011 bp, Homo sapiens
  source 1..3011: mol_type = genomic DNA
accgccaccatggcagaagatgatccatatttgggaaggcctgaacaaatgtttcatttggatccttctttgactcatacaatatttaatccagaagtatttcaaccacagatggcactgccaacagcagatggcccataccttcaaatattagagcaacctaaacagagaggatttcgtttccgttatgtatgtgaaggcccatcccatggtggactacctggtgcctctagtgaaaagaacaagaagtcttaccctcaggtcaaaatctgcaactatgtgggaccagcaaaggttattgttcagttggtcacaaatggaaaaaatatccacctgcatgcccacagcctggtgggaaaacactgtgaggatgggatctgcactgtaactgctggacccaaggacatggtggtcggcttcgcaaacctgggtatacttcatgtgacaaagaaaaaagtatttgaaacactggaagcacgaatgacagaggcgtgtataaggggctataatcctggactcttggtgcaccctgaccttgcctatttgcaagcagaaggtggaggggaccggcagctgggagatcgggaaaaagagctaatccgccaagcagctctgcagcagaccaaggagatggacctcagcgtggtgcggctcatgtttacagcttttcttccggatagcactggcagcttcacaaggcgcctggaacccgtggtatcagacgccatctatgacagtaaagcccccaatgcatccaacttgaaaattgtaagaatggacaggacagctggatgtgtgactggaggggaggaaatttatcttctttgtgacaaagttcagaaagatgacatccagattcgattttatgaagaggaagaaaatggtggagtctgggaaggatttggagatttttcccccacagatgttcatagacaatttgccattgtcttcaaaactccaaagtataaagatattaatattacaaaaccagcctctgtgtttgtccagcttcggaggaaatctgacttggaaactagtgaaccaaaacctttcctctactatcctgaaatcaaagataaagaagaagtgcagaggaaacgtcagaagctcatgcccaatttttcggatagtttcggcggtggtagtggtgctggagctggaggcggaggcatgtttggtagtggcggtggaggagggggcactggaagtacaggtccagggtatagcttcccacactatggatttcctacttatggtgggattactttccatcctggaactactaaatctaatgctgggatgaagcatggaaccatggacactgaatctaaaaaggaccctgaaggttgtgacaaaagtgatgacaaaaacactgtaaacctctttgggaaagttattgaaaccacagagcaagatcaggagcccagcgaggccaccgttgggaatggtgaggtcactctaacgtatgcaacaggaacaaaagaagagagtgctggagttcaggataacctctttctagagaaggctatgcagcttgcaaagaggcatgccaatgcccttttcgactacgcggtgacaggagacgtgaagatgctgctggccgtccagcgccatctcactgctgtgcaggatgagaatggggacagtgtcttacacttagcaatcatccaccttcattctcaacttgtgagggatctactagaagtcacatctggtttgatttctgatgacattatcaacatgagaaatgatctgtaccagacgcccttgcacttggcagtgatcactaagcaggaagatgtggtggaggatttgctgagggctggggccgacctgagccttctggaccgcttgggtaactctgttttgcacctagctgccaaagaaggacatgataaagttctcagtatcttactcaagcacaaaaaggcagcactacttcttgaccaccccaacggggacggtctgaatgccattcatctagccatgatgagcaatagcctgccatgtttgctgctgctggtggccgctggggctgacgtcaatgctcaggagcagaagtccgggcgcacagcactgcacctggctgtggagcacgacaacatctcattggcaggctgcctgctcctggagggtgatgcccatgtggacagtactacctacgatggaaccacacccctgcatatagcagctgggagagggtccaccaggctggcagctcttctcaaagcagcaggagcagatcccctggtggagaactttgagcctctctatgacctggatgactcttgggaaaatgcaggagaggatgaaggagttgtgcctggaaccacgcctctagatatggccaccagctggcaggtatttgacatattaaatgggaaaccatatgagccagagtttacatctgatgatttactagcacaaggagacatgaaacagctggctgaagatgtgaagctgcagctgtataagttactagaaattcctgatccagacaaaaactgggctactctggcgcagaaattaggtctggggatacttaataatgccttccggctgagtcctgctccttccaaaacacttatggacaactatgaggtctctgggggtacagtcagagagctggtggaggccctgagacaaatgggctacaccgaagcaattgaagtgatccaggcagcctccagcccagtgaagaccacctctcaggcccactcgctgcctctctcgcctgcctccacaaggcagcaaatagacgagctccgagacagtgacagtgtctgcgacagcggcgtggagacatccttccgcaaactcagctttaccgagtctctgaccagtggtgcctcactgctaactctcaacaaaatgccccatgattatgggcaggaaggacctctagaaggcaaaatttagtaatgaactagtccgtaacttgaaagtatttcgatttcttggctttatatatcttgtggaaaggacgaactcgcagtactgggtgtaaccta

SEQ ID NO: 814 - DNA, 2801 bp, Homo sapiens
  source 1..2801: mol_type = genomic DNA
accgccaccatggagagttgctacaacccaggtctggatggtattattgaatatgatgatttcaaattgaactcctccattgtggaacccaaggagccagccccagaaacagctgatggcccctacctggtgatcgtggaacagcctaagcagagaggcttccgatttcgatatggctgtgaaggcccctcccatggaggactgcccggtgcctccagtgagaagggccgaaagacctatcccactgtcaagatctgtaactacgagggaccagccaagatcgaggtggacctggtaacacacagtgacccacctcgtgctcatgcccacagtctggtgggcaagcaatgctcggagctggggatctgcgccgtttctgtggggcccaaggacatgactgcccaatttaacaacctgggtgtcctgcatgtgactaagaagaacatgatggggactatgatacaaaaacttcagaggcagcggctccgctctaggccccagggccttacggaggccgagcagcgggagctggagcaagaggccaaagaactgaagaaggtgatggatctgagtatagtgcggctgcgcttctctgccttccttagagccagtgatggctccttctccctgcccctgaagccagtcatctcccagcccatccatgacagcaaatctccgggggcatcaaacctgaagatttctcgaatggacaagacagcaggctctgtgcggggtggagatgaagtttatctgctttgtgacaaggtgcagaaagatgacattgaggttcggttctatgaggatgatgagaatggatggcaggcctttggggacttctctcccacagatgtgcataaacagtatgccattgtgttccggacacccccctatcacaagatgaagattgagcggcctgtaacagtgtttctgcaactgaaacgcaagcgaggaggggacgtgtctgattccaaacagttcacctattaccctctggtggaagacaaggaagaggtgcagcggaagcggaggaaggccttgcccaccttctcccagcccttcgggggtggctcccacatgggtggaggctctgggggtgcagccgggggctacggaggagctggaggaggtggcagcctcggtttcttcccctcctccctggcctacagcccctaccagtccggcgcgggccccatgggctgctacccgggaggcgggggcggggcgcagatggccgccacggtgcccagcagggactccggggaggaagccgcggagccaagcgccccctccaggaccccccagtgcgagccgcaggccccggagatgctgcagcgagctcgagagtacaacgcgcgcctgttcggcctggcgcagcgcagcgcccgagccctactcgactacggcgtcaccgcggacgcgcgcgcgctgctggcgggacagcgccacctgctgacggcgcaggacgagaacggagacacaccactgcacctagccatcatccacgggcagaccagtgtcattgagcagatagtctatgtcatccaccacgcccaggacctcggcgttgtcaacctcaccaaccacctgcaccagacgcccctgcacctggcggtgatcacggggcagacgagtgtggtgagctttctgctgcgggtaggtgcagacccagctctgctggatcggcatggagactcagccatgcatctggcgctgcgggcaggcgctggtgctcctgagctgctgcgtgcactgcttcagagtggagctcctgctgtgccccagctgttgcatatgcctgactttgagggactgtatccagtacacctggcagtccgagcccgaagccctgagtgcctggatctgctggtggacagtggggctgaagtggaggccacagagcggcaggggggacgaacagccttgcatctagccacagagatggaggagctggggttggtcacccatctggtcaccaagctccgggccaacgtgaacgctcgcacctttgcgggaaacacacccctgcacctggcagctggactggggtacccgaccctcacccgcctccttctgaaggctggtgctgacatccatgctgaaaacgaggagcccctgtgcccactgccttcaccccctacctctgatagcgactcggactctgaagggcctgagaaggacacccgaagcagcttccggggccacacgcctcttgacctcacttgcagcaccaaggtgaagaccttgctgctaaatgctgctcagaacaccatggagccacccctgaccccgcccagcccagcagggccgggactgtcacttggtgatacagctctgcagaacctggagcagctgctagacgggccagaagcccagggcagctgggcagagctggcagagcgtctggggctgcgcagcctggtagacacgtaccgacagacaacctcacccagtggcagcctcctgcgcagctacgagctggctggcggggacctggcaggtctactggaggccctgtctgacatgggcctagaggagggagtgaggctgctgaggggtccagaaacccgagacaagctgcccagcacagaggtgaaggaagacagtgcgtacgggagccagtcagtggagcaggaggcagagaagctgggcccaccccctgagccaccaggagggctctgccacgggcacccccagcctcaggtgcactagtaatgaactagtccgtaacttgaaagtatttcgatttcttggctttatatatcttgtggaaaggacgactatggaaccagggcgccgacgtg

SEQ ID NO: 815 - DNA, 2804 bp, Homo sapiens
  source 1..2804: mol_type = genomic DNA
accgccaccatggagagttgctacaacccaggtctggatggtattattgaatatgatgatttcaaattgaactcctccattgtggaacccaaggagccagccccagaaacagctgatggcccctacctggtgatcgtggaacagcctaagcagagaggcttccgatttcgatatggctgtgaaggcccctcccatggaggactgcccggtgcctccagtgagaagggccgaaagacctatcccactgtcaagatctgtaactacgagggaccagccaagatcgaggtggacctggtaacacacagtgacccacctcgtgctcatgcccacagtctggtgggcaagcaatgctcggagctggggatctgcgccgtttctgtggggcccaaggacatgactgcccaatttaacaacctgggtgtcctgcatgtgactaagaagaacatgatggggactatgatacaaaaacttcagaggcagcggctccgctctaggccccagggccttacggaggccgagcagcgggagctggagcaagaggccaaagaactgaagaaggtgatggatctgagtatagtgcggctgcgcttctctgccttccttagagccagtgatggctccttctccctgcccctgaagccagtcatctcccagcccatccatgacagcaaatctccgggggcatcaaacctgaagatttctcgaatggacaagacagcaggctctgtgcggggtggagatgaagtttatctgctttgtgacaaggtgcagaaagatgacattgaggttcggttctatgaggatgatgagaatggatggcaggcctttggggacttctctcccacagatgtgcataaacagtatgccattgtgttccggacacccccctatcacaagatgaagattgagcggcctgtaacagtgtttctgcaactgaaacgcaagcgaggaggggacgtgtctgattccaaacagttcacctattaccctctggtggaagacaaggaagaggtgcagcggaagcggaggaaggccttgcccaccttctcccagcccttcgggggtggctcccacatgggtggaggctctgggggtgcagccgggggctacggaggagctggaggaggtggcagcctcggtttcttcccctcctccctggcctacagcccctaccagtccggcgcgggccccatgggctgctacccgggaggcgggggcggggcgcagatggccgccacggtgcccagcagggactccggggaggaagccgcggagccaagcgccccctccaggaccccccagtgcgagccgcaggccccggagatgctgcagcgagctcgagagtacaacgcgcgcctgttcggcctggcgcagcgcagcgcccgagccctactcgactacggcgtcaccgcggacgcgcgcgcgctgctggcgggacagcgccacctgctgacggcgcaggacgagaacggagacacaccactgcacctagccatcatccacgggcagaccagtgtcattgagcagatagtctatgtcatccaccacgcccaggacctcggcgttgtcaacctcaccaaccacctgcaccagacgcccctgcacctggcggtgatcacggggcagacgagtgtggtgagctttctgctgcgggtaggtgcagacccagctctgctggatcggcatggagactcagccatgcatctggcgctgcgggcaggcgctggtgctcctgagctgctgcgtgcactgcttcagagtggagctcctgctgtgccccagctgttgcatatgcctgactttgagggactgtatccagtacacctggcagtccgagcccgaagccctgagtgcctggatctgctggtggacagtggggctgaagtggaggccacagagcggcaggggggacgaacagccttgcatctagccacagagatggaggagctggggttggtcacccatctggtcaccaagctccgggccaacgtgaacgctcgcacctttgcgggaaacacacccctgcacctggcagctggactggggtacccgaccctcacccgcctccttctgaaggctggtgctgacatccatgctgaaaacgaggagcccctgtgcccactgccttcaccccctacctctgatagcgactcggactctgaagggcctgagaaggacacccgaagcagcttccggggccacacgcctcttgacctcacttgcagcaccaaggtgaagaccttgctgctaaatgctgctcagaacaccatggagccacccctgaccccgcccagcccagcagggccgggactgtcacttggtgatacagctctgcagaacctggagcagctgctagacgggccagaagcccagggcagctgggcagagctggcagagcgtctggggctgcgcagcctggtagacacgtaccgacagacaacctcacccagtggcagcctcctgcgcagctacgagctggctggcggggacctggcaggtctactggaggccctgtctgacatgggcctagaggagggagtgaggctgctgaggggtccagaaacccgagacaagctgcccagcacagcagaggtgaaggaagacagtgcgtacgggagccagtcagtggagcaggaggcagagaagctgggcccaccccctgagccaccaggagggctctgccacgggcacccccagcctcaggtgcactagtaatgaactagtccgtaacttgaaagtatttcgatttcttggctttatatatcttgtggaaaggacgaggacgatgcagtagtttacaattg

SEQ ID NO: 816 - DNA, 8996 bp, Homo sapiens
  source 1..8996: mol_type = genomic DNA
accgccaccatggaccctagaaatactgctatgttaggattgggttctgattccgaaggtttttcaagaaagagtccttctgccatcagtactggcacattggtcagtaagagagaagtagagctagaaaaaaacacaaaggaggaagaggaccttcgcaaacggaatcgagaaagaaacatcgaagctgggaaagatgatggtttgactgatgcacagcaacagttttcagtgaaagaaacaaacttttcagagggaaatttaaaattgaaaattggcctccaggctaagagaactaaaaaacctccaaagaacttggagaactatgtatgtcgacctgccataaaaacaactattaagcacccaaggaaagcacttaaaagtggaaagatgacggatgaaaagaatgaacactgtccttcaaaacgagacccttcaaagttgtacaagaaagcagatgatgttgcagccattgaatgccagtctgaagaagtcatccgtcttcattcacagggagaaaacaatcctttgtctaagaagctgtctccagtacactcagaaatggcagattatattaatgcaacgccatctactcttcttggtagccgggatcctgatttaaaggacagagcattacttaatggaggaactagtgtaacagaaaagttggcacagctgattgctacctgtcctccttccaagtcttccaagacaaaaccgaagaagttaggaactggcactacagcaggattggttagcaaggatttgatcaggaaagcaggtgttggctctgtagctggaataatacataaggacttaataaaaaagccaaccatcagcacagcagttggattggtaactaaagatcctgggaaaaagccagtgtttaatgcagcagtaggattggtcaataaggactctgtgaaaaaactgggaactggcactacagcggtattcattaataaaaacttaggcaaaaagccaggaactatcactacagtaggactgctaagcaaagattcaggaaagaagctaggaattggtattgttccaggtttagtgcataaagagtctggcaagaagttaggacttggcactgtggttggactggttaataaagatttgggaaagaaattgggttctactgttggcctagtggccaaggactgtgcaaagaagattgtagcaagttcagcaatgggattggttaataaggacattggaaagaaactaatgagttgtcctttggcaggtctgatcagtaaagatgccataaaccttaaagccgaagcactgctccccactcaggaaccgcttaaggcttcttgtagtacaaacatcaataatcaggaaagtcaggaactttctgaatccctgaaagatagtgccaccagcaaaacttttgaaaagaatgttgtacggcagaataaagaaagcatattggaaaagttctcagtacgaaaagaaatcattaatttggagaaagaaatgtttaatgaaggaacatgcattcagcaagacagtttctcatccagtgaaaagggatcttatgaaacctcaaagcatgaaaagcagcctcctgtatattgcacttctccggactttaaaatgggaggtgcttctgatgtatctaccgctaaatccccattcagtgcagtaggagaaagcaatctcccttccccatcacctactgtatctgttaatcctttaaccagaagtccccctgaaacttcttcacagttggctcctaatccattacttttaagttctactacagaactaatcgaagaaatttctgaatctgttggaaagaaccagtttacttctgaaagtacccacttgaacgttggtcataggtcagttggtcatagtataagtattgaatgtaaagggattgataaagaggtaaatgattcaaaaactacccatatagatattccaagaataagctcttcccttggaaaaaagccaagtttgacttctgaatccagcattcatactattactccttcagttgttaacttcactagtttatttagtaataagccttttttaaaactgggtgcagtatctgcatcagacaaacactgccaagttgctgaaagcctaagtactagtttgcagtccaaaccattaaaaaaaagaaaaggaagaaaacctcggtggactaaagtggtggcaagaagcacatgccggtctccaaaagggctagaattagaaagatcagagctttttaaaaacgtttcatgtagctcactatcaaatagtaattctgagccagccaagtttatgaaaaacattggacccccttcatttgtagatcatgacttccttaaacgccgattgccaaagttgagcaaatccacagctccatctcttgctctcttagctgatagtgaaaaaccatctcataagtcttttgctactcacaaactatcctccagtatgtgtgtctctagtgaccttttgtctgatatttataagcccaaaagaggaaggcctaaatctaaggagatgcctcaactggaagggccacctaaaaggactttaaaaatccctgcttctaaagtgttttctttacagtctaaggaagaacaagaacccccaattttacagccagaaattgaaatcccttccttcaaacaaggtctgtctgtgtctccttttccaaaaaagagaggcaggcctaagaggcaaatgaggtcaccagtcaagatgaagccacctgtactgtcagtggctccatttgttgccactgaaagtccaagcaagctagaatctgaaagtgacaaccatagaagtagcagtgatttctttgagagcgaggatcaacttcaggatccagatgacctagatgacagtcataggccaagtgtctgtagtatgagtgaccttgagatggaaccagataaaaaaattaccaagagaaacaatggacaattaatgaaaacaattatccgcaaaataaataaaatgaagactttaaagagaaagaaactgttgaatcagattctttcaagttctgtagaatcaagtaataaagggaaagtgcaatccaaactccataatacggtatcaagtcttgctgccacatttggctctaaattgggccaacagataaatgtcagcaagaaaggaaccatttatataggaaagagaagaggtcgcaaaccaaaaactgtcttaaatggtattctttctggtagtcctactagccttgctgttcttgagcaaacagctcaacaggcagctgggtcagcattaggacagattcttcccccattactgccttcatctgctagtagttctgagattcttccatcacctatttgctctcagtcttctgggactagtggaggtcagagccctgtaagtagtgatgcaggttttgttgaacccagttcagtgccatatttgcatttacactccagacagggcagtatgattcagactcttgcaatgaagaaggcctcaaaggggaggaggcggttatctcctcctactttgttgccaaattctccttcgcacttgagtgaactcacatctctaaaagaagctactccttccccaatcagtgagtctcatagtgatgagaccattcccagtgatagtggaattggaacagataataacagcacatcagacagggcagagaaattttgtgggcaaaaaaagaggaggcattcttttgagcatgtttctctgattccccctgaaacctctacagtgctaagcagtcttaaagaaaaacataaacacaaatgtaagcgcaggaatcatgattacctcagctatgacaagatgaaaaggcagaaacgaaaacggaaaaagaaatatccccagcttcgaaatagacaggatccagactttattgcagagctggaggaactaataagtcgcctaagtgaaattcggatcactcatcgaagtcatcattttatcccccgagatcttctgccaactatctttcgaatcaactttaatagtttctatacacatccttctttccccttagaccctttgcactacattcgaaaacctgacttaaaaaagaaaagagggagaccccctaagatgagggaggcaatggctgaaatgccttttatgcacagccttagttttcctctttctagtactggattctatccatcttatggtatgccttactctccttcaccccttacagctgctcccataggattaggttactatggaaggtatcctcccactctttatccacctcctccatctccttctttcaccacgccacttccacctccttcctatatgcatgctggtcatttacttctcaatcctgccaaataccataagaaaaagcataagctacttcgacaggaggcctttcttacaaccagcaggactcccctcctttccatgagtacctaccccagtgttcctcctgagatggcctatggttggatggttgagcacaaacacaggcaccgtcacaaacacagagaacaccgttcttctgaacaaccccaggtttctatggacactggctcttcccgatctgtcctggaatctttgaagcgctatagatttggaaaggatgctgttggagagcgatataagcataaggaaaagcaccgttgtcacatgtcctgccctcatctctctccttcaaaaagcttaataaacagagaggaacagtgggtccaccgagagccttcagaatctagtccattggccttgggattgcagacacctttacagattgactgttcagaaagttctccaagcttatcccttggaggattcactcccaactctgagccagccagcagtgatgaacatacaaaccttttcacaagtgcaataggcagctgcagagtttcaaaccctaactccagtggccggaagaaattaactgacagccctggactcttttctgcacaggacacttcactaaatcggcttcacagaaaggagtcactgccttctaacgaaagggcagtacagactttggcaggctcccagccaacctctgataaaccctcccagcggccatcagagagcacaaattgtagccctacccggaaaaggtcttcatctgagagtacttcttcaacagtaaacggagttccctctcgaagtccaagattagttgcttctggggatgactctgtggatagtctgctgcagcggatggtacaaaatgaggaccaagagcccatggagaaaagtattgatgctgtgattgcaactgcctctgcaccaccttcttccagtccaggccgtagccacagcaaggaccgaaccctgggaaaaccagacagccttttagtgcctgcagtcacaagtgactcttgcaataatagcatctcactcctatctgaaaagttgacaagcagctgttccccccatcatatcaagagaagtgtagtggaagctatgcaacgccaagctcggaaaatgtgcaattacgacaaaatcttggccacaaagaaaaacctagaccatgtcaataaaatcttaaaagccaaaaaacttcaaaggcaggccaggacagggaataactttgtgaaacgtaggccaggtcgacctcggaaatgtccccttcaggctgtcgtatcaatgcaagcattccaggctgctcagtttgtcaacccagaattgaacagagacgaggaaggagcagcactgcacctcagtcctgacacagttacagatgtaattgaggctgttgttcagagtgtaaatctgaacccagaacataaaaaggggttgaagagaaaaggttggctattggaagaacagaccagaaaaaagcagaagccattaccagaggaagaagagcaagagaataataaaagctttaatgaagcaccagttgagattcccagtccttctgaaaccccagctaaaccttctgaacctgaaagtaccttgcagcctgtgctttctctcatcccaagggaaaagaagcccccacgtcccccaaagaagaagtatcagaaagcagggctgtattctgacgtttacaaaactacagacccaaagagtcgattgatccaattaaagaaagagaagctggagtatactccaggagagcatgaatatggattatttccagcgcccattcatgttggaaagtatctaagacaaaagagaattgacttccagcttccttatgatatcctttggcagtggaaacacaatcagctatacaaaaagccagatgtcccactatataagaaaattcgttcaaatgtctacgttgatgtcaaacccctttctggttacgaagctaccacctgtaactgtaagaagccagatgatgacaccaggaagggctgtgttgatgactgcctcaatagaatgatctttgctgagtgttcccccaacacttgcccatgtggcgagcaatgctgtaaccagaggatacagaggcatgaatgggtgcaatgtctagaacgatttcgagctgaggaaaaaggttggggaatcagaaccaaagagcccctaaaagctgggcagttcatcattgaatacctaggggaggtcgtcagtgaacaggagttcaggaacaggatgattgagcagtatcataatcacagtgaccactactgcctgaacctggatagtgggatggtgattgacagttaccgcatgggaaatgaggcccgattcatcaaccatagctgtgacccaaattgtgaaatgcagaaatggtctgttaatggagtataccggattggactctatgctcttaaagacatgccagctgggactgaactcacttatgattataactttcattccttcaatgtggaaaaacagcaactttgtaagtgtggctttgagaaatgtcgaggaatcatcggaggcaagagtcagcgtgtgaatggactcaccagcagcaaaaacagccagcccatggccacacacaaaaaatctggacggtcaaaagagaagagaaagtctaagcacaagctgaagaaaaggagaggccatctctctgaggaacccagtgaaaatatcaacaccccaactagattgaccccccaattacagatgaagccaatgtccaatcgtgaaaggaactttgtgttaaagcatcatgtattcttggtccgaaactgggagaagattcgtcaaaaacaggaggaagtaaagcacaccagtgataatattcactcagcatcattatatacccgttggaatgggatctgccgagatgatgggaatatcaagtctgatgtcttcatgacccagttctctgccctgcagacagctcgatctgttcgaacaagacggttggcagctgcagaggaaaatattgaagtggctcgggcagcccgcctagcccagatcttcaaagaaatttgtgatggtatcatctcttataaagattcttcccggcaagcactggcagctccacttttgaaccttcccccaaagaaaaagaatgctgattattatgagaagatctctgatcccctagatcttatcaccatagagaagcagatcctcactggttactataagacagtggaagcttttgatgctgacatgctcaaagtctttcggaatgctgagaagtactatgggcgtaaatccccagttgggagagatgtttgtcgtctacgaaaggcctattacaatgcccggcatgaggcatcagcccagattgatgagattgtgggagagacagcaagtgaggcagacagcagtgagacctcagtctctgaaaaggagaatgggcatgagaaggacgacgatgttattcgctgtatctgtggcctctacaaggatgaaggtctcatgatccagtgtgacaagtgcatggtatggcagcactgtgattgtatgggagtgaactcagatgtggagcactacctttgtgagcagtgtgacccaaggcctgtggacagggaggttcccatgatccctcggccccactatgcccaacctggctgtgtctacttcatctgtttgctccgagatgacttgctgcttcgtcagggtgactgtgtgtatctgatgagggatagtcggcgcacccctgatggccacccggtccgtcagtcctatcgactgttatctcacattaaccgagataaacttgacatctttcgcattgagaagctttggaagaatgaaaaagaggaacggtttgcctttggtcaccattatttccgtccccacgaaacacaccactctccatcccgtcggttctatcataatgaactatttcgggtgccactctatgagatcattcccttggaggctgtagtggggacctgctgtgtgttggacctttatacgtattgtaaagggagacccaaaggagtaaaggagcaagatgtgtacatctgtgattatcggcttgacaagtcagcacacctgttttacaagatccaccggaaccgctatcctgtctgcaccaaaccctatgcttttgatcacttccccaagaagctcactcccaaaaaagatttctcgcctcattacgtcccagacaactacaagaggaatggaggacgatcatcctggaagtctgagcgctcaaagccacccctaaaagacttgggccaggaggatgatgctctacccttgattgaagaggttctagccagtcaagagcaagcagccaatgagatacccagcctggaggagccagaacgggaaggggccactgctaacgtcagtgagggtgaaaaaaaaacagaggaaagtagtcaagaaccccagtcaacctgtacccctgaggaacgacggcataaccaacgggaacgactcaaccagatcttgctcaatctccttgaaaaaatccctggaaaaaatgccattgatgtgacctacttgctggaggaaggatcaggcaggaaactgcgaaggcgtactttgtttatcccagaaaacagctttcgaaagtagtaatgaactagtccgtaacttgaaagtatttcgatttcttggctttatatatcttgtggaaaggacgagccatggacacctagcaacaagct

SEQ ID NO: 817 - DNA, 1586 bp, Homo sapiens
  source 1..1586: mol_type = genomic DNA
accgccaccatgtcgaccacacttctgtccgccttctacgatgtcgacttcttgtgcaagacagagaaatccctggccaacctcaacctgaacaacatgctggacaagaaggcggtggggacgcctgtggccgccgcccccagctcgggcttcgcgccgggattcctccgacggcactcggccagcaacctgcatgcactcgcccaccccgcgcccagccccggcagctgctcgcccaagttcccgggcgccgctaacggcagcagctgcggcagcgcggcggccggcggtccgacctcctacggcacccttaaggagccgtcggggggcggcggcacagccctgctcaacaaggagaacaaattccgggaccgctcgtttagcgagaacggcgatcgcagccagcacctcctgcacctgcagcagcagcagaaggggggcggcggctcccagatcaactccacgcgctacaagaccgagctgtgccggcccttcgaggagagcggcacgtgcaagtacggcgaaaagtgccagttcgcgcatggcttccacgagctgcgcagcctgactcgccatccgaagtacaagaccgagctgtgccgcacctttcataccatcggcttctgcccctatgggccgcgctgccacttcatccacaacgcggacgagcggcggcccgcgccgtcggggggcgcctccggggacctgcgtgcctttggcacgcgcgatgcgttgcacctgggcttcccgcgggagccgcggcccaagttgcaccacagcctcagcttctcgggcttcccgtcgggccaccatcagcccccgggcggcctcgagtcgccgctgctgctcgacagccccacgtcgcgcacgccgccgccgccctcctgctcttcggcctcgtcctgctcctcctccgcctcctcctgttcctcggcctccgcggcctccacgccctcgggcgccccgacatgctgcgcctccgcggcggccgcggctgcggccgctctgctgtacggcaccgggggcgccgaggacctgctggcgccgggggccccgtgcgcggcctgctcgtcggcctcgtgcgccaacaacgccttcgccttcggtccggagctcagcagcctcatcacgccgctcgccatccagacccacaactttgccgccgtggccgccgccgcctactaccgcagtcagcagcagcagcagcagcagggcctggcgccccccgcgcagccgccggcgccgcccagcgcgaccctccccgccggggccgccgcacctccctcgccgcccttcagcttccagctgccgcgccgcctgtccgactcgcccgtgttcgacgcgccccccagccccccggactcgctgtcggaccgcgacagctacctaagcggctccctgagctccggcagcctcagcggctctgagtctcccagcctcgaccctggccgccgcctgccaatcttcagccgcctctccatctccgacgactagtaatgaactagtccgtaacttgaaagtatttcgatttcttggctttatatatcttgtggaaaggacgacggcaaacttaactgtacctggtg

SEQ ID NO: 818 - DNA, 2861 bp, Homo sapiens
  source 1..2861: mol_type = genomic DNA
accgccaccatggccgccgacgtcttcatgtgctccccgcgccggcctcgcagccggggccgccaggtgctgctcaagccccaggtgtccgaggacgacgacgactcggacacggatgagccgtccccgccgcccgcctccggcgcggccaccccggcccgggcccacgcgagcgccgcgccaccgccgcctcgggccgggccgggccgcgaggaacctccgcgccgccagcagatcatccacagcggccacttcatggtgtcgtcgccgcaccgagagcacccgcccaagaagggctacgatttcgacacggtcaacaaacagacgtgccagacctacagcttcggcaagactagctcctgccacctgtccatcgacgcctcgctcaccaagctcttcgagtgcatgactttggcctacagtgggaagttggtgtctccaaagtggaagaatttcaagggcctgaagctacagtggagagacaagatccggctcaataatgccatctggcgggcctggtacatgcagtatctggagaagcgcaagaatcctgtgtgccactttgtgacacccctggacggctctgtggacgtagacgagcaccgccggccggaggccatcaccacggaagggaagtactggaagagccgcatcgagattgtgatccgggagtatcacaagtggagaacctacttcaagaaaaggctacagcagcacaaggatgaggacctctccagcctggtccaggacgatgacatgctgtattggcacaagcacggggatggatggaagacccccgtccccatggaggaggatcccctgctggacacagacatgctcatgtcggaattcagcgacaccctcttctccacactttcttcacaccagccggtggcctggcccaatccccgggaaatagcacatctgggaaatgcagacatgatccagccgggactgattcctttgcagcctaacctggacttcatggacacctttgagcctttccaggacctcttctcttctagccgctccatttttggctccatgctacctgcatctgcctcagcacctgtaccagatcccaacaacccacctgcacaggagagcatcctgccgaccacagccctccccactgtgagccttcctgacagcctcatcgcgccccctaccgccccatccctggctcacatggatgagcagggctgtgaacacacctcccggactgaggacccgtttatccagcccacggacttcggtccctcagagccgccactgagtgtcccgcagcccttcctccctgtcttcaccatgcccctgctgtctcccagccccgccccaccgcccatctcccccgtgttaccattagttcctcctcctgccactgccctgaaccccccggctccacccaccttccatcagccacagaagtttgctggagtcaacaaagcgccgtctgtcatcacccacacggcctctgccaccctcacccacgatgcccccgccaccacctttagccagagtcagggccttgtgatcaccacccatcaccctgccccgtcagcggccccttgtgggctggcactgtctcctgtcacccggcctccccagccacggttaacttttgtgcaccccaaacctgtatccttgactgggggcaggcctaagcagccccacaaaatagtgcctgctcccaaaccagagcccgtgtccttggtgttgaagaatgcccgtatcgccccagctgccttttcaggccaaccacaagcggtgatcatgacgtcagggcctctgaagagagaagggatgttggcctccaccgtgtcccagtccaacgtggtcattgcgcctgctgccatcgccagggctcctggggtcccggagttccacagcagcatcctggtgacagatctcggccatggcacgagcagcccgcctgcccccgtctcccggctcttcccaagcacagcgcaagaccccctggggaagggcgagcaggtcccgctgcatgggggcagcccccaggtcactgtcacagggcccagtcgggactgcccaaactcagggcaggcctctccgtgtgcatcggagcagagccccagtcctcaatctccccagaacaactgctcagggaaatccgaccccaaaaatgtggctgcactaaagaaccggcagatgaagcacatctcagctgagcagaaaaggcgcttcaacatcaagatgtgcttcgacatgctcaacagcctcatctccaacaattccaagctgaccagtcacgccatcacactgcagaagactgtggagtacatcaccaagctgcagcaggagagaggccagatgcaggaggaggcccggcggctgcgggaggagatcgaggagctcaatgccaccatcatctcctgccagcagctgctccctgccacgggagtccccgttacccggcgccagtttgatcacatgaaagacatgtttgacgaatacgtgaaaacccggaccttgcagaattggaagttctggattttcagcatcatcatcaagccgctgtttgagtcgttcaagggcatggtgtccaccagcagcctggaggagctgcaccggacggcgctctcctggctggaccagcactgctccctgcccatcctcaggccgatggtattgagcacgctgcggcagctgagcacctccacctccatcctcacagacccggcacagctgccagagcaggcgtccaaggctgtcaccaggattggcaagagattgggagagtcctagtaatgaactagtccgtaacttgaaagtatttcgatttcttggctttatatatcttgtggaaaggacgacgttaccacttacggtttcgtcag

SEQ ID NO: 819 - DNA, 3326 bp, Homo sapiens
  source 1..3326: mol_type = genomic DNA
accgccaccatgaaggatattggacagcagctatacactacacacttgaacggcggacataattccttgaccatgtcacccaaacagcctgatgctaatggagcacctcggccaaatagacaagaagcacaaacccttttgtatcaaggctcagaggcagaggctgccatgatgaccattgctacatgtgcaaagtgcaaaagtgttcacaagatctctcttcaagatttgcagaagggtacagggaaggacggtatgtatgtctgcttccagtgcagcctcggtgcagctcctcccaattttcattttgtgagcaataattccagtgcgactcatgttggaaataaaactgaaaacttctcaagttctgtcaatagcaaatttaaggtaaggaactttaagccaggcaaatactattgtgataaatgtcgattctctacaaaggacccgctgcagtacaaaaagcacacccttcaacacgaggagattaaattcatttgttctcactgcagctacatttcgtatacgaaaggagagtttcagaggcatttggtgaaacacacaggcatatttccttatcagtgtgagtattgtgactatggtgctattagaaatgattatattgtcaaacacacgaagagagtacatgaaagggcaggtgcgaaacggccagtcaaagctgttgccaagctggagccaaaaagaaccggaacttcaaaacaaaacccagagcttctaaaagcttccaatccacggactacatttcaaaataagtggtcagaccaactgtcaggtttctctctccatgcaaataaagacaaaatgcacaatatcatgttgttacctgaaccaaaggaataccaaaaagatgtagtttgtattccaaataaaatgaccctgtctgagccaaatgaagtcaacctatttgagaacaaaaatgttgaagtagaagtgttatcccctgcaaaagaacctgttcagccaggtatgccattgacagttgttgcaccagcagaactagttgtccctgcaaactgtttagcccagttgatagatgtgaaggttgtcaatggtacacagcagcttgttctgaaactgtttccgctggaagaaaataattgccttgaagctgggagggataatggaggtaattctgaacgtatggtgaaagagaagggttcaaatgaacaagaaaaagtactttctgcagaaaaaacaaagtcactgacagttgacgggaatgttggaaaactcgtaggcattgatagttttcaaccttcagttcagaaacagcttaaaaatgtgaaatgggtaaggtcttatgattttattatgccaaattctagtgtgcacaacaatggaaaatccttcattaattcggaaacaattgaggattttcagaaaaaaaataatttgtatccacatagaactgcttttccttccgttgccttaaaaggtcattctctagcatctgtatttaaaaacagtgttttacgtagtcttggagctgcatcaaacccttttccatataaagctgctgtttgttttgctgaaagtggaagaaatttacacagtagctcacagcagttactcccatttgctgcatcacctgcaacctgttccttctctggagaaaagggcttattgcctgtaagtgaaaatgacttggaatctacaagtaaagtcaatattcctgtaaaagtggtttcctctaataggaagcaggaagataaccagacagaggaacacaaggcagtttcaactgtaggccagatttcctctcaacataagagtgagtatttacatataaacataactggagaagatagatctcaacagcctggggataagcctttggaattaaagaattctgaaaggactaacaacactaatgatggcccagtcatctcatcagtattttctctgagctctggatctgaaaatgtccccgagggcattaagtggaatagctcaacgtctaaaataaagtcaattgaactgttgcgcagaaagatagctcagttaattgagtcctgtgggaagccgtcatctttggcttcaaatagtgcacatcgtcgctctgtagggcaggcatcaaagggaacttcaaaagctacctctgaaggtattcaagaaatcaacgtgtcactcactggtcttggccattccacaggtactcttcagaaacctccgaatgatggtggtattactggtaatagacagcttactcatcaacaaatatatccacactttgcagatggcagtaataggaaaaccaaaagcagagtggccaggaaggctcatgttgccacgccagtgttaatccccaaaggggctgtgttgagggttcttaattcctctgagaatgcccacatcatagaggctacatgtgaagcacctgtcagcataccttgcagtgaaagacagttaataaaaccagttccattttgccctgtgagacaggcggactcagacttacagcctttaagaagtgaaagggggccaatagatatgtccccaaatatcgagacacctctgcggcctaaactgagaaaagagagtgctgtctgtagcaccatccatagaaaaactggcctcttgtatggacagcaaggaagcagtgaattaaataagcaagggagactgctttccagaagtctttctataagtagaaataaaaccaaacaagtacacttatccaggaagaaaaacaaaattcaagctgaacctagccgctgtctcaaggatccttcaatttttcaggttgcaaggcaactaagactgatagcagctaagccagatcagttgattaagtgtccccgtcggaaccagccagtcattgtgttaaaccaccctgatgtggactcgccagaagtgaccaatgtgatgaaggtaataaataaatacaaaggcaatgtcctcaaagttgttttatcagagaggactaggtgtcagctaggcatcagacggcatcatgtacgcctgacctaccagaatgcggaagaagccagtcaaattaaaaggcaaatgatgttgaaaatgaaactcaaaaaagttcataaaaacaactaccaggtagtggattccttgcctgatgattcttcacagtgtgtatttaagtgctggttttgtgggcgactgtatgaagaccaggaagagtggatgagtcatggccaacggcatttgatagaagcaactagagattgggatgttctttcctccaagggcaaatagtaatgaactagtccgtaacttgaaagtatttcgatttcttggctttatatatcttgtggaaaggacgactcgccacaatacacgcagtagat

SEQ ID NO: 820 - DNA, 4553 bp, Homo sapiens
  source 1..4553: mol_type = genomic DNA
accgccaccatgccatctgaacagaaacagttattttgtgatgaaaaacaaactactttaaaaaaagattatgatgtgaaaaatgagatagttgataggtcggcacctaaaccaaaaatttcaggaagtattcattatgcactaaaaaatgtgaaaattgatttgccaaaaataaatattccaaatgaagtcctattgaaacatgaagttgacaaatacagaaaattatttcagagtaaacagcagactgcaagaaaatctatcagtataaagactgtaagctgtgtagaggagtgtacattgcttcataagtctgagagagctgaagaagagggtgtaaaaatgtctgcaaaaatactcaatttcagctgtttaaaatgccgagacaacactcgatatagcccaaatgatttgcagaaacactttcaaatgtggcaccatggcgaattaccttcatatccttgtgaaatgtgcaacttttcagcaaatgactttcaggtatttaaacaacacagacgaacccatagaagcactttagtaaaatgtgacatttgtaacaatgagagtgtatatactttactgaacttgacaaagcatttcacatccacacattgtgttaatggtaattttcaatgtgaaaagtgtaagttctccacccaggatgttggcacatttgttcagcacattcatagacataatgaaattcattataagtgtggtaaatgtcatcatgtatgttttaccaaaggagagcttcagaagcaccttcatattcattctggtacttttcccttcacttgtcaatattgtagctatggtgccaccaggagagaacaccttgtaagacatgttataactttgcacaaagaacatttatatgcaaaagaaaaactggaaaaagacaaatatgaaaaaagaatggcaaagacttctgcaggacttaagctaatactgaaaagatataaaataggtgcatcaaggaagacgttctggaaacgtaagaaaattaacagtggaagtgacagaagtatagaaaagaacactcaagtgcttaagaaaatgaacaaaacacagactaaatctgaagaccagagccatgttgttcaagagcatttaagtgaagaaaaggatgaaagactacactgtgagaataatgataaagcccctgaatcagagtcagagaagccaactcctctgtccactgggcaaggtaatagagctgaagagggaccaaacgctagttcaggtttcatgaagactgctgtactaggacctacactgaaaaatgtaatgatgaaaaataataaactagcagtttcccctaactataatgctacgtttatgggcttcaagatgatggatggaaaacagcatattgtattaaaattggtgcctatcaaacaaaatgtatgttcaccaggctcacagtcaggtgctgcaaaggacggtactgctaatttgcagccccagactttggacactaatggatttttaacaggagtaacaactgagttaaatgacacagtttatatgaaagcagctactccattttcatgttcatcttctatactttcagggaaagcaagttcagaaaaagaaatgactttgatatctcaaaggaataatatgcttcaaacaatggattatgagaaaagtgtatcttctttgtcagcaacatcagaattggttacagcatcagtgaatttgaccacaaaatttgaaacaagagataatgttgacttctggggaaatcatctcactcagagtcaccccgaggtattaggtaccaccattaaaagtccagataaagtcaactgtgttgccaaaccaaatgcatacaacagtggagatatgcataattattgcattaattatggcaactgtgagttacctgttgaatcctccaaccaaggatcattaccttttcataattactcaaaagtgaataattctaataaacgtcgtaggttttcaggaacagcagtgtatgaaaaccctcaaagagaatcttcatccagcaaaacagttgtccaacaaccaattagtgaatcatttttatcactagtgaggcaggagagctcaaaaccagatagcctattagcatctattagccttttaaatgataaagatggaactttaaaagcaaaatctgaaattgaagaacagtatgttttagaaaaaggacaaaacattgatggacaaaacctgtacagtaatgaaaatcaaaatttagagtgtgcgactgaaaaatctaaatgggaagacttttctaatgtcgattcacctatgatgcctagaatcacatctgttttctctctccagagccaacaggcatcagaatttctgccacctgaagtaaaccaattgcttcaggatgtattgaaaataaaacctgatgtaaaacaagactctagtaacactccaaataaaggcttgccacttcattgtgaccagtcatttcaaaaacacgagagagaaggcaaaattgttgaatcttcgaaagatttcaaagtgcaaggcatcttcccagttccacctggcagtgtgggtattaatgtgcctacaaatgatttgaatttgaaatttggaaaagaaaaacaagtgtcatcaataccacaagatgtgagagattcagagaagatgcctagaatttcaggttttggcacattacttaagactcagtcagatgcgataataacacagcagcttgtaaaagacaaactacgagccaccacacaaaatttaggttctttttatatgcagagtccacttttaaattcagaacaaaaaaaaactataattgttcagacttcaaaaggattcttaataccattgaacattactaacaagcctgggctaccagttattcctggaaatgcacttccattggttaattcacaaggtatccctgcttctctttttgtaaacaagaaacctgggatggttttaacacttaataatgggaaacttgaaggtgtttccgctgtcaaaaccgagggtgccccagctcgtggaactgtgactaaggagccttgcaaaacacctattttgaaggtagaaccaaacaataattgtcttacacctggactttgttccagcattggcagttgtttgagcatgaaaagtagctcagaaaatactttgccattaaaaggcccttacattttgaaaccaacgagttctgtgaaagctgttcttattcctaacatgctatctgagcaacagagcactaagttgaatatctccgattcagtaaaacagcagaatgagatttttccaaaaccacctctttataccttcttgcctgatggcaaacaagctgtttttttaaagtgtgtgatgccaaataaaactgagctgcttaagcccaaattagtccaaaatagtacttatcaaaatatacagccaaagaaacctgaaggaacaccacaaagaatattgctgaaaatttttaaccctgttttaaatgtgactgctgctaataatctgtcagtaagcaactctgcatcctcattgcaaaaagacaacgtaccatctaatcagattataggaggagagcagaaagagccagaatctagagatgccttacccttcttactagatgacttaatgccagcaaatgaaattgtgataacttctactgcaacatgcccagaatcttctgaggaaccaatatgtgtcagtgactgttcagagtccagggtattaaggtgtaaaacaaattgtagaattgagaggaacttcaatagaaaaaagacttccaaaaaaattttttcaaaaacaaaaactcatggaagtaaagactctgaaactgcctttgtatctagaaacagaaactgtaaacgaaagtgtagggatagttaccaagaacctccaagaagaaaagcaacattgcatagaaagtgtaaagaaaaggcaaaacctgaagatgtccgtgaaacatttggatttagcagacctaggctttcaaaagattccatcagaactttgcggcttttcccttttagttctaaacagcttgtgaaatgtcctaggagaaaccaaccagttgtagttttgaatcatcctgacgcagatgcaccagaagtagtaagtgtaatgaaaactattgctaaatttaatggacatgtacttaaggtttcattgtcaaaaagaactataaatgctttactgaaaccagtttgttataaccctcctaaaacaacttatgatgatttttccaagaggcacaaaacatttaaacctgttagttctgtgaaagaaagatttgtgctaaaattaacactcaaaaagacaagcaaaaacaattaccagattgtgaagactacctctgaaaatattttgaaggctaaatttaactgttggttttgtggtagagtatttgacaatcaggatacttgggctggtcatgggcagagacatttaatggaagctactcgggattggaacatgttagaatagtaatgaactagtccgtaacttgaaagtatttcgatttcttggctttatatatcttgtggaaaggacgagttagtttggcggcgcattctcct

SEQ ID NO: 821 - DNA, 2315 bp, Homo sapiens
  source 1..2315: mol_type = genomic DNA
accgccaccatgcctgaccatgacagcacagccctcttaagccggcaaaccaagaggagaagagttgacattggagtgaaaaggacggtagggacagcatctgcattttttgctaaggcaagagcaacgttttttagtgccatgaatccccaaggttctgagcaggatgttgagtattcagtggtgcagcatgcagatggggaaaagtcaaatgtactccgcaagctgctgaagagggcgaactcgtatgaagatgccatgatgccttttccaggagcaaccataatttcccagctgttgaaaaataacatgaacaaaaatggtggcacggagcccagtttccaagccagcggtctctctagtacaggctccgaagtacatcaggaggatatatgcagcaactcttcaagagacagccccccagagtgtctttccccttttggcaggcctactatgagccagtttgatatggatcgcttatgtgatgagcacctgagagcaaagcgcgcccgggttgagaatataattcggggtatgagccattcccccagtgtggcattaaggggcaatgaaaatgaaagagagatggccccgcagtctgtgagtccccgagaaagttacagagaaaacaaacgcaagcaaaagcttccccagcagcagcaacagagtttccagcagctggtttcagcccgaaaagaacagaagcgagaggagcgccgacagctgaaacagcagctggaggacatgcagaaacagctgcgccagctgcaggaaaagttctaccaaatctatgacagcactgattcggaaaatgatgaagatggtaacctgtctgaagacagcatgcgctcggagatcctggatgccagggcccaggactctgtcggaaggtcagataatgagatgtgcgagctagacccaggacagtttattgaccgagctcgagccctgatcagagagcaggaaatggctgaaaacaagccgaagcgagaaggcaacaacaaagaaagagaccatgggccaaactccttacaaccggaaggcaaacatttggctgagaccttgaaacaggaactgaacactgccatgtcgcaagttgtggacactgtggtcaaagtcttttcggccaagccctcccgccaggttcctcaggtcttcccacctctccagatcccccaggccagatttgcagtcaatggggaaaaccacaatttccacaccgccaaccagcgcctgcagtgctttggcgacgtcatcattccgaaccccctggacacctttggcaatgtgcagatggccagttccactgaccagacagaagcactgcccctggttgtccgcaaaaactcctctgaccagtctgcctccggccctgccgctggcggccaccaccagcccctgcaccagtcgcctctctctgccaccacgggcttcaccacgtccaccttccgccaccccttcccccttcccttgatggcctatccatttcagagcccattaggtgctccctccggctccttctctggaaaagacagagcctctcctgaatccttagacttaactagggataccacgagtctgaggaccaagatgtcatctcaccacctgagccaccacccttgttcaccagcacacccgcccagcaccgccgaagggctctccttgtcgctcataaagtccgagtgcggcgatcttcaagatatgtctgaaatatcaccttattcgggaagtgcaatgcaggaaggattgtcacccaatcacttgaaaaaagcaaagctcatgtttttttatacccgttatcccagctccaatatgctgaagacctacttctccgacgtaaagttcaacagatgcattacctctcagctcatcaagtggtttagcaatttccgtgagttttactacattcagatggagaagtacgcacgtcaagccatcaacgatggggtcaccagtactgaagagctgtctataaccagagactgtgagctgtacagggctctgaacatgcactacaataaagcaaatgactttgaggttccagagagattcctggaagttgctcagatcacattacgggagtttttcaatgccattatcgcaggcaaagatgttgatccttcctggaagaaggccatatacaaggtcatctgcaagctggatagtgaagtccctgagattttcaaatccccgaactgcctacaagagctgcttcatgagtagtaatgaactagtccgtaacttgaaagtatttcgatttcttggctttatatatcttgtggaaaggacgaggtcagagaggtcagtatcgaact

SEQ ID NO: 822 - DNA, 1880 bp, Homo sapiens
  source 1..1880: mol_type = genomic DNA
accgccaccatggatccaaactccatcttgctttctcctcagccccagatctgctcccacctagcagaagcttgtacggaaggcgagagaagctcatcccctccagagctggatagagactccccgtttccctggagtcaggtccccagctccagccctacagaccccgaatggtttggtgatgagcacatccaggcaaagagggccagagtggagaccattgtccgaggcatgtgtctctccccgaatcctctggtgccaggcaatgcgcaagctggggtcagcccacgctgcccaaagaaggcccgagagaggaagaggaagcagaaccttcccacaccgcaaggcctcctgatgccagcccctgcctgggaccagggcaacaggaaggggggccctcgtgtgagagaacaacttcatctgctgaagcaacagctaagacatctgcaagagcacatcctacaggctgccaagcccagggacacagctcaggggccaggaggctgtggcacggggaaaggccctctgagtgcaaagcaggggaatggctgtgggcctcgcccctgggttgtggacggtgaccaccagcaaggtaccagcaaggacctctctggggcagaaaaacaccaagagtctgagaagcccagtttccttccttctggagcaccagcttcactagagattctgaggaaagagctgaccagggcagtgtcccaggctgtggactcggtattacaaaaggtactattggatccaccaggccacctgactcagctgggcagaagcttccaggggcaggtggcagagggtagaagcgagccctcacctcctgtgggaggggcctgtaaagatccacttgctttggctgccttgcccaggagggtccagctacaagctggggtcccagtaggaaatttatcactggccaagcgtctagattctcctaggtaccctatccctccaagaatgacccccaaaccctgtcaggatcccccagcaaactttcccttgactgcaccttcccacatccaggaaaatcagattcttagccagctactgggtcatagatacaacaatggccattggagtagcagtcctccccaggactcatcttcccagaggcacccctcctcagagcctgccctacgaccttggagaactactaagccgcaaccattggtcctgagccagcagcagtgtcccttgcctttcacctctgcccatctggaaagtctaccccttcttccctcggtgaagatggaacagagaggcctgcatgctgtcatggaggcactgcctttctctttggtccacatccaggagggtctaaaccctggtcacttgaagaaggccaaactaatgtttttcttcacacgatatcccagctccaacctcctgaaggtttattttcctgatgttcagttcaaccgctgcattacctcccagatgatcaagtggttcagcaactttcgtgagttttattacatccaaatggaaaaatctgcccggcaagcaatttcagatggtgtcacaaatcccaaaatgctggtggttctccgcaattcagaactttttcaagctctcaatatgcactacaacaagggaaatgactttgaggttccagattgcttcttggaaattgccagcttgacgttacaggagttcttcagggctgtctccgcagggagagactcagatccttcctggaagaaacccatttataaaattatttcgaaactggacagtgacatcccagagatattcaaatcttccagctatccccagtagtaatgaactagtccgtaacttgaaagtatttcgatttcttggctttatatatcttgtggaaaggacgacaccaacggctcatcattagccca

SEQ ID NO: 823 - DNA, 1199 bp, Homo sapiens
  source 1..1199: mol_type = genomic DNA
accgccaccatggatccaaactccatcttgctttctcctcagccccagatctgctcccacctagcagaagcttgtacggaaggcgagagaagctcatcccctccagagctggatagagactccccgtttccctggagtcaggtccccagctccagccctacagaccccgaatggtttggtgatgagcacatccaggcaaagagggccagagtggagaccattgtccgaggcatgtgtctctccccgaatcctctggtgccaggcaatgcgcaagctggggtcagcccacgctgcccaaagaaggcccgagagaggaagaggaagcagaaccttcccacaccgcaaggcctcctgatgccagcccctgcctgggaccagggcaacaggaaggggggccctcgtgtgagagaacaacttcatctgctgaagcaacagctaagacatctgcaagagcacatcctacaggctgccaagcccagggacacagctcaggggccaggaggctgtggcacggggaaaggccctctgagtgcaaagcaggggaatggctgtgggcctcgcccctgggttgtggacggtgaccaccagcaaggtaccagcaaggacctctctggggcagaaaaacaccaagagtctgagaagcccagtttccttccttctggagcaccagcttcactagagattctgaggaaagagctgaccagggcagtgtcccaggctgtggactcggtattacaaaagttcaaccgctgcattacctcccagatgatcaagtggttcagcaactttcgtgagttttattacatccaaatggaaaaatctgcccggcaagcaatttcagatggtgtcacaaatcccaaaatgctggtggttctccgcaattcagaactttttcaagctctcaatatgcactacaacaagggaaatgactttgaggttccagattgcttcttggaaattgccagcttgacgttacaggagttcttcagggctgtctccgcagggagagactcagatccttcctggaagaaacccatttataaaattatttcgaaactggacagtgacatcccagagatattcaaatcttccagctatccccagtagtaatgaactagtccgtaacttgaaagtatttcgatttcttggctttatatatcttgtggaaaggacgaatttatacgttcccagtacgaggt

SEQ ID NO: 824 - DNA, 1124 bp, Homo sapiens
  source 1..1124: mol_type = genomic DNA
accgccaccatgccagagtggccaccttgcttatctgtggccccggccctggtgatcaccatggcagctgggaagggagccccgttgagcccatcggctgaaaacagatggcgacttagcgaacctgagctgggccggggctgcaagccagtgctgctcgagaagacgaaccgcctgggccctgaggctgctgtgggcagggcgggccgggatgtgggcagtgcggagctggcactgttggtagccccaggcaagccccgacctggcaagccgctgcccccgaagacacgtggagagcagaggcagagcgccttcacggagctgccgaggatgaaggaccggcaggtggatgctcaggcccaggagagggagcacgatgaccccacaggccaacctggtgccccacagctgacccagaacatccccagaggcccagctggcagcaaagtcttctctgtgtggcccagcggagcacgaagtgagcaaagaagcgcctttagcaaaccaaccaagcgaccagcagagaggcctgagctaacctcagtcttccctgcaggggaatctgcagatgccctgggggagctgtctggactcctcaacactacagacctcgcttgttggggtcgactttcaactcccaagcttttggttggtgatttgtggaacttgcaagcattgccacagaatgctccactctgtagcacttttctgggtgcccctacactgtggctggagcatacccaggcccaggtgcccccaccctcatcatcctccaccacttcgtgggccctcctgccacccaccctcacctccctgggcttgtccacccagaactggtgtgcaaagtgcaacctgtcctttcgcctaacgtccgacctggtctttcacatgcgatcccaccacaaaaaggagcatgcggggcctgacccacattctcagaagcggagagaagaggcccttgcctgccctgtgtgccaggagcacttccgggagcgccaccacctctcccggcacatgacttctcacagctagtaatgaactagtccgtaacttgaaagtatttcgatttcttggctttatatatcttgtggaaaggacgaggttcgcgggcgactcacaattat

SEQ ID NO: 825 - DNA, 1478 bp, Homo sapiens
  source 1..1478: mol_type = genomic DNA
accgccaccatgttggagcaaaggagggagccctggtctggtgagagtgaagtgaaaatagcaaaaaattcagatgggagggagtgcatcaaaggtgtgaacacagggagcagctatgcattgggaagcaatgcagaagacaaaccaattaaaaaacaacttggagtatcctttcacttacatctgtctgaactggagctatttccagatgaaagggtaataaatggatgtaatcaagttgaaaactttatcaaccacagttcctctgtttcctgtcttcaagaaatgtcttccagtgtcaaaacccccatttttaataggaatgattttgatgattcttcatttctcccacaagaacagaaagtacaccttagagaaaaaccttatgaatgtaatgagcatagcaaagtctttagagtatcttccagccttactaaacatcaagtaatccatactgtagagaaaccttacaaatgtaattcatgcggcaaggtctttagtcgcaattcacaccttgcagaacattgtagaattcatactggagagaaaccttacaaatgtaatgtctgtggcaaggtttttagttacaattcaaactttgcacgacatcaaagaattcataccagagagaagccgtatgaatgtaatgaatgtggtaaagtcttcagtaataattcttaccttgcacgacatcaaagaattcatgctgaagagaaaccttacaaatgtaatgaatgtggtaaaggcttcagtcataagtcatctctagcaaatcattggagaatttatactggagagaagccttacaaatgtgatgaatgtggcaaggccttctataggattgcgctccttgtacgacatcagaaaattcatactggagagaaaccttacaaatgtaatgaatgtggaaaggtctttattcaaaattcgcacctagcacaacattggagaattcatacaggagagaaaccttacaaatgtaatgaatgtggaaaagtatttaatcaactttcaaatcttgcacgacatcgaagaattcatactggagagaagccttacaaatgtaatgaatgtggtaaagcatttagtgagtattcaggcctttcagcccatcttgtaatccacactggagagaagccttacaaatgtagtgaatgtggcaaggcattcagacacaagttatcactaaccaatcatcagagaatccatactggagaaagaccttacaaatgtaatgaatgtggcaaggtcttcaatcgaattgcacaccttgcacgacatcggaaaattcatactggagagaaaccttacaaatgtaatgagtgtggcaaggcctttagtcgcatttcatacctagcacaacattggacaattcatatgggatagtaatgaactagtccgtaacttgaaagtatttcgatttcttggctttatatatcttgtggaaaggacgaatcggatgcccatcggaagctatg

SEQ ID NO: 826 - DNA, 1580 bp, Homo sapiens
  source 1..1580: mol_type = genomic DNA
accgccaccatgctgtgtgatgaaaaagcccagaagagaaggaagaggaaagcaaaggagtcagggatggctcttcctcagggacacttaacattcagggacgtggccatagaattctctcaggcggagtggaaatgcctggaccctgcacagagggctttatacaaggatgtgatgttggagaactacaggaacctggtctccctggggagcagctatgcattgggaagcaatgcagaagacaaaccaattaaaaaacaacttggagtatcctttcacttacatctgtctgaactggagctatttccagatgaaagggtaataaatggatgtaatcaagttgaaaactttatcaaccacagttcctctgtttcctgtcttcaagaaatgtcttccagtgtcaaaacccccatttttaataggaatgattttgatgattcttcatttctcccacaagaacagaaagtacaccttagagaaaaaccttatgaatgtaatgagcatagcaaagtctttagagtatcttccagccttactaaacatcaagtaatccatactgtagagaaaccttacaaatgtaattcatgcggcaaggtctttagtcgcaattcacaccttgcagaacattgtagaattcatactggagagaaaccttacaaatgtaatgtctgtggcaaggtttttagttacaattcaaactttgcacgacatcaaagaattcataccagagagaagccgtatgaatgtaatgaatgtggtaaagtcttcagtaataattcttaccttgcacgacatcaaagaattcatgctgaagagaaaccttacaaatgtaatgaatgtggtaaaggcttcagtcataagtcatctctagcaaatcattggagaatttatactggagagaagccttacaaatgtgatgaatgtggcaaggccttctataggattgcgctccttgtacgacatcagaaaattcatactggagagaaaccttacaaatgtaatgaatgtggaaaggtctttattcaaaattcgcacctagcacaacattggagaattcatacaggagagaaaccttacaaatgtaatgaatgtggaaaagtatttaatcaactttcaaatcttgcacgacatcgaagaattcatactggagagaagccttacaaatgtaatgaatgtggtaaagcatttagtgagtattcaggcctttcagcccatcttgtaatccacactggagagaagccttacaaatgtagtgaatgtggcaaggcattcagacacaagttatcactaaccaatcatcagagaatccatactggagaaagaccttacaaatgtaatgaatgtggcaaggtcttcaatcgaattgcacaccttgcacgacatcggaaaattcatactggagagaaaccttacaaatgtaatgagtgtggcaaggcctttagtcgcatttcatacctagcacaacattggacaattcatatgggatagtaatgaactagtccgtaacttgaaagtatttcgatttcttggctttatatatcttgtggaaaggacgattaatgactccgcaatagtttctg

SEQ ID NO: 827 - DNA, 1709 bp, Homo sapiens
  source 1..1709: mol_type = genomic DNA
accgccaccatgctgtgtgatgaaaaagcccagaagagaaggaagaggaaagcaaaggagtcagggatggctcttcctcagggacacttaacattcagggacgtggccatagaattctctcaggcggagtggaaatgcctggaccctgcacagagggctttatacaaggatgtgatgttggagaactacaggaacctggtctccctgggaatctctcttcctgacctgaatattaactccatgttggagcaaaggagggagccctggtctggtgagagtgaagtgaaaatagcaaaaaattcagatgggagggagtgcatcaaaggtgtgaacacagggagcagctatgcattgggaagcaatgcagaagacaaaccaattaaaaaacaacttggagtatcctttcacttacatctgtctgaactggagctatttccagatgaaagggtaataaatggatgtaatcaagttgaaaactttatcaaccacagttcctctgtttcctgtcttcaagaaatgtcttccagtgtcaaaacccccatttttaataggaatgattttgatgattcttcatttctcccacaagaacagaaagtacaccttagagaaaaaccttatgaatgtaatgagcatagcaaagtctttagagtatcttccagccttactaaacatcaagtaatccatactgtagagaaaccttacaaatgtaattcatgcggcaaggtctttagtcgcaattcacaccttgcagaacattgtagaattcatactggagagaaaccttacaaatgtaatgtctgtggcaaggtttttagttacaattcaaactttgcacgacatcaaagaattcataccagagagaagccgtatgaatgtaatgaatgtggtaaagtcttcagtaataattcttaccttgcacgacatcaaagaattcatgctgaagagaaaccttacaaatgtaatgaatgtggtaaaggcttcagtcataagtcatctctagcaaatcattggagaatttatactggagagaagccttacaaatgtgatgaatgtggcaaggccttctataggattgcgctccttgtacgacatcagaaaattcatactggagagaaaccttacaaatgtaatgaatgtggaaaggtctttattcaaaattcgcacctagcacaacattggagaattcatacaggagagaaaccttacaaatgtaatgaatgtggaaaagtatttaatcaactttcaaatcttgcacgacatcgaagaattcatactggagagaagccttacaaatgtaatgaatgtggtaaagcatttagtgagtattcaggcctttcagcccatcttgtaatccacactggagagaagccttacaaatgtagtgaatgtggcaaggcattcagacacaagttatcactaaccaatcatcagagaatccatactggagaaagaccttacaaatgtaatgaatgtggcaaggtcttcaatcgaattgcacaccttgcacgacatcggaaaattcatactggagagaaaccttacaaatgtaatgagtgtggcaaggcctttagtcgcatttcatacctagcacaacattggacaattcatatgggatagtaatgaactagtccgtaacttgaaagtatttcgatttcttggctttatatatcttgtggaaaggacgataccagtaatctggacgtatcgtt

SEQ ID NO: 828 - DNA, 1718 bp, Homo sapiens
  source 1..1718: mol_type = genomic DNA
accgccaccatgaccacattcaaggaggcagtgaccttcaaggatgtggctgtggtcttcactgaggaggagctggggctgctggaccctgcccagaggaagctgtaccgagatgtgatgctggagaacttcaggaacctgctctcagtggggcatcaaccgttccaccaagatacttgccacttcctaagggaagaaaagttttggatgatggggacagcaacccaaagagaagggaattcaggaggcaagatccaaactgagttggagtctgttccagaagcaggagcacatgaagagtggtcctgccagcaaatctgggaacaaattgcaaaagacttaaccaggtctcaggactctatcataaataactctcagttctttgaaaatggtgatgtcccctcccaggttgaagcaggactacccacaattcatacaggacagaaaccttcccagggtgggaagtgtaaacagtccatcagtgatgttcccatctttgatcttcctcagcagttatactcagaagagaagtcttatacatgtgatgagtgtggaaaaagcatctgttacatctcagctcttcatgttcatcagagagtccacgtgggagagaaactctttatgtgtgatgtgtgtggcaaggaatttagtcaaagctcacatctgcaaactcatcagagagtccacactggagagaaaccattcaaatgtgagcaatgtgggaaaggtttcagtcgtagatcagcacttaatgttcatcgtaaattacacacaggagagaaaccttacatttgtgaggcatgtgggaaggccttcattcatgattcccagcttaaggaacataagagaatccatactggggagaaaccattcaaatgtgatatatgtggtaagaccttctattttaggtcaagacttaagagccattccatggttcacacaggagaaaaaccatttaggtgtgatacatgtgataagagctttcatcagagatcagcacttaataggcattgcatggtccacacaggagagaaaccgtacagatgtgagcagtgtggaaaaggctttattggtaggctagatttttataagcatcaggtggtccacacaggagaaaaaccatataattgtaaagaatgtgggaagagcttcagatggtcctcatgccttttgaaccatcagcgagtccacagtggagaaaaaagcttcaaatgtgaagaatgtggaaagggattttatacaaattcacaactgtcttcccatcagagatcccacagtggtgaaaagccatataaatgtgaggagtgtgggaagggctatgttactaagtttaatcttgacttgcaccagagggtccacacgggagagagaccttataattgtaaggaatgtgggaagaactttagccgggcctcaagtattttgaatcataagagactccactgccagaaaaaaccattcaaatgtgaggactgtggaaagaggcttgtacacaggacataccgtaaagaccagccgagagactatagtggggaaaacccatccaaatgtgaggattgtgggagacgctacaagaggcgcttgaatctggatatacttttatcattatttctaaatgacacatagtaatgaactagtccgtaacttgaaagtatttcgatttcttggctttatatatcttgtggaaaggacgatgactgctacggactcttcccatt

SEQ ID NO: 829 - DNA, 1751 bp, Homo sapiens
  source 1..1751: mol_type = genomic DNA
accgccaccatgataaagagaagcaaagtacttgtattctgttcaaagattatggaggaggcagtgaccttcaaggatgtggctgtggtcttcactgaggaggagctggggctgctggaccctgcccagaggaagctgtaccgagatgtgatgctggagaacttcaggaacctgctctcagtggggcatcaaccgttccaccaagatacttgccacttcctaagggaagaaaagttttggatgatggggacagcaacccaaagagaagggaattcaggaggcaagatccaaactgagttggagtctgttccagaagcaggagcacatgaagagtggtcctgccagcaaatctgggaacaaattgcaaaagacttaaccaggtctcaggactctatcataaataactctcagttctttgaaaatggtgatgtcccctcccaggttgaagcaggactacccacaattcatacaggacagaaaccttcccagggtgggaagtgtaaacagtccatcagtgatgttcccatctttgatcttcctcagcagttatactcagaagagaagtcttatacatgtgatgagtgtggaaaaagcatctgttacatctcagctcttcatgttcatcagagagtccacgtgggagagaaactctttatgtgtgatgtgtgtggcaaggaatttagtcaaagctcacatctgcaaactcatcagagagtccacactggagagaaaccattcaaatgtgagcaatgtgggaaaggtttcagtcgtagatcagcacttaatgttcatcgtaaattacacacaggagagaaaccttacatttgtgaggcatgtgggaaggccttcattcatgattcccagcttaaggaacataagagaatccatactggggagaaaccattcaaatgtgatatatgtggtaagaccttctattttaggtcaagacttaagagccattccatggttcacacaggagaaaaaccatttaggtgtgatacatgtgataagagctttcatcagagatcagcacttaataggcattgcatggtccacacaggagagaaaccgtacagatgtgagcagtgtggaaaaggctttattggtaggctagatttttataagcatcaggtggtccacacaggagaaaaaccatataattgtaaagaatgtgggaagagcttcagatggtcctcatgccttttgaaccatcagcgagtccacagtggagaaaaaagcttcaaatgtgaagaatgtggaaagggattttatacaaattcacaactgtcttcccatcagagatcccacagtggtgaaaagccatataaatgtgaggagtgtgggaagggctatgttactaagtttaatcttgacttgcaccagagggtccacacgggagagagaccttataattgtaaggaatgtgggaagaactttagccgggcctcaagtattttgaatcataagagactccactgccagaaaaaaccattcaaatgtgaggactgtggaaagaggcttgtacacaggacataccgtaaagaccagccgagagactatagtggggaaaacccatccaaatgtgaggattgtgggagacgctacaagaggcgcttgaatctggatatacttttatcattatttctaaatgacacatagtaatgaactagtccgtaacttgaaagtatttcgatttcttggctttatatatcttgtggaaaggacgacgctataatccggcctggtattat

SEQ ID NO: 830 - DNA, 593 bp, Homo sapiens
  source 1..593: mol_type = genomic DNA
accgccaccatgatgcctgggcagatcccggacccttcggtgaccacaggctccctgccagggcttggccccctgaccgggctccccagctcggccctgactgtggaggagctgaaatacgctgacatccgcaacctcggggccatgattgcacccttgcacttcctggaggtgaaactgggcaagaggccccagcccgtgaaaagtgagctagatgaggaagaggagcgaaggaaaaggcgccgggagaagaacaaagtcgcagcagcccgatgccggaacaagaagaaggagcgcacggagtttctgcagcgggaatccgagcggctggaactcatgaacgcagagctgaagacccagattgaggagctgaagcaggagcggcagcagctcatcctgatgctgaaccgacaccgccccacctgcatcgtccggaccgacagtgtcaagacccccgagtcagaaggcaacccactgctcgagcagctcgagaagaagtagtaatgaactagtccgtaacttgaaagtatttcgatttcttggctttatatatcttgtggaaaggacgatatccgttaaccgtctaatcgaaa

SEQ ID NO: 831 - DNA, 626 bp, Homo sapiens
  source 1..626: mol_type = genomic DNA
accgccaccatggtagcaggctggcctgccactcctcctgctatgatgcctgggcagatcccggacccttcggtgaccacaggctccctgccagggcttggccccctgaccgggctccccagctcggccctgactgtggaggagctgaaatacgctgacatccgcaacctcggggccatgattgcacccttgcacttcctggaggtgaaactgggcaagaggccccagcccgtgaaaagtgagctagatgaggaagaggagcgaaggaaaaggcgccgggagaagaacaaagtcgcagcagcccgatgccggaacaagaagaaggagcgcacggagtttctgcagcgggaatccgagcggctggaactcatgaacgcagagctgaagacccagattgaggagctgaagcaggagcggcagcagctcatcctgatgctgaaccgacaccgccccacctgcatcgtccggaccgacagtgtcaagacccccgagtcagaaggcaacccactgctcgagcagctcgagaagaagtagtaatgaactagtccgtaacttgaaagtatttcgatttcttggctttatatatcttgtggaaaggacgaacacaacgcgggtcaaacccttct

SEQ ID NO: 832 - DNA, 1427 bp, Homo sapiens
  source 1..1427: mol_type = genomic DNA
accgccaccatggccccaagagcccagatccagggaccgctgacatttggggatgtggctgtggcctttacccggattgagtggagacacctggatgctgctcagcgggccctgtacagggatgtgatgctggagaactatgggaatctggtgtctgtggggcttctctcttccaaaccaaaactaattactcagttggagcaaggggcagagccctggactgaggtgcgagaggctccatcaggcacacatgcagtcgaggattactggtttgaaacaaagatgtcagccctaaagcaaagcacttctgaagcatctgttctgggagagcgaacgaaaagtgtcatgatggaaaaaggcctggactgggagggcagaagctccacagagaagaactataagtgcaaggaatgtgggaaagtcttcaaatacaattcgtcctttattagccaccagagaaatcacaccagtgagaaaccacataaatgtaaagaatgtgggatcgcctttatgaacagttcatcccttttaaatcaccataaggttcatgcaggcaaacagccttatagatgtattgaatgtgggaagttcctgaagaagcactcaacgtttatcaaccatcagagaattcattctagggagaaaccccacaaatgcattgaatgtggaaaaactttcagaaagaactcaatccttttaagtcatcagagaattcatactggccagaaaccctacaaatgtaatgactgtgggaaagccttcgctcagaatgcagctcttactcgtcatgaaagaatacatagtggagagaagccttttaaatgtaacaagtgtgggagagctttcagggataattcaactgtgttggaacatcagaaaatccatactggtgagaagccatatcagtgtaatgaatgtggaaaagcctttaggaagagctcaactcttattagtcaccaaagaatgcatactggggagaaaccctatcactgcagtaaatgtggaaaatctttcaggtatagctcatcctttgctggtcatcagaaaactcacagtggaaataaaccgtatcagtgtcgtgactgtgggaaggcctttacaaagagctcaacccttactggacatcagagaattcatactggagaaaaaccctatcactgtaagaaatgtgggaaagcctttcggcacagctcaggccttgttgaacatcagagactccatactggggaaaaaccttataaatgtaatgaatgtgggaaagcttttccccgaagttcagcccttaagcaacataagaaaattcataataaagaaagagccatgaaatgtagttagtaatgaactagtccgtaacttgaaagtatttcgatttcttggctttatatatcttgtggaaaggacgagagggcaaatcttgcaaatccgct

SEQ ID NO: 833 - DNA, 1493 bp, Homo sapiens
  source 1..1493: mol_type = genomic DNA
accgccaccatgccgggaccccttagaagcctagaaatggaatcattgcaatttagagatgtggctgtagaattctctctggaggagtggcattgcctggacactgcacagcagaatttatatagggatgtgatgttagagaactacagacacctggtcttccttggtattattgtctctaagccagacctgatcacctgtctggagcaaggaataaaacctctgactatgaagagacatgagatgattgccaaacccccagttgtgtgttctcattttgcccaagacctttggccagagcagagcataaaagattcttaccaaaaagtgatactgagaaaatttgaaaaatgtggacatggcaatttacactttaaaaaaggctgtgaaagtgtggatgagtgtaagttacacaaaagaggttataatggacttaaccaatgtttgacaactacccagagcaaaatatttcaatgtggtaaatatgtgaaagtctttcatcaattttcaaattcaaagagacataaaagaagacatactgaaaaaaaacctttgaaatatatagaaggtgacaaagcttttaaccagtcctcaacccatactacacataaaaaaattgatactggagagaaaccatacaaatgtgaagaatgtggcaaagccttcaaccggtcctcacaccttactacacataagataactcatactagagagaaaccctacaaatgtgaagaatgtggcaaagtctttaagtacttctctagctttactacacataagaaaattcatagtggagagaaaccctacatttgtgaagaatgtggcaaagcctttatgtacccctatacccttactacacataagataatccatactggagagcaaccctacaaatgtaaagaatgtgacaaagcttttaaccatcctgcaactctttcttcacataagaaaattcatactggagagaaaccgtacacgtgtgataaatgtggcaaagcctttatttcatcctcgatccttagtaaacatgagaagattcatacgggagagaaaccctacaaatgtgaagaatgtggcaaagccttcacccgctcctcacaccttactatgcataagataattcatactggagagaaaccatacaaatgtgaagaatgtggcaaagcctttacatggtctgcaggcctccataaacataggagaactcatactggagagaaaccctacaaatgtgaagaatgtggcaaagcgtatactacatcctcaaatctaactgaacataagacaactcatactggagagaaaccttacaaatgtaaagaatgtggcaaagcttttaactggtcctcagaccttaataaacataagagaattcatattggacagaaaccaagaacgtagtaatgaactagtccgtaacttgaaagtatttcgatttcttggctttatatatcttgtggaaaggacgagaataagaagtacagtccattgag

SEQ ID NO: 834 - DNA, 1967 bp, Homo sapiens
  source 1..1967: mol_type = genomic DNA
accgccaccatggcggatttcgaagagttgaggaatatggtttctagttttagggtttctgaactacaagtattactaggctttgctggacggaataaaagtggacgcaagcatgacctcctgatgagggcgctgcatttattgaagagcggctgcagccctgcggttcagattaaaatccgagaattgtatagacgccgatatccacgaactcttgaaggactttctgatttatccacaatcaaatcatcggttttcagtttggatggtggctcatcacctgtagaacctgacttggccgtggctggaatccactcgttgccttccacttcagttacacctcactcaccatcctctcctgttggttctgtgctgcttcaagatactaagcccacatttgagatgcagcagccatctcccccaattcctcctgtccatcctgatgtgcagttaaaaaatctgcccttttatgatgtccttgatgttctcatcaagcccacgagtttagttcaaagcagtattcagcgatttcaagagaagttttttatttttgctttgacacctcaacaagttagagagatatgcatatccagggattttttgccaggtggtaggagagattatacagtccaagttcagttgagactttgcctggcagagacaagttgccctcaagaagataactatccaaatagtctatgtataaaagtaaatgggaagctatttcctttgcctggctatgcaccaccgcctaaaaatgggattgaacagaagcgccctggacgccccttgaatattacatctttagttaggttatcttcagctgtgccaaaccaaatttccatttcttgggcatcagaaattgggaagaattactctatgtctgtatatcttgtacggcagcttacatcagccatgttattacagagattaaaaatgaaaggtattagaaaccctgatcattccagagcactaattaaagaaaaacttactgcagatcctgatagtgaaattgctacaactagccttcgggtatccttgatgtgccctttaggaaaaatgaggctgacaatcccatgccgtgcagtgacttgtacacatctgcagtgttttgatgctgccctctatctacaaatgaatgagaaaaagcccacctggatttgtcctgtgtgtgacaaaaaagctgcctatgaaagtctaatattagatgggctttttatggaaattctcaatgactgttctgatgtagatgagatcaaattccaagaagatggttcttggtgtccaatgagaccgaagaaagaagctatgaaagtatccagccaaccgtgtacaaaaatagaaagttcaagcgtcctcagtaagccttgttcagtgactgtagccagtgaggcaagcaagaagaaagtagatgttattgatcttacaatagaaagctcttctgacgaagaggaagaccctcctgccaaaaggaaatgcatctttatgtcagaaacacaaagcagcccaaccaaaggggttctcatgtatcagccatcttctgtaagggtgcccagtgtgacttcggttgatcctgctgctattccgccttcattaacagactactcagtaccattccaccatacgccaatatcaagcatgtcatcagatttgccaggtttggattttctttcccttattccagttgatccccagtactgtcctcctatgtttttggatagtctcacctcacccttaacagcaagcagtacgtctgtcaccaccaccagctcccatgaaagcagtactcatgttagttcatccagcagcaggagtgagacaggggtcataaccagcagtggaagtaacattcctgacatcatctcattggactagtaatgaactagtccgtaacttgaaagtatttcgatttcttggctttatatatcttgtggaaaggacgagggagccggtgtggaacgactagc

SEQ ID NO: 835 - DNA, 1820 bp, Homo sapiens
  source 1..1820: mol_type = genomic DNA
accgccaccatggcggatttcgaagagttgaggaatatggtttctagttttagggtttctgaactacaagtattactaggctttgctggacggaataaaagtggacgcaagcatgacctcctgatgagggcgctgcatttattgaagagcggctgcagccctgcggttcagattaaaatccgagaattgtatagacgccgatatccacgaactcttgaaggactttctgatttatccacaatcaaatcatcggttttcagtttggatggtggctcatcacctgtagaacctgacttggccgtggctggaatccactcgttgccttccacttcagttacacctcactcaccatcctctcctgttggttctgtgctgcttcaagatactaagcccacatttgagatgcagcagccatctcccccaattcctcctgtccatcctgatgtgcagttaaaaaatctgcccttttatgatgtccttgatgttctcatcaagcccacgagtttagttcaaagcagtattcagcgatttcaagagaagttttttatttttgctttgacacctcaacaagttagagagatatgcatatccagggattttttgccaggtggtaggagagattatacagtccaagttcagttgagactttgcctggcagagacaagttgccctcaagaagataactatccaaatagtctatgtataaaagtaaatgggaagctatttcctttgcctggctatgcaccaccgcctaaaaatgggattgaacagaagcgccctggacgccccttgaatattacatctttagttaggttatcttcagctgtgccaaaccaaatttccatttcttgggcatcagaaattgggaagaattactctatgtctgtatatcttgtacggcagcttacatcagccatgttattacagagattaaaaatgaaaggtattagaaaccctgatcattccagagcactaattaaagaaaaacttactgcagatcctgatagtgaaattgctacaactagccttcgggtatccttgatgtgccctttaggaaaaatgaggctgacaatcccatgccgtgcagtgacttgtacacatctgcagtgttttgatgctgccctctatctacaaatgaatgagaaaaagcccacctggatttgtcctgtgtgtgacaaaaaagctgcctatgaaagtctaatattagatgggctttttatggaaattctcaatgactgttctgatgtagatgagatcaaattccaagaagatggttcttggtgtccaatgagaccgaagaaagaagctatgaaagtatccagccaaccgtgtacaaaaatagaaagttcaagcgtcctcagtaagccttgttcagtgactgtagccagtgaggcaagcaagaagaaagtagatgttattgatcttacaatagaaagctcttctgacgaagaggaagaccctcctgccaaaaggaaatgcatctttatgtcagaaacacaaagcagcccaaccaaaggggttctcatgtatcagccatcttctgtaagggtgcccagtgtgacttcggttgatcctgctgctattccgccttcattaacagactactcagtaccattccaccatacgccaatatcaagcatgtcatcagatttgccaggagaacaaagaagaaatgatattaataatgaactgaagcttggaacatcttctgatactgtgcaacagtagtaatgaactagtccgtaacttgaaagtatttcgatttcttggctttatatatcttgtggaaaggacgactagcgtcagcctggcttcagttc

SEQ ID NO: 836 - DNA, 1988 bp, Homo sapiens
  source 1..1988: mol_type = genomic DNA
accgccaccatggcggagctgggcgaattaaagcacatggtgatgagtttccgggtgtctgagctccaggtgcttcttggctttgctggccggaacaagagtggacggaagcacgagctcctggccaaggctctgcacctcctgaagtccagctgtgcccctagtgtccagatgaagatcaaagagctttaccgacgacgctttccccggaagaccctggggccctctgatctctcccttctctctttgccccctggcacctctcctgtaggctcccctggtcctctagctcccattcccccaacgctgttggcccctggcaccctgctgggccccaagcgtgaggtggacatgcacccccctctgccccagcctgtgcaccctgatgtcaccatgaaaccattgcccttctatgaagtctatggggagctcatccggcccaccacccttgcatccacttctagccagcggtttgaggaagcgcactttacctttgccctcacaccccagcaagtgcagcagattcttacatccagagaggttctgccaggagccaaatgtgattataccatacaggtgcagctaaggttctgtctctgtgagaccagctgcccccaggaagattattttccccccaacctctttgtcaaggtcaatgggaaactgtgccccctgccgggttaccttcccccaaccaagaatggggccgagcccaagaggcccagccgccccatcaacatcacacccctggctcgactctcagccactgttcccaacaccattgtggtcaattggtcatctgagttcggacggaattactccttgtctgtgtacctggtgaggcagttgactgcaggaacccttctacaaaaactcagagcaaagggtatccggaacccagaccactcgcgggcactgatcaaggagaaattgactgctgaccctgacagtgaggtggccactacaagtctccgggtgtcactcatgtgcccgctagggaagatgcgcctgactgtcccttgtcgtgccctcacctgcgcccacctgcagagcttcgatgctgccctttatctacagatgaatgagaagaagcctacatggacatgtcctgtgtgtgacaagaaggctccctatgaatctcttatcattgatggtttatttatggagattcttagttcctgttcagattgtgatgagatccaattcatggaagatggatcctggtgcccaatgaaacccaagaaggaggcatctgaggtttgccccccgccagggtatgggctggatggcctccagtacagcccagtccaggggggagatccatcagagaataagaagaaggtcgaagttattgacttgacaatagaaagctcatcagatgaggaggatctgccccctaccaagaagcactgttctgtcacctcagctgccatcccggccctacctggaagcaaaggagtcctgacatctggccaccagccatcctcggtgctaaggagccctgctatgggcacgttgggtggggatttcctgtccagtctcccactacatgagtacccacctgccttcccactgggagccgacatccaaggtttagatttattttcatttcttcagacagagagtcagcactatggcccctctgtcatcacctcactagatgaacaggatgcccttggccacttcttccagtaccgagggaccccttctcactttctgggcccactggcccccacgctggggagctcccactgcagcgccactccggcgccccctcctggccgtgtcagcagcattgtggcccctgggggggccttgagggaggggcatggaggacccctgccctcaggtccctctttgactggctgtcggtcagacatcatttccctggactagtaatgaactagtccgtaacttgaaagtatttcgatttcttggctttatatatcttgtggaaaggacgagatacatgcatatccctcaattag

SEQ ID NO: 837 - DNA, 2063 bp, Homo sapiens
  source 1..2063: mol_type = genomic DNA
accgccaccatgtttacactccaagattcgtatgttaagcaaatggttatgagccttagagtttctgaactccaagtactgttgggctacgccgggagaaacaagcacggacgcaaacacgaacttctcacaaaagccctgcatttgctaaaggctggctgtagtcctgctgtgcaaatgaaaattaaggaactctataggcggcggttcccacagaaaatcatgacgcctgcagacttgtccatccccaacgtacattcaagtcctatgccagcaactttgtctccatctaccattccacaactcacttacgatggtcaccctgcatcatcgccattactccctgtttctcttctgggacctaaacatgaactggaactcccacatcttacatcagctcttcacccagtccatccggatataaaacttcaaaaattaccattttatgatttactggatgaactgataaaacccaccagtctagcatcagacaacagtcagcgctttcgagaaacctgttttgcatttgccttgacaccacaacaagtgcagcaaatcagtagttccatggatatttctgggaccaaatgtgacttcacagtacaggtccagttaaggttttgtttatcagaaaccagttgtccacaagaagatcacttcccacccaatctttgtgtgaaagtgaatacaaaaccttgcagccttccaggttaccttccacctacaaaaaatggcgtggaaccaaagcgacccagccgaccaattaatatcacctcacttgtccgactgtccacaacagtaccaaacacgattgttgtttcttggactgcagaaattggaagaaactattccatggcagtatatcttgtaaaacagttgtcctcaacagttcttcttcagaggttacgagcaaagggaataaggaatccggatcattctagagctttaattaaagagaagttgactgcggatccagacagtgaaatagctacaaccagcctaagggtttctctactatgtccacttggtaaaatgcggctgacaattccgtgtcgggcccttacatgttctcatctacaatgttttgacgcaactctttacattcagatgaatgagaaaaaaccaacctgggtttgtcctgtctgtgataagaaggctccatatgaacaccttattattgatggcttgtttatggaaatcctaaagtactgtacagactgtgatgaaatacaatttaaggaggatggcacttgggcaccgatgagatcaaaaaaggaagtacaggaagtttctgcctcttacaatggagtcgatggatgcttgagctccacattggagcatcaggtagcgtctcaccaccagtcctcaaataaaaacaagaaagtagaagtgattgacctaaccatagacagttcatctgatgaagaggaagaagagccatctgccaagaggacctgtccttccctatctcccacatcaccactaaataataaaggcattttaagtcttccacatcaagcatctccagtatcccgcaccccaagccttcctgctgtagacacaagctacattaatacctccctcatccaagactataggcatcctttccacatgacacccatgccttacgacttacaaggattagatttctttcctttcttatcaggagacaatcagcattacaacacctccttgcttgccgctgcagcagcagcagtttcagatgatcaagacctcctacactcgtctcggtttttcccgtatacctcctcacagatgtttcttgatcagttaagtgcaggaggcagtacttctctgccaaccaccaatggaagcagtagtggcagtaacagcagcctggtttcttccaacagcctaagggaaagccatagccacaccgtcacaaacaggagcagcacggacacggcatccatctttggcatcataccagacattatttcattggactagtaatgaactagtccgtaacttgaaagtatttcgatttcttggctttatatatcttgtggaaaggacgagctaagtgggtatttcgtgatgca

SEQ ID NO: 838 - DNA, 1634 bp, Homo sapiens
  source 1..1634: mol_type = genomic DNA
accgccaccatggcggcggagctggtggaggccaaaaacatggtgatgagttttcgagtctccgaccttcagatgctcctgggtttcgtgggccggagtaagagtggactgaagcacgagctcgtcaccagggccctccagctggtgcagtttgactgtagccctgagctgttcaagaagatcaaggagctgtacgagacccgctacgccaagaagaactcggagcctgccccacagccgcaccggcccctggaccccctgaccatgcactccacctacgaccgggccggcgctgtgcccaggactccgctggcaggccccaatattgactaccccgtgctctacggaaagtacttaaacggactgggacggttgcccgccaagaccctcaagccagaagtccgcctggtgaagctgccgttctttaatatgctggatgagctgctgaagcccaccgaattagtcccacagaacaacgagaagcttcaggagagcccgtgcatcttcgcattgacgccaagacaggtggagttgatccggaactccagggaactgcagcccggagttaaagccgtgcaggtcgtcctgagaatctgttactcagacaccagctgccctcaggaggaccagtacccgcccaacatcgctgtgaaggtcaaccacagctactgctccgtcccgggctactacccctccaataagcccggggtggagcccaagaggccgtgccgccccatcaacctcacccacctcatgtacctgtcctcggccaccaaccgcatcactgtcacctgggggaactacggcaagagctactcggtggccctgtacctggtgcggcagctgacctcatcggagctgctgcagaggctgaagaccattggggtaaagcacccggagctgtgcaaggcactggtcaaggagaagctgcgccttgatcctgacagcgagatcgccaccaccggtgtgcgggtgtccctcatctgtccgctggtgaagatgcggctctccgtgccctgccgggcagagacctgtgcccacctgcagtgcttcgacgccgtcttctacctgcagatgaacgagaagaagcccacctggatgtgccccgtgtgcgacaagccagccccctacgaccagctcatcatcgacgggctcctctcgaagatcctgagcgagtgtgaggacgccgacgagatcgagtacctggtggacggctcgtggtgcccgatccgcgccgaaaaggagcgcagctgcagcccgcagggcgccatcctcgtgctgggcccctcggacgccaatgggctcctgcccgcccccagcgtcaacgggagcggtgccctgggcagcacgggtggcggcggcccggtgggcagcatggagaatgggaagccgggcgccgatgtggtggacctcacgctggacagctcatcgtcctcggaggatgaggaggaggaggaagaggaggaggaagacgaggacgaagaggggccccggcccaagcgccgctgccccttccagaagggcctggtgccggcctgctagtaatgaactagtccgtaacttgaaagtatttcgatttcttggctttatatatcttgtggaaaggacgaagtcttgaaccttctttaagtatt

SEQ ID NO: 839 - DNA, 1973 bp, Homo sapiens
  source 1..1973: mol_type = genomic DNA
accgccaccatggaggctgaagagacgatggaatgccttcaggagttccctgaacatcataaaatgatcctcgaccgattgaatgaacagcgagagcaggaccggtttactgacatcaccctaattgtcgacggacaccattttaaggctcacaaggctgttttggctgcttgtagtaagttcttctacaaattctttcaggagtttacccaagaaccattggtggagatagaaggtgttagtaaaatggcctttcgccatttaattgagttcacatatacagcaaaattaatgatacaaggagaagaagaagccaatgatgtatggaaagcagcagagtttctacaaatgctagaagctatcaaagcccttgaagtcaggaacaaagaaaactcagctcccttagaggaaaataccacaggaaaaaatgaggccaaaaaaaggaagattgcagaaacttcaaatgttatcactgagtcattgccatctgcagaatcagaacctgttgaaattgaggtagagattgccgaaggcaccattgaagtggaagatgaaggcatcgaaacattagaggaagtggcttctgccaagcagtccgtaaagtacatacagagcacaggttcctctgatgattctgctctagcactgttggcagatattaccagcaagtaccgtcaaggtgacagaaaagggcagattaaagaagatggctgtccatctgaccccacgagcaaacaggtagaaggtattgaaattgtggaacttcagctgtcacatgtgaaggacttgttccattgtgagaaatgtaaccgttcatttaaattgttttaccattttaaggagcacatgaaatcacactccactgagagtttcaagtgtgaaatatgcaataaacgatatcttcgagagagcgcatggaaacagcacctaaattgttaccaccttgaagaaggtggagtcagtaagaagcaaagaactgggaaaaaaattcatgtatgtcagtactgtgagaaacagtttgaccattttggacattttaaagaacatcttcgaaaacatacaggtgaaaaaccttttgaatgtccaaattgtcatgaacgatttgctagaaatagcactctgaaatgtcacctcactgcatgccaaactggagtaggggcaaaaaaaggaaggaagaagctctacgaatgccaggtctgcaacagtgtgtttaacagctgggaccagttcaaagatcacttggtaatacacactggagataaacccaaccattgtactttatgtgatttgtggtttatgcaaggaaatgaattaaggaggcatctcagtgatgctcacaatatttcagagcgtctagtaacggaagaagttctttcagtagaaacacgtgtgcaaactgaacctgtaacatcaatgactattatagaacaagttgggaaggtgcatgtgctaccattgcttcaggttcaggtggattcagcacaagtgactgtggaacaagtccatccagatctgctccaggacagccaggtgcacgattcacacatgagtgagcttccagagcaggtccaagtgagttatctagaagtgggccgaattcagactgaagaaggtactgaagtacatgtagaggagctgcatgttgaacgggtcaatcaaatgccagtggaagtacaaactgaacttctagaagcagatttggaccacgtgaccccagaaatcatgaaccaagaggagagagagtctagccaagcagatgctgctgaggctgccagggaagatcacgaagatgctgaggatttagagaccaagccaacagtggattctgaagcagaaaaggcagagaatgaggacagaacagctctgccagttttagaatagtaatgaactagtccgtaacttgaaagtatttcgatttcttggctttatatatcttgtggaaaggacgagtgggcagatcactgttgtaaacg

SEQ ID NO: 840 - DNA, 1871 bp, Homo sapiens
  source 1..1871: mol_type = genomic DNA
accgccaccatggaggctgaagagacgatggaatgccttcaggagttccctgaacatcataaaatgatcctcgaccgattgaatgaacagcgagagcaggaccggtttactgacatcaccctaattgtcgacggacaccattttaaggctcacaaggctgttttggctgcttgtagtaagttcttctacaaattctttcaggagtttacccaagaaccattggtggagatagaaggtgttagtaaaatggcctttcgccatttaattgagttcacatatacagcaaaattaatgatacaaggagaagaagaagccaatgatgtatggaaagcagcagagtttctacaaatgctagaagctatcaaagcccttgaagtcaggaacaaagaaaactcagctcccttagaggaaaataccacaggaaaaaatgaggccaaaaaaaggaagattgcagaaacttcaaatgttatcactgagtcattgccatctgcagaatcagaacctgttgaaattgaggtagagattgccgaaggcaccattgaagtggaagatgaaggcatcgaaacattagaggaagtggcttctgccaagcagtccgtaaagtacatacagagcacaggttcctctgatgattctgctctagcactgttggcagatattaccagcaagtaccgtcaaggtgacagaaaagggcagattaaagaagatggctgtccatctgaccccacgagcaaacaggagcacatgaaatcacactccactgagagtttcaagtgtgaaatatgcaataaacgatatcttcgagagagcgcatggaaacagcacctaaattgttaccaccttgaagaaggtggagtcagtaagaagcaaagaactgggaaaaaaattcatgtatgtcagtactgtgagaaacagtttgaccattttggacattttaaagaacatcttcgaaaacatacaggtgaaaaaccttttgaatgtccaaattgtcatgaacgatttgctagaaatagcactctgaaatgtcacctcactgcatgccaaactggagtaggggcaaaaaaaggaaggaagaagctctacgaatgccaggtctgcaacagtgtgtttaacagctgggaccagttcaaagatcacttggtaatacacactggagataaacccaaccattgtactttatgtgatttgtggtttatgcaaggaaatgaattaaggaggcatctcagtgatgctcacaatatttcagagcgtctagtaacggaagaagttctttcagtagaaacacgtgtgcaaactgaacctgtaacatcaatgactattatagaacaagttgggaaggtgcatgtgctaccattgcttcaggttcaggtggattcagcacaagtgactgtggaacaagtccatccagatctgctccaggacagccaggtgcacgattcacacatgagtgagcttccagagcaggtccaagtgagttatctagaagtgggccgaattcagactgaagaaggtactgaagtacatgtagaggagctgcatgttgaacgggtcaatcaaatgccagtggaagtacaaactgaacttctagaagcagatttggaccacgtgaccccagaaatcatgaaccaagaggagagagagtctagccaagcagatgctgctgaggctgccagggaagatcacgaagatgctgaggatttagagaccaagccaacagtggattctgaagcagaaaaggcagagaatgaggacagaacagctctgccagttttagaatagtaatgaactagtccgtaacttgaaagtatttcgatttcttggctttatatatcttgtggaaaggacgagaccgagtcaacaggttccgtaaa

SEQ ID NO: 841 - DNA, 8258 bp, Homo sapiens
  source 1..8258: mol_type = genomic DNA
accgccaccatgcctcgaactaaacaaattcatcccagaaatctaagagacaaaattgaagaagcacaaaaagaacttaatggggcagaagtttcaaaaaaagaaatcttacaggctggtgttaaaggaacttcggaatcccttaaaggtgtgaaacgcaaaaagatcgtagctgagaatcacctgaaaaaaataccaaaatccccactgagaaatcctcttcaggcaaaacataaacaaaatacagaagagtcatctttcgccgttcttcatagtgcttcggagtctcacaagaaacagaattatattcctgtaaaaaatgggaagcagtttaccaaacaaaatggagaaacacctggaataattgctgaagcctcaaaatctgaagaatctgtctccccaaagaagcccttgtttctgcagcaaccatctgaactgcgtagatggagatccgaaggcgctgatcctgccaaattcagtgacctcgatgaacaatgtgactcaagttccttgtcaagtaaaaccaggactgacaatagcgaatgcatctcttctcattgtggcactacgtccccctcctatacaaacactgcattcgatgtcttactgaaagcaatggagccagaactgagcaccttgtcacaaaagggctcaccttgtgcaattaagacagaaaaactgaggccaaataaaactgcacgttcccctcccaaattaaaaaacagttcaatggatgccccaaatcagacttcacaggaattggttgctgaatcacagtcttcttgtacctcatacacagtccatatgtctgctgctcagaagaatgagcaaggggcaatgcagtcagcttctcatttgtatcatcaacatgaacactttgttcccaaatccaaccaacataatcaacagcttccggggtgttcaggtttcacaggatcactgacaaatctgcaaaatcaagagaatgccaaacttgaacaggtttataatatagcagtgacatcatctgtaggcctaacttcaccttccagtagatctcaggttactcctcaaaaccagcaaatggattctgcttcacctttgtcaataagtccggctaattctacacagtcgccccccatgccaatctataattcaactcatgttgcctctgttgttaatcaaagcgtagagcaaatgtgcaatcttcttctgaaagatcagaagccaaaaaaacaaggaaaatatatttgtgagtattgcaatagagcatgtgcaaagcctagtgtgcttttaaagcatatccgctcccacactggagagcgaccctatccctgtgtgacttgtggattttcatttaagactaaaagtaatctgtataagcacaagaaatcccacgcacatactatcaaactgggtcttgtcttgcaaccagatgctggtggcttgttcttgtcccacgagtcccccaaagcacttagtattcattcagacgtagaagacagtggggagagcgaggaggaaggcgccactgatgagagacagcatgacctgggcgccatggagctgcagcctgtgcacataataaagaggatgtcaaatgctgaaactttactaaaatcaagcttcactccaagcagtccagaaaatgtgataggtgactttttgctacaggacagatctgcagaatcacaagctgtgacagagttaccgaaagttgtggtccaccatgtcactgtgtcccccttaagaactgacagtccaaaggccatggatcccaagcctgaactttctagtgcacaaaagcagaaggaccttcaggtgacaaacgtacagccactttcagccaacatgtcccagggtggagtctccaggttggagactaatgagaattcccaccagaaaggcgacatgaatccactggaaggaaagcaagactctcacgtaggaacggtacacgcccagctacaaaggcagcaggctaccgattactcccaagagcagcaaggaaagctcctgagtcctcgaagtttaggaagtacggattctggttacttttcacgttctgaaagtgccgatcaaacagtgagtccaccaactccctttgccagaaggttacccagcacagaacaagactctggaaggagtaacggaccctctgcagctcttgtcaccacgtcaacaccctctgctttgcccacaggggaaaaggcattgcttttaccaggtcagatgcgcccacctttggccacaaaaacacttgaggagcggatatcgaagcttatctcagacaatgaagctttggtagatgacaagcaactggatagtgtgaagccgcggagaacctcactgtcaagacgaggaagcattgattcccccaaatcatacatatttaaagattctttccagtttgatttaaaaccagtgggacggagaacaagttcaagctctgatataccgaagtcacctttcacccctactgaaaaatcaaagcaagtgtttcttctgtctgtaccttcacttgactgtttacctatcacaagaagtaattccatgccgaccacaggttattcagcagtacctgcaaatataatacctcctcctcatccactaagaggaagtcagtcatttgatgacaaaattggcgctttctatgatgatgtctttgtatcgggacctaacgctcctgtgccccagagtgggcatccccgtacacttgtgagacaagcagccatagaagactcttcagcaaatgaaagtcatgttcttggtactggacagtccctggatgagagccaccaaggatgccatgctgctggtgaagccatgtcagtgaggagcaaggcactggcacaaggcccacatatagaaaaaaagaagtctcatcaagggcgagggacaatgtttgagtgtgaaacttgtagaaacaggtataggaaactggaaaattttgaaaatcataagaaattttactgttctgagttacatggaccaaaaacaaaggtagccatgagagaacctgagcacagccctgtgcccggcggtctgcagcctcagattctacactacagagtcgctgggtcctccggcatctgggaacagacgccccagataagaaaaaggaggaaaatgaaaagtgttggggatgatgaagaacttcagcaaaatgaaagtggaacatctccaaaaagttctgaaggccttcagtttcagaatgctctgggctgtaatcccagtttgcctaaacataatgttaccataagaagtgaccagcagcataaaaatatacagttgcaaaactcccatattcaccttgttgccaggggccctgagcagaccatggatcccaagctgtcgaccatcatggaacaacagataagttcagcagcccaggacaagatagaactgcagagacacggaactggaatctctgtcatccagcacaccaactccctgagcaggcccaactcatttgacaagcctgagccttttgaaagagcctccccagtttctttccaggagctgaatagaacggggaagtccgggtctctaaaagtgataggaatctcccaagaggaaagtcacccttctcgggacgggtctcatcctcaccagcttgcactatcagacgctctcagaggagaacttcaggaaagctccagaaagagtccaagtgaacgacatgtgttaggacagccctcaagacttgtccggcagcacaacatccaagttccagagattttggtcacagaagaaccagatcgagacctggaagctcaatgccatgatcaagaaaagtcagagaagttcagttggccccagcgtagtgaaaccttgtcaaaattgccaacagagaaactgccacccaaaaagaaaaggctccgtctggctgagatagaacattcctcaacagaatcgagctttgattccactctctccaggagtctaagtagggagagcagtttatctcacacttcaagtttctcagcctctttagacatagaggacgtttctaaaacggaggcttcccccaaaatcgattttctaaataaagccgagtttcttatgattccagctggcttgaatactctgaatgttcctggatgtcaccgggaaatgaggcgtactgcatcagaacagattaattgcacgcaaacgtcaatggaggtctctgatctcagaagcaaatcattcgattgtggaagcatcaccccaccccagacaacaccacttactgaattgcagcctccatcttcaccttctcgagtgggagtgactgggcatgtgcctctcttagaaagaaggagaggcccactggtacggcaaatatctttaaacatagccccagatagtcatctgtctcctgtacacccaacatctttccaaaatactgctcttcccagtgtgaatgcagtgccatatcaggggcctcagctcactagtacatctttagctgagttttctgcaaatactttgcactctcagactcaggttaaggatctgcaggcagaaacatcaaactccagctctaccaacgtttttcctgttcaacagctctgtgatatcaatttgttaaatcaaatccatgcaccgcctagccaccagagcacacagctatctctgcaagtgtctacgcagggtagcaagccagataaaaattctgttttatctgggtcttctaaaagtgaggattgctttgctcccaaataccaattgcattgtcaggttttcacttcaggcccatcttgctcttctaatcctgtgcattctttgccaaatcaagttatttcagatccagttggaacagatcattgtgtgacatcagcaacattaccaaccaaattaattgacagcatgtctaattcgcatcctctgctaccaccagagctcaggccccttggaagtcaggtgcagaaggtgccatcatcattcatgctgcccatacgcctgcagagtagtgttcctgcttactgttttgctacactcacatccctgccacaaatactagtgacccaagatctgcccaatcagccaatttgccagactaatcatagtgtagtgccaatcagtgaagaacaaaattctgtgccaacattacaaaaaggtcatcagaatgctttgccaaacccagagaaggaatttctatgtgaaaatgttttttcagagatgagccaaaattcttctctatcagaatccttgcccataactcagaaaatatctgttggtcgactttcccctcaacaagaatcttcagcttcgagtaaaaggatgctttccccagcaaatagtttagacattgccatggaaaagcaccagaagcgggccaaagatgaaaatggagctgtttgtgcaacagacgtgagacctttagaggctttgagttcgagagttaatgaagctagtaaacagaagaagcctattttagtgagacaggtttgtactacagagcccctggacggtgtgatgttggaaaaggatgttttttctcaacctgaaattagtaatgaggctgttaatttgacaaatgttttaccagctgataattcatcaacaggatgctctaaatttgtcgttatagaacctataagtgaattgcaggaatttgaaaacatcaagtcatccacatcattaactcttacagttcgaagttcacctgctccttcagaaaatactcatatttctcctttgaaatgtacagacaataaccaagaaaggaagtctccaggggttaaaaatcaaggtgacaaagtgaacatccaagagcaaagtcaacagccagtcacttctctttcattgtttaacatcaaggacacccagcagctggctttccctagcctgaaaactacaaccaactttacatggtgttatctcttaaggcagaagtcgttgcatttgcctcagaaggaccagaaaacttcagcctatactgattggacagtaagcgccagtaatccaaatccactcggtttgcccacaaaagttgcacttgctctccttaattcaaaacagaacactggaaaatcactatactgtcaagcaataactacccattccaagtcagacttattggtctattcaagcaagtggaaaagcagcttaagcaagagagcattaggtaatcaaaagtccacagtagttgaattcagcaataaagatgcctctgaaattaacagtgagcaagataaagaaaattccttaatcaaaagtgaaccaagaagaattaaaatatttgatggaggatataagtcaaatgaagagtatgtatatgtccgaggcaggggaagaggaaaatacatttgtgaagaatgtggaatacgttgtaagaaacctagcatgttaaagaaacacatacgaacccatacagatgtccgcccctaccactgcacttactgtaacttctcctttaagactaaaggaaatctgacaaaacacatgaagtccaaggcacatagcaagaaatgtgtggatttaggcgtctcagtaggtttaatagatgaacaggatacagaagaatcagatgaaaaacagagattcagttatgagcgatctggatatgatcttgaagaatctgatggcccagatgaggatgacaatgaaaatgaagacgatgatgaggacagccaggctgaatcagtcctgtcagccacaccctcagtcacagctagcccgcagcaccttccatctagaagtagccttcaggaccctgtgagtactgacgaggatgtcaggatcaccgattgcttttctggggtacacacggacccaatggacgttctgcccagggcgctgctcaccagaatgactgtcctgagcacagcacagtctgactacaataggaagacactctctccggggaaggccaggcagcgtgctgcgagagatgaaaacgacacaattccgtctgtagacacttccaggtccccgtgtcatcagatgtctgtggactaccctgagtcagaagaaattctgagaagttctatggcaggaaaagctgttgctataacacagagcccatcatctgtaagacttcctcctgctgcagctgagcacagcccccagacagcagcggggatgccttctgtggcctcaccacatcctgaccctcaagaacagaagcagcaaataactctacagccgactccaggcttgccttctccccacactcatttgtttagccaccttcctttgcattcccagcagcaatcgaggacaccttataatatggttccagttggggggatccatgtggtacctgctggcctcacatactccacgtttgtgccccttcaggctggaccagtgcagctcacgatccctgctgtcagtgtcgttcacagaactttgggtactcataggaatacggtcacagaagtgtctggcactacaaaccctgctggagtggctgaattaagcagtgttgtgccatgtattcctatcggccaaatccgcgtgccaggccttcagaacctaagtaccccaggcttgcagtcactcccctcgttaagcatggaaaccgtcaatattgtaggcctagccaatacaaatatggccccacaagtccatccaccaggactggctctgaatgctgtcggactgcaggttctgactgcaaacccttcatcacaaagcagccccgcccctcaggcacacattccaggtctccagatcttgaacatagcattgcccaccttaatcccctcagtcagtcaagtagccgttgatgcacagggagctccagaaatgccagcttcccaaagcaaagcatgcgagacacaacccaagcagacttctgtagccagcgcaaaccaggtcagcaggaccgagtctcctcaggggttacctacagtccagcgggaaaatgcaaaaaaagttctgaatccacctgcccctgcaggtgaccatgcaaggcttgatggcctgagtaaaatggacacagagaaggctgcctcggcaaatcacgtgaagcccaagcctgaactcacttccatacagggccaaccagcgtccacgtcacaacctctgctgaaggcacattctgaagtttttacaaagccctcaggccagcagactctctctccagacagacaggttcccaggcccacagcactaccgcggaggcagcccactgtgcacttcagcgacgtgagcagcgatgatgacgaggacaggcttgtgatagcaacctagtaatgaactagtccgtaacttgaaagtatttcgatttcttggctttatatatcttgtggaaaggacgatctgcatacattacggtgttgtac

SEQ ID NO: 842 - DNA, 7319 bp, Homo sapiens
  source 1..7319: mol_type = genomic DNA
accgccaccatggatcctgaacaaagtgtcaagggcaccaagaaggctgagggaagtccccggaagcggctgaccaaaggagaggccattcagaccagtgtttcttccagcgtcccatacccaggcagcggcacagctgccacccaagagagccccgcccaagagctcttagccccgcagcccttcccgggcccctcatcagttcttagggaaggctctcaggagaaaacgggccagcagcagaagccccccaaaaggccccccatcgaagcatccgtccacatctcacagcttccgcagcaccctctgacaccagcattcatgtcgcctggcaaacctgagcatctcctggaggggtccacatggcaactggttgaccccatgagacctggaccctctggctccttcgtggcccctgggctccatcctcagagccagctccttccttcccacgcttccatcattccccccgaggaccttcctggagtccccaaagtcttcgtgcctcgtccttcccaggtctccttgaagcccacagaagaggcacacaagaaggagaggaagccccagaagccaggcaagtacatctgccagtactgcagccggccctgtgccaagcccagcgtgctccagaagcacattcgctcacacacaggtgagaggccctacccctgcggcccctgtggcttctccttcaagaccaagagtaatctctacaagcacaggaagtcccatgcccaccgcatcaaagcaggcctggcctcaggcatgggtggcgagatgtacccacatgggctggagatggagcggatccctggggaagagtttgaggagcccactgagggagaaagcacagattctgaagaggagactagtgccacctctggtcaccctgcagagctctccccaagacccaagcagccccttctctccagcgggctatacagctctgggagccacagttccagccacgaacgctgttccctgtcccagtccagcacagcccagtcactcgaagacccccctccatttgtggaaccctcatctgagcaccccctgagccataaacctgaagacacccacacgattaagcagaagctggccctccgcttaagcgagaggaagaaggtgatcgatgagcaggcgtttctgagcccaggcagcaaagggagtactgagtctgggtatttctctcgctccgagagtgcagagcagcaggtcagccccccaaacaccaacgccaagtcctacgctgagatcatctttggcaagtgtgggcgaataggacagcggaccgccatgctgacagccacctccacccagcccctcctgcccctgtccaccgaagacaagcccagcctggtgcctttgtctgtaccccggacgcaggtgatcgagcacatcacgaagctcatcaccatcaacgaggccgtggtggacaccagcgagatcgacagcgtgaagccaaggcggagctcactgtccaggcgcagcagcatggagtccccaaaatccagcctctaccgggagcccctgtcatcccacagtgagaaaaccaagcctgaacaatcactgctgagcctccagcacccgcccagtaccgccccccctgtgcctctcctgagaagccactcaatgccttctgccgcctgcactatcagcaccccccaccaccccttccgaggtagctactccttcgatgaccatatcaccgactccgaagccctgagccacagcagtcacgtgtttacctcccacccccggatgctgaagcgccagccggcaatcgaattacctttgggaggggaatacagttctgaggagcctggcccaagcagcaaagacacagcctccaagccctcggacgaagtggaacccaaggaaagcgagcttaccaaaaagaccaagaagggtttgaaaacaaaaggggtgatctacgaatgtaacatatgtggtgctcggtacaagaaaagggataactacgaagcccacaaaaaatactactgctcagagcttcagatcgcaaagcccatctctgcaggcacccacacatctccagaagctgaaaagagtcagattgagcatgagccgtggtcccaaatgatgcattacaaactgggaaccaccctggaactcactccactgaggaagaggaggaaagagaagagccttggggacgaggaagagccacctgcctttgagtccacaaaaagtcagtttggcagccccgggccatctgatgctgctcggaaccttcccctggagtccaccaagtcaccagcagaaccaagtaaatcagtgccctccttggagggacccacgggcttccagccaaggactcccaagccagggtccggttcagaatcagggaaggagaggagaacaacgtccaaagaaatttctgtcatccagcacaccagctcctttgagaaatctgattctctcgagcagccgagtggcttggaaggggaagacaaacctctggcccagttcccatcacccccacctgccccacacggacgctctgctcactccctgcagcctaagttggtccgccagcccaacattcaggttcctgagatcctagtaactgaggagcctgaccggccggacacagagccagagccgccccctaaggaacctgagaagactgaggagttccaatggccccagcgcagccagacacttgcccagctcccagctgagaagctgccacccaaaaagaagaggttgcgcctggcagagatggcccaatcatcaggggagtccagcttcgagtcctctgtgcctctgtctcgcagcccgagccaggaaagcaatgtctctttgagtgggtccagccgctcagcctcgtttgagagggatgaccatgggaaagccgaggcccccagtccctcatctgacatgcgccccaaacccctgggcacccacatgttgactgtccccagccaccacccacatgcccgagagatgcggaggtcagcctcagagcagagccccaacgtttcccattctgcccacatgaccgagacacgcagcaaatcctttgactatggcagcttgtccttgacaggcccttctgctccagccccagtggctccaccagcgcgggtggccccgccagagagaagaaaatgcttcttggtgagacaggcctctctgagcaggcctccagaatctgagttggaggttgcccccaagggaagacaggagagcgaagaaccacagccctcatccagtaaaccctctgccaaaagctcattgtcccagatttcctctgcggccacctcacatggtggacccccgggaggcaagggcccagggcaggacaggcccccattggggcccactgtgccctacacagaagcactgcaagtgttccaccaccccgttgcccagacacccctgcatgagaagccatacctgcccccaccagtctcccttttctccttccagcatctcgtgcagcatgagccaggacagtctccagaattcttctccacccaggccatgtccagcctcctgtcctcaccatactccatgcccccacttcctccctccttatttcaagccccaccgcttcctctccagcctactgttctgcacccaggccaactccatctcccccagctcatgcctcacccagccaacatccccttcaggcagcccccttccttcctccccatgccatacccgacctcctcagcactgtcttctgggtttttcctgcctctgcaatcccagtttgcacttcagctccctggtgatgtggaaagccatctgccccagatcaaaaccagcctggccccactggcaacaggaagtgctggcctctcccccagcacagagtacagcagtgacatccggctaccccctgtggctcccccagccagctcctcagcacctacatcagctcctccactggccctgcctgcctgtccagacaccatggtgtccctggttgtgcctgtccgtgttcagaccaatatgccgtcctatgggagcgcaatgtacaccaccctttcccagatcttggtcacccagtcccaaggcagctcagcaactgtggcacttcccaagtttgaggaacccccatcaaaggggacgactgtatgtggtgcagatgtgcatgaggttgggcccggcccttctgggttaagtgaagagcaaagcagagctttcccaactccatacctgagagtgcctgtgacattacctgaaagaaaaggcacttccctgtcatcagagagtatcttgagcctggaggggagttcatcaacagcagggggaagcaaacgtgtcctttcaccagctggcagccttgaacttaccatggaaacccagcagcaaaaaagagtgaaggaggaggaggcttccaaggcagatgaaaaacttgagctggtaaaaccatgcagtgtggtccttaccagcaccgaggatgggaagaggccagagaaatcccacttaggcaaccagggccaaggcaggagggagctagaaatgctgtccagcctgtcctcagatccatctgacacaaaggaaattcctcccctccctcaccctgcattgtcccatgggacagccccaggctcagaagctttgaaggaatatccccagccatctggcaaacctcaccgaagagggttgaccccactgagcgtgaagaaagaagattccaaggaacaacctgatctcccctccttggcacctccgagctctctgcctctgtcagaaacgtcctccagaccagccaagtcacaagaaggtacggactcaaagaaggtactgcagttccccagcctccacacaaccactaatgtcagttggtgctatttaaactacattaagccaaatcacatccagcatgcagataggaggtcctctgtttacgctggttggtgcataagtttgtacaaccccaaccttccgggggtttccactaaagctgctttgtccctcctgaggtctaagcagaaagtgagcaaagagacatacaccatggccacagctccgcatcctgaggcaggaaggcttgtgccatccagctcccgcaagccccgcatgacagaggttcacctcccttcactggtttccccggaaggccagaaagatctagctagagtggagaaggaagaagagaggagaggggagccggaggaggatgctcctgcctcccagagaggggagccggcgaggatcaaaatcttcgaaggagggtacaaatcaaacgaagagtatgtatatgtgcgaggccgcggccgagggaaatatgtttgtgaggagtgtggaattcgctgcaagaagcccagcatgctgaagaaacacatccgcacccacactgacgtccggccctatgtgtgcaagcactgtcactttgcttttaaaaccaaagggaatctgactaagcacatgaagtcgaaggcccacagcaaaaagtgccaagagacaggggtgctggaggagctggaagccgaagaaggaaccagtgacgacctgttccaggactcggaaggacgagagggttcagaggctgtggaggagcaccagttttcggacctggaggactcggactcagactcagacctggacgaagacgaggatgaggatgaggaggagagccaggatgagctgtccagaccatcctcagaggcgcccccgcctggcccaccacatgcactgcgggcagactcctcacccatcctgggccctcagcccccagatgcccccgcctctggcacggaggctacacgaggcagctcggtctcggaagctgagcgcctgacagccagcagctgctccatgtccagccagagcatgccgggcctcccctggctgggaccggcccctctgggctctgtggagaaagacacaggctcagccttgagctacaagcctgtgtccccaagaagaccgtggtccccaagcaaagaagcaggcagccgtccaccactagcccgcaaacactcgctaaccaaaaacgactcatctccccagcgatgctccccggcccgagaaccacaggcctcagccccaagcccacctggcctgcacgtggacccaggaaggggcatgggcgctctcccttgtgggtctccaagacttcagctgtctcctctcaccctctgccccctgggaagagaactggcccctcgagcacatgtgctctccaaactcgagggtaccaccgacccaggcctccccagatactcgcccaccaggagatggtctccaggtcaggccgagtcaccaccacggtcagcgccgccagggaagtgggccttggctgggccgggcagcccctcagcgggggagcatggcccaggcttggggctggacccacgggttctcttcccgcccgcgcctctacctcacaagctcctcagcagaagcccagagacctgcgcctccccgtggaaggccgagtcccgaagtccctcctgctcacccggccctgctcatcctctctcctcccgacccttctccgccctccatgacttccacggccacatcctggcccggacagaggagaacatcttcagccacctgcctctgcactcccagcacttgacccgtgccccatgtcccttgattcccatcggtgggatccagatggtgcaggcccggccaggagcccaccccaccctgctgccagggcccaccgcagcctgggtcagtggcttctccgggggtggcagcgacctgacaggggcccgggaggcccaggagcgaggccgctggagtcccactgagagctcgtcagcctccgtgtcgcctgtggctaaggtctccaaattcacactctcctcagagctggagggcggggactaccccaaggagagggagaggaccggcggaggcccgggcaggcctcctgactggacaccccatgggaccggggcacctgcagagcccacacccacgcacagcccctgcaccccacccgacaccttgccccggccgccccagggacgccgggcagcgcagtcctggagcccccgcttggagtccccgcgtgcaccgaccaaccccgagccttctgccaccccgccgctggaccgcagcagctctgtgggctgcctggcagaggcctctgcccgcttcccagcccggacgaggaacctctccggggaacccaggaccaggcaggactcccccaagccctcaggaagtggggagcccagggcacatccacatcagcctgaggacagggttccccccaacgcttagtaatgaactagtccgtaacttgaaagtatttcgatttcttggctttatatatcttgtggaaaggacgaggcggtatttgctggcattgttga

SEQ ID NO: 843 - DNA, 7322 bp, Homo sapiens
  source 1..7322: mol_type = genomic DNA
accgccaccatggatcctgaacaaagtgtcaagggcaccaagaaggctgagggaagtccccggaagcggctgaccaaaggagaggccattcagaccagtgtttcttccagcgtcccatacccaggcagcggcacagctgccacccaagagagccccgcccaagagctcttagccccgcagcccttcccgggcccctcatcagttcttagggaaggctctcaggagaaaacgggccagcagcagaagccccccaaaaggccccccatcgaagcatccgtccacatctcacagcttccgcagcaccctctgacaccagcattcatgtcgcctggcaaacctgagcatctcctggaggggtccacatggcaactggttgaccccatgagacctggaccctctggctccttcgtggcccctgggctccatcctcagagccagctccttccttcccacgcttccatcattccccccgaggaccttcctggagtccccaaagtcttcgtgcctcgtccttcccaggtctccttgaagcccacagaagaggcacacaagaaggagaggaagccccagaagccaggcaagtacatctgccagtactgcagccggccctgtgccaagcccagcgtgctccagaagcacattcgctcacacacaggtgagaggccctacccctgcggcccctgtggcttctccttcaagaccaagagtaatctctacaagcacaggaagtcccatgcccaccgcatcaaagcaggcctggcctcaggcatgggtggcgagatgtacccacatgggctggagatggagcggatccctggggaagagtttgaggagcccactgagggagaaagcacagattctgaagaggagactagtgccacctctggtcaccctgcagagctctccccaagacccaagcagccccttctctccagcgggctatacagctctgggagccacagttccagccacgaacgctgttccctgtcccagtccagcacagcccagtcactcgaagacccccctccatttgtggaaccctcatctgagcaccccctgagccataaacctgaagacacccacacgattaagcagaagctggccctccgcttaagcgagaggaagaaggtgatcgatgagcaggcgtttctgagcccaggcagcaaagggagtactgagtctgggtatttctctcgctccgagagtgcagagcagcaggtcagccccccaaacaccaacgccaagtcctacgctgagatcatctttggcaagtgtgggcgaataggacagcggaccgccatgctgacagccacctccacccagcccctcctgcccctgtccaccgaagacaagcccagcctggtgcctttgtctgtaccccggacgcaggtgatcgagcacatcacgaagctcatcaccatcaacgaggccgtggtggacaccagcgagatcgacagcgtgaagccaaggcggagctcactgtccaggcgcagcagcatggagtccccaaaatccagcctctaccgggagcccctgtcatcccacagtgagaaaaccaagcctgaacaatcactgctgagcctccagcacccgcccagtaccgccccccctgtgcctctcctgagaagccactcaatgccttctgccgcctgcactatcagcaccccccaccaccccttccgaggtagctactccttcgatgaccatatcaccgactccgaagccctgagccacagcagtcacgtgtttacctcccacccccggatgctgaagcgccagccggcaatcgaattacctttgggaggggaatacagttctgaggagcctggcccaagcagcaaagacacagcctccaagccctcggacgaagtggaacccaaggaaagcgagcttaccaaaaagaccaagaagggtttgaaaacaaaaggggtgatctacgaatgtaacatatgtggtgctcggtacaagaaaagggataactacgaagcccacaaaaaatactactgctcagagcttcagatcgcaaagcccatctctgcaggcacccacacatctccagaagctgaaaagagtcagattgagcatgagccgtggtcccaaatgatgcattacaaactgggaaccaccctggaactcactccactgaggaagaggaggaaagagaagagccttggggacgaggaagagccacctgcctttgagtccacaaaaagtcagtttggcagccccgggccatctgatgctgctcggaaccttcccctggagtccaccaagtcaccagcagaaccaagtaaatcagtgccctccttggagggacccacgggcttccagccaaggactcccaagccagggtccggttcagaatcagggaaggagaggagaacaacgtccaaagaaatttctgtcatccagcacaccagctcctttgagaaatctgattctctcgagcagccgagtggcttggaaggggaagacaaacctctggcccagttcccatcacccccacctgccccacacggacgctctgctcactccctgcagcctaagttggtccgccagcccaacattcaggttcctgagatcctagtaactgaggagcctgaccggccggacacagagccagagccgccccctaaggaacctgagaagactgaggagttccaatggccccagcgcagccagacacttgcccagctcccagctgagaagctgccacccaaaaagaagaggttgcgcctggcagagatggcccaatcatcaggggagtccagcttcgagtcctctgtgcctctgtctcgcagcccgagccaggaaagcaatgtctctttgagtgggtccagccgctcagcctcgtttgagagggatgaccatgggaaagccgaggcccccagtccctcatctgacatgcgccccaaacccctgggcacccacatgttgactgtccccagccaccacccacatgcccgagagatgcggaggtcagcctcagagcagagccccaacgtttcccattctgcccacatgaccgagacacgcagcaaatcctttgactatggcagcttgtccttgacaggcccttctgctccagccccagtggctccaccagcgcgggtggccccgccagagagaagaaaatgcttcttggtgagacaggcctctctgagcaggcctccagaatctgagttggaggttgcccccaagggaagacaggagagcgaagaaccacagccctcatccagtaaaccctctgccaaaagctcattgtcccagatttcctctgcggccacctcacatggtggacccccgggaggcaagggcccagggcaggacaggcccccattggggcccactgtgccctacacagaagcactgcaagtgttccaccaccccgttgcccagacacccctgcatgagaagccatacctgcccccaccagtctcccttttctccttccagcatctcgtgcagcatgagccaggacagtctccagaattcttctccacccaggccatgtccagcctcctgtcctcaccatactccatgcccccacttcctccctccttatttcaagccccaccgcttcctctccagcctactgttctgcacccaggccaactccatctcccccagctcatgcctcacccagccaacatccccttcaggcagcccccttccttcctccccatgccatacccgacctcctcagcactgtcttctgggtttttcctgcctctgcaatcccagtttgcacttcagctccctggtgatgtggaaagccatctgccccagatcaaaaccagcctggccccactggcaacaggaagtgctggcctctcccccagcacagagtacagcagtgacatccggctaccccctgtggctcccccagccagctcctcagcacctacatcagctcctccactggccctgcctgcctgtccagacaccatggtgtccctggttgtgcctgtccgtgttcagaccaatatgccgtcctatgggagcgcaatgtacaccaccctttcccagatcttggtcacccagtcccaaggcagctcagcaactgtggcacttcccaagtttgaggaacccccatcaaaggggacgactgtatgtggtgcagatgtgcatgaggttgggcccggcccttctgggttaagtgaagagcaaagcagagctttcccaactccatacctgagagtgcctgtgacattacctgaaagaaaaggcacttccctgtcatcagagagtatcttgagcctggaggggagttcatcaacagcagggggaagcaaacgtgtcctttcaccagctggcagccttgaacttaccatggaaacccagcagcaaaaaagagtgaaggaggaggaggcttccaaggcagatgaaaaacttgagctggtaaaaccatgcagtgtggtccttaccagcaccgaggatgggaagaggccagagaaatcccacttaggcaaccagggccaaggcaggagggagctagaaatgctgtccagcctgtcctcagatccatctgacacaaaggaaattcctcccctccctcaccctgcattgtcccatgggacagccccaggctcagaagctttgaaggaatatccccagccatctggcaaacctcaccgaagagggttgaccccactgagcgtgaagaaagaagattccaaggaacaacctgatctcccctccttggcacctccgagctctctgcctctgtcagaaacgtcctccagaccagccaagtcacaagaaggtacggactcaaagaaggtactgcagttccccagcctccacacaaccactaatgtcagttggtgctatttaaactacattaagccaaatcacatccagcatgcagataggaggtcctctgtttacgctggttggtgcataagtttgtacaaccccaaccttccgggggtttccactaaagctgctttgtccctcctgaggtctaagcagaaagtgagcaaagagacatacaccatggccacagctccgcatcctgaggcaggaaggcttgtgccatccagctcccgcaagccccgcatgacagaggttcacctcccttcactggtttccccggaaggccagaaagatctagctagagtggagaaggaagaagagaggagaggggagccggaggaggatgctcctgcctcccagagaggggagccggcgaggatcaaaatcttcgaaggagggtacaaatcaaacgaagagtatgtatatgtgcgaggccgcggccgagggaaatatgtttgtgaggagtgtggaattcgctgcaagaagcccagcatgctgaagaaacacatccgcacccacactgacgtccggccctatgtgtgcaagcactgtcactttgcttttaaaaccaaagggaatctgactaagcacatgaagtcgaaggcccacagcaaaaagtgccaagagacaggggtgctggaggagctggaagccgaagaaggaaccagtgacgacctgttccaggactcggaaggacgagagggttcagaggctgtggaggagcaccagttttcggacctggaggactcggactcagactcagacctggacgaagacgaggatgaggatgaggaggagagccaggatgagctgtccagaccatcctcagaggcgcccccgcctggcccaccacatgcactgcgggcagactcctcacccatcctgggccctcagcccccagatgcccccgcctctggcacggaggctacacgaggcagctcggtctcggaagctgagcgcctgacagccagcagctgctccatgtccagccagagcatgccgggcctcccctggctgggaccggcccctctgggctctgtggagaaagacacaggctcagccttgagctacaagcctgtgtccccaagaagaccgtggtccccaagcaaagaagcaggcagccgtccaccactagcccgcaaacactcgctaaccaaaaacgactcatctccccagcgatgctccccggcccgagaaccacaggcctcagccccaagcccacctggcctgcacgtggacccaggaaggggcatgggcgctctcccttgtgggtctccaagacttcagctgtctcctctcaccctctgccccctgggaagagaactggcccctcgagcacatgtgctctccaaactcgagggtaccaccgacccaggcctccccagatactcgcccaccaggagatggtctccaggtcaggccgagtcaccaccacggtcagcgccgccagggaagtgggccttggctgggccgggcagcccctcagcgggggagcatggcccaggcttggggctggacccacgggttctcttcccgcccgcgcctctacctcacaagctcctcagcagaagcccagagacctgcgcctccccgtggcagaaggccgagtcccgaagtccctcctgctcacccggccctgctcatcctctctcctcccgacccttctccgccctccatgacttccacggccacatcctggcccggacagaggagaacatcttcagccacctgcctctgcactcccagcacttgacccgtgccccatgtcccttgattcccatcggtgggatccagatggtgcaggcccggccaggagcccaccccaccctgctgccagggcccaccgcagcctgggtcagtggcttctccgggggtggcagcgacctgacaggggcccgggaggcccaggagcgaggccgctggagtcccactgagagctcgtcagcctccgtgtcgcctgtggctaaggtctccaaattcacactctcctcagagctggagggcggggactaccccaaggagagggagaggaccggcggaggcccgggcaggcctcctgactggacaccccatgggaccggggcacctgcagagcccacacccacgcacagcccctgcaccccacccgacaccttgccccggccgccccagggacgccgggcagcgcagtcctggagcccccgcttggagtccccgcgtgcaccgaccaaccccgagccttctgccaccccgccgctggaccgcagcagctctgtgggctgcctggcagaggcctctgcccgcttcccagcccggacgaggaacctctccggggaacccaggaccaggcaggactcccccaagccctcaggaagtggggagcccagggcacatccacatcagcctgaggacagggttccccccaacgcttagtaatgaactagtccgtaacttgaaagtatttcgatttcttggctttatatatcttgtggaaaggacgaccaggaagagggttaacccacagc

SEQ ID NO: 844 - DNA, 1793 bp, Homo sapiens
  source 1..1793: mol_type = genomic DNA
accgccaccatggcagctctgtcccccacatttgccacgtccacccaggattccacctgtctccaggactcagaatttcctgtttcttcaaaagaccattcctgtccccagaatttggacctgttcgtgtgcagtggtctggagcctcacacacccagtgttggttcccaggaatcggtgactttccaagatgtcgctgtggactttaccgagaaggagtggcccttgctggattcttctcagagaaaactgtacaaagatgtaatgctggagaactacagcaacctcacttcactggattgggagactccatctaaaaccaagtggtcacttcttatggaagatatttttgggaaggaaacgcccagtggtgtgacgatggaaagagccggtcttggagagaagtccactgaatacgctcacttgttcgaagtctttggcatggaccctcatctcactcagccaatgggaaggcacgctggcaagaggccctatcaccgccgcgactatggggtagcgttcaagggcaggccgcacctcactcagcacatgagcatgtacgacgggagaaaaatgcatgaatgtcatcagtgccaaaaagccttcaccacgagcgcgtccctcacacggcacaggagaatccacaccggggagaagccttacgagtgcagcgactgcgggaaagccttcaacgacccttcagcccttaggagccacgcaagaactcacctcaaagagaagccctttgactgcagtcagtgtggaaatgcattccggaccctctcggccctgaaaatccacatgcgagttcacactggcgagaggccttacaagtgtgatcagtgcgggaaggcttacggccggagctgccacctcatcgcacacaagagaacgcacaccggagagaggccctacgagtgtcacgactgtgggaaagctttccagcacccctcccacctcaaagagcacgtgaggaatcacacgggggagaagccctacgcgtgcacgcagtgcggcaaagccttccgctggaagtccaactttaatttgcacaagaagaaccacatggtggagaagacctacgaatgtaaagaatgcgggaaatcctttggcgatctcgtgtcccggaggaaacacatgaggattcacatcgtcaagaaacccgtggaatgtcggcagtgcgggaagaccttccgaaaccagtccatccttaagactcacatgaactctcacactggagagaaaccatacgggtgcgatctctgcgggaaagctttcagcgcgagttcaaacctcaccgcacacaggaagatacacacgcaagagagacgctacgaatgcgccgcctgcgggaaagtcttcggtgactatttatcccggcggaggcacatgagcgttcaccttgtaaagaaacgagttgagtgtaggcagtgtggcaaggccttcaggaaccagtcaacgctgaagacgcacatgcgaagccacacgggggagaaaccgtacgaatgcgatcactgtgggaaggccttcagcataggctccaacctgaatgtgcacaggcggatccacaccggggagaagccctacgaatgccttgtctgcgggaaagccttcagcgaccactcatccctcaggagccacgtgaaaactcaccggggagagaagctctttgtgtcatccgtgtggaaaaggctccagtagtaatgaactagtccgtaacttgaaagtatttcgatttcttggctttatatatcttgtggaaaggacgaagatagccagaacaaatttcccga

SEQ ID NO: 845 - DNA, 1850 bp, Homo sapiens
  source 1..1850: mol_type = genomic DNA
accgccaccatgtcggaaagctggcaacagccgccacagacgcagccgcagcagccacagccaccgcagcctcagcaccatgcagagccaccgccagccctggcagagcacacgctgcctccgggcacggcggagaaccccctgggctgtgccgtctatggcatcctcctgcagccagaccccggcctgcagcccccacaacacgcacccctgcaggcagcaggagagccaggccccaaatgtggcgtgtgtggtcacgacctggcgcacctgtccagtccgcatgagcaccagtgtctggcgggccatgaccgctcattccagtgcacacagtgtctcaagatcttccaccaggccactgacctgctggagcaccagtgcgtgcaggctgagcagaagcccttcgtctgtggggtctgcaagatgggcttctcactactcacctcactggcacagcaccacagctcccacagtggcctggtgaagtgttccatctgtgaaaagacctacaagccagctgaggcagcggagccagccaccacagccgccccgtcgcttcccgcagcacccgcgccttccactgtcacccctgctgaacaggccgacaagccctacagctgccccatctgccaaaagcccttcaagcacctgtcggagctctctcggcatgagcggatccacaccggtgagaagccctacaagtgcacgctgtgtgacaaaagcttcagccagtcgtcgcacctggtgcaccacaagcgcacgcacagctccgagcggccctacaagtgcgcagtctgcgagaagaccttcaagcaccgctctcacctggtgcgccacatgtacgcgcactcgggcgagcaccacctgttccgctgcaacgtgtgcgagttgcatttcaaggagtcgtcggagctgctgcagcacccgtgcacgccaagtggggagcggcccttccgctgcggcgagtgccagaaggccttcaagcggccctcggacctgcggcagcatgagcgcacacacagcgccgagcggcccttcaagtgcgacctgtgccccatgggcttcaagcagcagtacgcactgatgcgccaccggcgcacacacaagaccgaggagcccttcaaatgcggcctatgtgagaagggctttgggcagcccagccacctgctctaccaccagcacgtgcacaccctcgagactctcttcaagtgccccgtgtgccagaaaggctttgaccaatctgccgagctgctgcggcacaagtgcctgcccggcgcggccgagcggcccttcaagtgccctgtgtgcaacaaggcctacaagcgcgcgtcggccctgcagaagcaccagctggcccactgtgcggcggcagagaagcccctgcgctgcacgctttgcgaacgccgcttcttctcctcttccgagttcgtgcagcaccgctgcgatccggcccgcgagaagccactcaagtgcccagactgcgagaaacgcttcaagtacgcgtcagacctgcagcggcaccggcgggtacacacaggcgagaagccctacaagtgccccaactgcgacaaggccttcaagcagcgggagcatctcaacaagcaccagggcgtgcacgcccgcgagcagcagttcaagtgtgtatggtgcggggagcgcttcctagacgtggccttgttgcaggagcacagcgcgcagcacagtgccgccgccgcggcagcggagggcgcctaccaggtagccgcctgcctgccctagtaatgaactagtccgtaacttgaaagtatttcgatttcttggctttatatatcttgtggaaaggacgaggtccaacggaaggtacgtatcat

SEQ ID NO: 846 - DNA, 1145 bp, Homo sapiens
  source 1..1145: mol_type = genomic DNA
accgccaccatggaaacacccttctacggcgatgaggcgctgagcggcctgggcggcggcgccagtggcagcggcggcagcttcgcgtccccgggccgcttgttccccggggcgcccccgacggccgcggccggcagcatgatgaagaaggacgcgctgacgctgagcctgagtgagcaggtggcggcagcgctcaagcctgcggccgcgccgcctcctacccccctgcgcgccgacggcgcccccagcgcggcaccccccgacggcctgctcgcctctcccgacctggggctgctgaagctggcctcccccgagctcgagcgcctcatcatccagtccaacgggctggtcaccaccacgccgacgagctcacagttcctctaccccaaggtggcggccagcgaggagcaggagttcgccgagggcttcgtcaaggccctggaggatttacacaagcagaaccagctcggcgcgggcgcggccgctgccgccgccgccgccgccgccggggggccctcgggcacggccacgggctccgcgccccccggcgagctggccccggcggcggccgcgcccgaagcgcctgtctacgcgaacctgagcagctacgcgggcggcgccgggggcgcggggggcgccgcgacggtcgccttcgctgccgaacctgtgcccttcccgccgccgccacccccaggcgcgttggggccgccgcgcctggctgcgctcaaggacgagccacagacggtgcccgacgtgccgagcttcggcgagagcccgccgttgtcgcccatcgacatggacacgcaggagcgcatcaaggcggagcgcaagcggctgcgcaaccgcatcgccgcctccaagtgccgcaagcgcaagctggagcgcatctcgcgcctggaagagaaagtgaagaccctcaagagtcagaacacggagctggcgtccacggcgagcctgctgcgcgagcaggtggcgcagctcaagcagaaagtcctcagccacgtcaacagcggctgccagctgctgccccagcaccaggtgcccgcgtactagtaatgaactagtccgtaacttgaaagtatttcgatttcttggctttatatatcttgtggaaaggacgagaatgatgctccttgtatcactta

SEQ ID NO: 847 - DNA, 7769 bp, Homo sapiens
  source 1..7769: mol_type = genomic DNA
accgccaccatgccgccgctcctggcgcccctgctctgcctggcgctgctgcccgcgctcgccgcacgaggcccgcgatgctcccagcccggtgagacctgcctgaatggcgggaagtgtgaagcggccaatggcacggaggcctgcgtctgtggcggggccttcgtgggcccgcgatgccaggaccccaacccgtgcctcagcaccccctgcaagaacgccgggacatgccacgtggtggaccgcagaggcgtggcagactatgcctgcagctgtgccctgggcttctctgggcccctctgcctgacacccctggacaatgcctgcctcaccaacccctgccgcaacgggggcacctgcgacctgctcacgctgacggagtacaagtgccgctgcccgcccggctggtcagggaaatcgtgccagcaggctgacccgtgcgcctccaacccctgcgccaacggtggccagtgcctgcccttcgaggcctcctacatctgccactgcccacccagcttccatggccccacctgccggcaggatgtcaacgagtgtggccagaagcccgggctttgccgccacggaggcacctgccacaacgaggtcggctcctaccgctgcgtctgccgcgccacccacactggccccaactgcgagcggccctacgtgccctgcagcccctcgccctgccagaacgggggcacctgccgccccacgggcgacgtcacccacgagtgtgcctgcctgccaggcttcaccggccagaactgtgaggaaaatatcgacgattgtccaggaaacaactgcaagaacgggggtgcctgtgtggacggcgtgaacacctacaactgccgctgcccgccagagtggacaggtcagtactgtaccgaggatgtggacgagtgccagctgatgccaaatgcctgccagaacggcgggacctgccacaacacccacggtggctacaactgcgtgtgtgtcaacggctggactggtgaggactgcagcgagaacattgatgactgtgccagcgccgcctgcttccacggcgccacctgccatgaccgtgtggcctccttctactgcgagtgtccccatggccgcacaggtctgctgtgccacctcaacgacgcatgcatcagcaacccctgtaacgagggctccaactgcgacaccaaccctgtcaatggcaaggccatctgcacctgcccctcggggtacacgggcccggcctgcagccaggacgtggatgagtgctcgctgggtgccaacccctgcgagcatgcgggcaagtgcatcaacacgctgggctccttcgagtgccagtgtctgcagggctacacgggcccccgatgcgagatcgacgtcaacgagtgcgtctcgaacccgtgccagaacgacgccacctgcctggaccagattggggagttccagtgcatctgcatgcccggctacgagggtgtgcactgcgaggtcaacacagacgagtgtgccagcagcccctgcctgcacaatggccgctgcctggacaagatcaatgagttccagtgcgagtgccccacgggcttcactgggcatctgtgccagtacgatgtggacgagtgtgccagcaccccctgcaagaatggtgccaagtgcctggacggacccaacacttacacctgtgtgtgcacggaagggtacacggggacgcactgcgaggtggacatcgatgagtgcgaccccgacccctgccactacggctcctgcaaggacggcgtcgccaccttcacctgcctctgccgcccaggctacacgggccaccactgcgagaccaacatcaacgagtgctccagccagccctgccgccacgggggcacctgccaggaccgcgacaacgcctacctctgcttctgcctgaaggggaccacaggacccaactgcgagatcaacctggatgactgtgccagcagcccctgcgactcgggcacctgtctggacaagatcgatggctacgagtgtgcctgtgagccgggctacacagggagcatgtgtaacatcaacatcgatgagtgtgcgggcaacccctgccacaacgggggcacctgcgaggacggcatcaatggcttcacctgccgctgccccgagggctaccacgaccccacctgcctgtctgaggtcaatgagtgcaacagcaacccctgcgtccacggggcctgccgggacagcctcaacgggtacaagtgcgactgtgaccctgggtggagtgggaccaactgtgacatcaacaacaatgagtgtgaatccaacccttgtgtcaacggcggcacctgcaaagacatgaccagtggctacgtgtgcacctgccgggagggcttcagcggtcccaactgccagaccaacatcaacgagtgtgcgtccaacccatgtctgaaccagggcacgtgtattgacgacgttgccgggtacaagtgcaactgcctgctgccctacacaggtgccacgtgtgaggtggtgctggccccgtgtgcccccagcccctgcagaaacggcggggagtgcaggcaatccgaggactatgagagcttctcctgtgtctgccccacgggctggcaagggcagacctgtgaggtcgacatcaacgagtgcgttctgagcccgtgccggcacggcgcatcctgccagaacacccacggcggctaccgctgccactgccaggccggctacagtgggcgcaactgcgagaccgacatcgacgactgccggcccaacccgtgtcacaacgggggctcctgcacagacggcatcaacacggccttctgcgactgcctgcccggcttccggggcactttctgtgaggaggacatcaacgagtgtgccagtgacccctgccgcaacggggccaactgcacggactgcgtggacagctacacgtgcacctgccccgcaggcttcagcgggatccactgtgagaacaacacgcctgactgcacagagagctcctgcttcaacggtggcacctgcgtggacggcatcaactcgttcacctgcctgtgtccacccggcttcacgggcagctactgccagcacgatgtcaatgagtgcgactcacagccctgcctgcatggcggcacctgtcaggacggctgcggctcctacaggtgcacctgcccccagggctacactggccccaactgccagaaccttgtgcactggtgtgactcctcgccctgcaagaacggcggcaaatgctggcagacccacacccagtaccgctgcgagtgccccagcggctggaccggcctttactgcgacgtgcccagcgtgtcctgtgaggtggctgcgcagcgacaaggtgttgacgttgcccgcctgtgccagcatggagggctctgtgtggacgcgggcaacacgcaccactgccgctgccaggcgggctacacaggcagctactgtgaggacctggtggacgagtgctcacccagcccctgccagaacggggccacctgcacggactacctgggcggctactcctgcaagtgcgtggccggctaccacggggtgaactgctctgaggagatcgacgagtgcctctcccacccctgccagaacgggggcacctgcctcgacctccccaacacctacaagtgctcctgcccacggggcactcagggtgtgcactgtgagatcaacgtggacgactgcaatccccccgttgaccccgtgtcccggagccccaagtgctttaacaacggcacctgcgtggaccaggtgggcggctacagctgcacctgcccgccgggcttcgtgggtgagcgctgtgagggggatgtcaacgagtgcctgtccaatccctgcgacgcccgtggcacccagaactgcgtgcagcgcgtcaatgacttccactgcgagtgccgtgctggtcacaccgggcgccgctgcgagtccgtcatcaatggctgcaaaggcaagccctgcaagaatgggggcacctgcgccgtggcctccaacaccgcccgcgggttcatctgcaagtgccctgcgggcttcgagggcgccacgtgtgagaatgacgctcgtacctgcggcagcctgcgctgcctcaacggcggcacatgcatctccggcccgcgcagccccacctgcctgtgcctgggccccttcacgggccccgaatgccagttcccggccagcagcccctgcctgggcggcaacccctgctacaaccaggggacctgtgagcccacatccgagagccccttctaccgttgcctgtgccccgccaaattcaacgggctcttgtgccacatcctggactacagcttcgggggtggggccgggcgcgacatccccccgccgctgatcgaggaggcgtgcgagctgcccgagtgccaggaggacgcgggcaacaaggtctgcagcctgcagtgcaacaaccacgcgtgcggctgggacggcggtgactgctccctcaacttcaatgacccctggaagaactgcacgcagtctctgcagtgctggaagtacttcagtgacggccactgtgacagccagtgcaactcagccggctgcctcttcgacggctttgactgccagcgtgcggaaggccagtgcaaccccctgtacgaccagtactgcaaggaccacttcagcgacgggcactgcgaccagggctgcaacagcgcggagtgcgagtgggacgggctggactgtgcggagcatgtacccgagaggctggcggccggcacgctggtggtggtggtgctgatgccgccggagcagctgcgcaacagctccttccacttcctgcgggagctcagccgcgtgctgcacaccaacgtggtcttcaagcgtgacgcacacggccagcagatgatcttcccctactacggccgcgaggaggagctgcgcaagcaccccatcaagcgtgccgccgagggctgggccgcacctgacgccctgctgggccaggtgaaggcctcgctgctccctggtggcagcgagggtgggcggcggcggagggagctggaccccatggacgtccgcggctccatcgtctacctggagattgacaaccggcagtgtgtgcaggcctcctcgcagtgcttccagagtgccaccgacgtggccgcattcctgggagcgctcgcctcgctgggcagcctcaacatcccctacaagatcgaggccgtgcagagtgagaccgtggagccgcccccgccggcgcagctgcacttcatgtacgtggcggcggccgcctttgtgcttctgttcttcgtgggctgcggggtgctgctgtcccgcaagcgccggcggcagcatggccagctctggttccctgagggcttcaaagtgtctgaggccagcaagaagaagcggcgggagcccctcggcgaggactccgtgggcctcaagcccctgaagaacgcttcagacggtgccctcatggacgacaaccagaatgagtggggggacgaggacctggagaccaagaagttccggttcgaggagcccgtggttctgcctgacctggacgaccagacagaccaccggcagtggactcagcagcacctggatgccgctgacctgcgcatgtctgccatggcccccacaccgccccagggtgaggttgacgccgactgcatggacgtcaatgtccgcgggcctgatggcttcaccccgctcatgatcgcctcctgcagcgggggcggcctggagacgggcaacagcgaggaagaggaggacgcgccggccgtcatctccgacttcatctaccagggcgccagcctgcacaaccagacagaccgcacgggcgagaccgccttgcacctggccgcccgctactcacgctctgatgccgccaagcgcctgctggaggccagcgcagatgccaacatccaggacaacatgggccgcaccccgctgcatgcggctgtgtctgccgacgcacaaggtgtcttccagatcctgatccggaaccgagccacagacctggatgcccgcatgcatgatggcacgacgccactgatcctggctgcccgcctggccgtggagggcatgctggaggacctcatcaactcacacgccgacgtcaacgccgtagatgacctgggcaagtccgccctgcactgggccgccgccgtgaacaatgtggatgccgcagttgtgctcctgaagaacggggctaacaaagatatgcagaacaacagggaggagacacccctgtttctggccgcccgggagggcagctacgagaccgccaaggtgctgctggaccactttgccaaccgggacatcacggatcatatggaccgcctgccgcgcgacatcgcacaggagcgcatgcatcacgacatcgtgaggctgctggacgagtacaacctggtgcgcagcccgcagctgcacggagccccgctggggggcacgcccaccctgtcgcccccgctctgctcgcccaacggctacctgggcagcctcaagcccggcgtgcagggcaagaaggtccgcaagcccagcagcaaaggcctggcctgtggaagcaaggaggccaaggacctcaaggcacggaggaagaagtcccaggacggcaagggctgcctgctggacagctccggcatgctctcgcccgtggactccctggagtcaccccatggctacctgtcagacgtggcctcgccgccactgctgccctccccgttccagcagtctccgtccgtgcccctcaaccacctgcctgggatgcccgacacccacctgggcatcgggcacctgaacgtggcggccaagcccgagatggcggcgctgggtgggggcggccggctggcctttgagactggcccacctcgtctctcccacctgcctgtggcctctggcaccagcaccgtcctgggctccagcagcggaggggccctgaatttcactgtgggcgggtccaccagtttgaatggtcaatgcgagtggctgtcccggctgcagagcggcatggtgccgaaccaatacaaccctctgcgggggagtgtggcaccaggccccctgagcacacaggccccctccctgcagcatggcatggtaggcccgctgcacagtagccttgctgccagcgccctgtcccagatgatgagctaccagggcctgcccagcacccggctggccacccagcctcacctggtgcagacccagcaggtgcagccacaaaacttacagatgcagcagcagaacctgcagccagcaaacatccagcagcagcaaagcctgcagccgccaccaccaccaccacagccgcaccttggcgtgagctcagcagccagcggccacctgggccggagcttcctgagtggagagccgagccaggcagacgtgcagccactgggccccagcagcctggcggtgcacactattctgccccaggagagccccgccctgcccacgtcgctgccatcctcgctggtcccacccgtgaccgcagcccagttcctgacgcccccctcgcagcacagctactcctcgcctgtggacaacacccccagccaccagctacaggtgcctgagcaccccttcctcaccccgtcccctgagtcccctgaccagtggtccagctcgtccccgcattccaacgtctccgactggtccgagggcgtctccagccctcccaccagcatgcagtcccagatcgcccgcattccggaggccttcaagtagtaatgaactagtccgtaacttgaaagtatttcgatttcttggctttatatatcttgtggaaaggacgagctccacgtgcccaccagagaccc

SEQ ID NO: 848 - DNA, 674 bp, Homo sapiens
  source 1..674: mol_type = genomic DNA
accgccaccatgccccgcgccttcctggtcaggagtcggcgtccacagccccccaactggggccatctgcctgaccagctccggggagatgcctatatcccagactgcagcagcctgggggggccaccggcacaacagtcgtccagtgtcagggatccgtggacagcgcagcccacacagggcaacctgacctctgctcccaggggccctgggacgctgggctgcccgctctgccctaaggccttccctctgcagcgcatgctgacaaggcacctcaagtgccacagccccgtgcgccgccacctgtgccgctgttgtggcaagggctttcatgacgccttcgatctcaagcgccacatgaggactcacactgggatccggcccttccgctgcagtgcttgcgggaaagcgtttacgcagcgctgctccctggaagctcaccttgctaaggtgcatggacagccggccagctacgcttaccgtgagcgccgcgagaagctgcacgtgtgcgaggactgcggcttcaccagctcccggcccgacacctacgcacagcaccgcgccctgcaccgcgcagcctagtaatgaactagtccgtaacttgaaagtatttcgatttcttggctttatatatcttgtggaaaggacgataatgagaaaggtagtgaagccgc

SEQ ID NO: 849 - DNA, 956 bp, Homo sapiens
  source 1..956: mol_type = genomic DNA
accgccaccatggagccggggatgctgggtccacacaacctcccacaccacgagccaatcagcttcggcatcgatcagatcctgagcggccccgaaaccccagggggcggtctaggcctgggtcgcgggggccagggtcatggggagaatggggcgttctcgggtggataccacggagcctcgggctacggtcccgccggctcacttgccccgctgcccggcagctccggagtgggcccaggcggcgtgatccgcgtccctgcgcaccgcccgctgcctgtgccgccgcccgctgggggggcgcctgcagtgcctgggccctcgggtttgggcggcgccggaggcctagcgggactcaccttcccctggatggacagcggccgccgctttgccaaggaccggctcacggctgcgctctcgcccttctctgggacgcgccgcataggccacccctaccaaaaccggacccctccgaagcggaagaagccgcgcacgtccttctcccgctcacaggtgctggagttggagcggcgcttcctgcgccagaagtacctggcctctgcggagagggcggcgctggccaaggccttgcgcatgaccgacgcacaggtcaaaacgtggttccagaaccgacgcaccaagtggcggcgccagacggcggaggagcgcgaggccgagcggcaccgcgcgggccggctgctcctgcatctgcagcaggacgcgttgccacggccgctgcggccgccgctgcccccggaccctctctgcctgcacaactcgtcgctcttcgcgctgcagaacctgcagccctgggccgaggacaacaaagtggcttcagtgtccgggctcgcctcggtggtgtagtaatgaactagtccgtaacttgaaagtatttcgatttcttggctttatatatcttgtggaaaggacgaatcagccggtgaaggcaagatggg

SEQ ID NO: 850 - DNA, 719 bp, Homo sapiens
  source 1..719: mol_type = genomic DNA
accgccaccatgagccttcgagactctagctacagcatggcccccgggccctgtgtggtggcccagctgccctctgaagacatgggccacttgacagacccccagagcagagaccatggcttcctgcgcaccaagatgaaggtgacccttggggacagtcccagtggagacctgttcacctgccgtgtctgccagaaggccttcacctaccagcgcatgctgaaccgccacatgaagtgtcacaacgacgtcaagaggcacctctgcacgtactgcgggaagggcttcaatgacaccttcgacctcaagagacacgtccgaactcacactggcgtgcggccctacaagtgcagcctgtgtgacaaggccttcacgcagcgctgctctctggagtctcacctcaagaagatccatggtgtgcagcagaagtacgcgtacaaggagcggcgggccaagctgtacgtgtgtgaggagtgcggctgcacatctgagagccaggagggccacgtcctgcacctgaaggagcaccaccctgacagcccgctgctgcgcaagacctccaagaaggtggccgtggcactacagaacactgtcacttccctgctgcagggcagcccccacctgtagtaatgaactagtccgtaacttgaaagtatttcgatttcttggctttatatatcttgtggaaaggacgattctggttgctaattctgtgcata

SEQ ID NO: 851 - DNA, 1472 bp, Homo sapiens
  source 1..1472: mol_type = genomic DNA
accgccaccatggacacagtggtctttgaagacgtggttgtggatttcacgctggaggagtgggccttgctgaatcctgctcagagaaaactctacagagatgtcatgctggagaccttcaagcacctggcctcagtagataatgaggctcagcttaaagccagtgggtctatttctcagcaggatacttctggagaaaaattatccctcaaacagaaaatagaaaagttcacaagaaagaatatatgggcctcccttttaggaaaaaattgggaagaacatagcgttaaagacaagcacaacaccaaggagagacatttgagcagaaatccaagggtggagagaccatgtaaaagcagtaaaggtaataaacgtggaagaaccttcagaaagactcgaaattgtaatcgtcatctgcgcaagaattgttgtactagtgtaagacggtacgaatgcagtcagtgtggaaaactcttcacccattcctcatccctgataaggcacaaaagagctcactctggacaaaaattatataaatgtaaggaatgtgggaaagccttcagtcgcccttcctacctacagacgcatgagaaaactcacagtggagagaaaccctatgcctgtcaatcttgcgggaagacatttcttcgttcccactctctcactgaacatgtaaggactcacactggagagaaaccctacgaatgtgggcagtgtgggaaaggcttcagttgtcccaaatcctttcgcgcacatgtgatgatgcacgccggagggagaccgtatgagtgcaagcactgtgggaaagccttcaggtgtcagaaatcctttcgagtccatatgatcatgcacgccggagggagaccgtatgagtgcaagcagtgtgggaaagcctactgctgggcaacatcctttcaacgacacgtgagaattcacaacggggagaaaccctataagtgtggaaaatgcgggaaagcattcggttggccctcatccttacacaaacacgcgagaacgcatgctaaaaagaaacctgtgagtgggggcagcgtgggaaagtcttccgcgaggcctcgcccctccacagatgtcaaatcacaaactagagagaaagtctataaatgtgaaacgtgtgggaaaacgtatggttggtcctcatctttacacaaacatgagagaaagcacactggggagaaacctgtaaatgcagccagtgtgggaaaaccttcaggcgggctttgctcttccaaaaatgtaagaacgcagattggacagaagcccagtaaatgcgaaaaatgtgggaaagctttcagttgtcccaaagcctttcaaggtcatgtgagaagtcacacaggaaagaaatcctgtacatctaagtagtaatgaactagtccgtaacttgaaagtatttcgatttcttggctttatatatcttgtggaaaggacgaggaacgacgatgcggtatcacccg

SEQ ID NO: 852 - DNA, 1373 bp, Homo sapiens
  source 1..1373: mol_type = genomic DNA
accgccaccatggcggctgtcgtcctgcccccaactgccgcctctcagcgagaaggacacacagagggcggagagctggttaatgagctcctgaaaagctggctaaagggcttggtgacctttgaggatgtggccgtggagttcacccaggaggagtgggcattgctggaccctgcccaaaggacactgtacagggacgtgatgctggagaactgcaggaacctggcctcactggggaaccaagttgataaacctaggctgatctcccagctggagcaagaagataaagtgatgacagaagagagaggaattctctcaggtacctgtccagatgtggagaatccatttaaagccaaagggttaactcctaagctgcatgtttttcgaaaagaacaatctagaaatatgaaaatggagaggaatcatcttggagcaacactcaacgaatgtaatcagtgttttaaagtcttcagcacaaaatcttcccttacacggcacaggaagattcatactggagaaagaccctatggctgcagtgaatgtgggaaatcctacagcagtagatcttaccttgctgttcataagagaatccacaatggggagaaaccctatgaatgcaatgactgtgggaaaaccttcagcagcagatcttaccttactgttcataagagaatccacaatggggagaaaccctacgaatgcagtgactgtgggaaaaccttcagcaattcctcatacctcagaccgcacttgagaattcacactggagaaaaaccgtacaaatgtaaccagtgttttcgtgagttccgcactcagtcaatcttcacaaggcacaagagagttcatacgggggagggtcattatgtatgtaatcagtgtggaaaggctttcggcacgaggtcatctctttcttcgcactatagcattcatacaggggagtacccttacgaatgccacgattgtgggagaaccttcaggaggaggtcgaatctgacacagcacataagaactcatactggagaaaaaccctacacatgtaatgagtgtgggaaatcctttaccaatagcttttctcttacaattcacaggagaatacataatggagagaaatcctatgagtgcagtgattgtggaaaatcctttaatgttctctcatccgttaagaaacacatgagaactcacactggaaaaaaaccctatgaatgtaattattgcgggaaatccttcacaagtaactcctacctttctgtgcatacgagaatgcataataggcaaatgtagtaatgaactagtccgtaacttgaaagtatttcgatttcttggctttatatatcttgtggaaaggacgacgcgttacattataccctcgtacc

SEQ ID NO: 853 - DNA, 1394 bp, Homo sapiens
  source 1..1394: mol_type = genomic DNA
accgccaccatggcggctgtcgtcctgcccccaactgccgctctgtcttccctgttcccagcctctcagcgagaaggacacacagagggcggagagctggttaatgagctcctgaaaagctggctaaagggcttggtgacctttgaggatgtggccgtggagttcacccaggaggagtgggcattgctggaccctgcccaaaggacactgtacagggacgtgatgctggagaactgcaggaacctggcctcactggggaaccaagttgataaacctaggctgatctcccagctggagcaagaagataaagtgatgacagaagagagaggaattctctcaggtacctgtccagatgtggagaatccatttaaagccaaagggttaactcctaagctgcatgtttttcgaaaagaacaatctagaaatatgaaaatggagaggaatcatcttggagcaacactcaacgaatgtaatcagtgttttaaagtcttcagcacaaaatcttcccttacacggcacaggaagattcatactggagaaagaccctatggctgcagtgaatgtgggaaatcctacagcagtagatcttaccttgctgttcataagagaatccacaatggggagaaaccctatgaatgcaatgactgtgggaaaaccttcagcagcagatcttaccttactgttcataagagaatccacaatggggagaaaccctacgaatgcagtgactgtgggaaaaccttcagcaattcctcatacctcagaccgcacttgagaattcacactggagaaaaaccgtacaaatgtaaccagtgttttcgtgagttccgcactcagtcaatcttcacaaggcacaagagagttcatacgggggagggtcattatgtatgtaatcagtgtggaaaggctttcggcacgaggtcatctctttcttcgcactatagcattcatacaggggagtacccttacgaatgccacgattgtgggagaaccttcaggaggaggtcgaatctgacacagcacataagaactcatactggagaaaaaccctacacatgtaatgagtgtgggaaatcctttaccaatagcttttctcttacaattcacaggagaatacataatggagagaaatcctatgagtgcagtgattgtggaaaatcctttaatgttctctcatccgttaagaaacacatgagaactcacactggaaaaaaaccctatgaatgtaattattgcgggaaatccttcacaagtaactcctacctttctgtgcatacgagaatgcataataggcaaatgtagtaatgaactagtccgtaacttgaaagtatttcgatttcttggctttatatatcttgtggaaaggacgactactcgaccagaaacgcgtatgc

SEQ ID NO: 854 - DNA, 1985 bp, Homo sapiens
  source 1..1985: mol_type = genomic DNA
accgccaccatggactcagtggtctttgaggatgtggctgtggacttcaccctggaggagtgggctttgctggattctgctcagagggacctctacagagatgtgatgctggagacctttcagaacctggcctcagtagatgatgaaactcaatttaaggccagtgggtcagtttctcagcaggatatttatggagagaaaatacccaaggaatctaaaatagccacgttcaccagaaatgtttcctgggcctctgttttaggaaaaatttgggacagtcttagcatcgaagatcaaaccacaaaccaggggagaaatctcagaaatcatgggttggagagactctgtgaaagtaatgatcaatgtggagaagccctcagccagattccacatcttaatctgtacaagaaaattccacctggagtaaaacagtatgaatacaacacgtacggaaaagtcttcatgcatcgccgcacatccctcaagagtcccatcacagttcacactggacacaaaccatatcagtgccaggaatgtgggcaggcctacagttgtcgttcacacctaagaatgcatgtgagaacccacaatggagagagaccctatgtgtgtaaattatgtgggaaaacctttcctcgtacttcctccctcaatcggcatgtaaggattcacactgctgagaaaacctacgaatgtaagcaatgtgggaaagcctttattgacttctcaagtcttactagtcatctcagaagtcacaccggagagaagccatataagtgtaaggaatgtgggaaagctttcagttattcctcaacgtttcgaagacacacaataacacacactggcgagaagccatataaatgtaaggaatgtgcggaagcctttagttattcctcaacttttcgaagacatatgatttcacacactggagagaagccacataaatgtaaagaatgtggggaggccttcagttattcttcggcttttcgaagacacatgataacacacactggagagaaaccctacgaatgcaaacaatgtgggaaaaccttcatttatctccagtcctttcgaagacatgaaaggattcacactggagagaaaccctacgaatgcaaacagtgtgggaagaccttcatttatccccagtcctttcgaagacatgaaaggactcatggtggagagaaaccctatgaatgcaaccagtgcgggaaagcattcagtcacccctcctcctttcgaggacacatgagggtgcacactggagagaaaccctatgagtgcaagcaatgtgggaaaactttcaattggcccatatctttacgaaaacatatgagaacacatactagagagaaaccctatgaatgtaagcagtgtgggaaagccttcagcttgtctgcttgctttcgagaacatgtgagaatgcaccctgaagacaaatcctatgaatgcaagctatgtgggaaagctttctattgccacatatccttacaaaaacatatgagaagacataccgcagagaaactctataaatgcaagcagtgtgggaaagctttcagttggcctgaacttttgcaacaacatgtgagaacgcacactgtagagaagccctatgaatgtaaggaatgtgggaaggtcttcaaatggccatcatctttaccaatacatatgagactgcacactggagagaaaccttatcaatgtaagcattgtgggaaagcattcaattgttcctcatccttaaggcgacatgtgagaatacacactacagaaaaacagtataagtgtaatgtaggacatcctcctgcaaatgaattcatgtgcagtgcttcagaaaagtcacaccaggagagagatctgatcaaagttgtaaatatggtgttgcctttatagtaatgaactagtccgtaacttgaaagtatttcgatttcttggctttatatatcttgtggaaaggacgaacctggctccactacggctctccc

SEQ ID NO: 855 - DNA, 1988 bp, Homo sapiens
  source 1..1988: mol_type = genomic DNA
accgccaccatggactcagtggtctttgaggatgtggctgtggacttcaccctggaggagtgggctttgctggattctgctcagagggacctctacagagatgtgatgctggagacctttcagaacctggcctcagtagatgatgaaactcaatttaaggccagtgggtcagtttctcagcaggatatttatggagagaaaatacccaaggaatctaaaatagccacgttcaccagaaatgtttcctgggcctctgttttaggaaaaatttgggacagtcttagcatcgaagatcaaaccacaaaccaggggagaaatctcagtagaaatcatgggttggagagactctgtgaaagtaatgatcaatgtggagaagccctcagccagattccacatcttaatctgtacaagaaaattccacctggagtaaaacagtatgaatacaacacgtacggaaaagtcttcatgcatcgccgcacatccctcaagagtcccatcacagttcacactggacacaaaccatatcagtgccaggaatgtgggcaggcctacagttgtcgttcacacctaagaatgcatgtgagaacccacaatggagagagaccctatgtgtgtaaattatgtgggaaaacctttcctcgtacttcctccctcaatcggcatgtaaggattcacactgctgagaaaacctacgaatgtaagcaatgtgggaaagcctttattgacttctcaagtcttactagtcatctcagaagtcacaccggagagaagccatataagtgtaaggaatgtgggaaagctttcagttattcctcaacgtttcgaagacacacaataacacacactggcgagaagccatataaatgtaaggaatgtgcggaagcctttagttattcctcaacttttcgaagacatatgatttcacacactggagagaagccacataaatgtaaagaatgtggggaggccttcagttattcttcggcttttcgaagacacatgataacacacactggagagaaaccctacgaatgcaaacaatgtgggaaaaccttcatttatctccagtcctttcgaagacatgaaaggattcacactggagagaaaccctacgaatgcaaacagtgtgggaagaccttcatttatccccagtcctttcgaagacatgaaaggactcatggtggagagaaaccctatgaatgcaaccagtgcgggaaagcattcagtcacccctcctcctttcgaggacacatgagggtgcacactggagagaaaccctatgagtgcaagcaatgtgggaaaactttcaattggcccatatctttacgaaaacatatgagaacacatactagagagaaaccctatgaatgtaagcagtgtgggaaagccttcagcttgtctgcttgctttcgagaacatgtgagaatgcaccctgaagacaaatcctatgaatgcaagctatgtgggaaagctttctattgccacatatccttacaaaaacatatgagaagacataccgcagagaaactctataaatgcaagcagtgtgggaaagctttcagttggcctgaacttttgcaacaacatgtgagaacgcacactgtagagaagccctatgaatgtaaggaatgtgggaaggtcttcaaatggccatcatctttaccaatacatatgagactgcacactggagagaaaccttatcaatgtaagcattgtgggaaagcattcaattgttcctcatccttaaggcgacatgtgagaatacacactacagaaaaacagtataagtgtaatgtaggacatcctcctgcaaatgaattcatgtgcagtgcttcagaaaagtcacaccaggagagagatctgatcaaagttgtaaatatggtgttgcctttatagtaatgaactagtccgtaacttgaaagtatttcgatttcttggctttatatatcttgtggaaaggacgattagctgtgttgttccgtttgccg

SEQ ID NO: 856 - DNA, 1325 bp, Homo sapiens
  source 1..1325: mol_type = genomic DNA
accgccaccatggcggcggccgcgctaaggttccccgttcagggcacagtgacttttgaagacgtggctgtgaaatttacccaggaggaatggaatctccttagtgaggctcagagatgcctgtaccgtgatgtgacgctggagaacctggcacttatgtcctccctgggttgttggtgtggagtggaagatgaggcggcaccttctaagcagagtatttatatacaaagagagactcaggtcaggactcctatggcaggtgtgtctcccaagaaggcccacccctgtgagatgtgtggcccgatcttgggagacattttgcatgtggcagatcatcagggaacacatcacaagcagaaactgcacaggtgtgaggcctgggggaataaattgtatgacagtggaaactttcatcagcaccagaatgagcacattggagagaaaccctacagagggagtgttgaggaggcgttgtttgcgaagaggtgtaagttgcatgtgtcaggggagtcatctgtcttcagtgagagtgggaaagactttttgctcaggtcaggattactccagcaagaggccactcacactgggaagtcaaacagcaaaactgagtgtgtgtctctgtttcatgggggaaaaagccattacagctgtggaggatgcatgaaacattttagcaccaaagatatactcagtcagcacgagagactgctccctacagaagaaccttctgtgtggtgtgaatgtgggaaatcctctagcaaatatgacagcttcagtaatcatcaaggagttcacactagagaaaaaccttatacgtgtgggatatgtgggaaattatttaacagtaagtcccacctccttgtacaccagagaattcacactggagagaagccatatgagtgtgaggtttgtcagaaattttttaggcacaagtaccacctcattgcacaccagagagttcacactggagaaaggccatatgaatgcagtgattgtgggaagtcatttacccacagctctacattccgtgttcataagagagttcacactggtcagaagccttatgagtgcagtgaatgtgggaaatcttttgccgaaagctccagtctcactaaacacaggagagttcacactggagaaaagccttacgggtgcagtgaatgtgaaaaaaaatttaggcaaatctcttcacttcgtcatcatcagagagttcacaaaagaaagggcttatagtaatgaactagtccgtaacttgaaagtatttcgatttcttggctttatatatcttgtggaaaggacgacacccatccaacgatttgcgtatg

SEQ ID NO: 857 - DNA, 1370 bp, Homo sapiens
  source 1..1370: mol_type = genomic DNA
accgccaccatggcggagacgaaggacgcagcgcagatgttggtgaccttcaaggatgtggctgtgacctttacccgggaggagtggagacagctggacctggcccagaggaccctgtaccgagaggtgatgctggagacctgtgggcttctggtttcactagggcatcgggttcccaaaccagagttggtccacctgctagagcatgggcaggagctgtggatagtgaagagaggcctctcacatgctacctgtgcaggtgacagagcacaagttcataccagagagccaaccacttacccgccagtcttatctgagcgggcctttctccggggaagcctgactctggaatcttcaacctcaagtgattcgaggttggggagagctagggatgaggaagggcttttggaaatgcagaaaggtaaagtgacaccggagacagacctccacaaggagacccatcttgggaaagtgagccttgaaggtgaaggtttggggacagatgatggtctgcactccagggcattacaagagtggttatcagcagatgttctccatgaatgtgactcacagcaaccagggaaagacgccttgattcatgcagggacaaacccctacaaatgcaagcagtgtgggaaaggttttaacaggaagtggtatctcgttcgacatcagagggttcacactggaatgaaaccctatgaatgcaatgcatgtgggaaagcctttagccagagctcaactctcattcggcactacctcatccacaccggggagaaaccatacaagtgccttgagtgtgggaaggccttcaaacgcaggtcgtacctcatgcagcaccatccaatccacactggagagaaaccctatgagtgtagtcaatgtcgaaaggccttcacccaccggtctacttttattcgccataataggacccacactggagaaaagccctttgagtgcaaagaatgtgagaaagcctttagcaatagagcccacctaattcaacattacatcatccacactggagagaagccctatgattgcatggcatgtggaaaggccttcagatgcagctcagaactcatacagcaccagcggattcacactggggagaagccctatgaatgcacccagtgtgggaaagcctttcaccggagcacgtacctcattcagcactctgtcatccacactggggagatgccctacaagtgtatcgagtgtgggaaggccttcaaacgcaggtcacaccttctgcagcaccaaagggtccatacatagtaatgaactagtccgtaacttgaaagtatttcgatttcttggctttatatatcttgtggaaaggacgagaagacatagctattgttgagaga

SEQ ID NO: 858 - DNA, 2114 bp, Homo sapiens
  source 1..2114: mol_type = genomic DNA
accgccaccatgcccgccccggtcggccgccgctccccgcctagtccacggagctcaatggcggcagtcgcgctgagggactcggctcagggtatgacctttgaggatgtggccatttatttctcccaagaagagtgggagctccttgatgagtctcagaggttcctgtactgcgatgtgatgctggagaactttgcacatgtaacatccctgggttattgccatggaatggagaatgaggcgatagcttctgagcagagtgtatctatacaggtcaggacttctaagggcaatacacccacccagaaaactcacctcagtgagattaagatgtgtgtcccagtcttgaaagacattttgcctgcggctgagcaccaaaccacatcccctgtgcaaaagtcatacttgggtagcacaagcatgagaggcttctgcttcagtgctgaccttcaccagcatcaaaagcattacaatgaagaagagccctggaaaaggaaggtggatgaggctacatttgtgaccggctgcagattccatgtgttgaattatttcacctgtggggaggccttcccagcccccacggacctactccaacacgaagccactcccagtggtgaggagccacacagtagcagcagcaagcatatacaggcatttttcaatgcaaaaagttattacaagtggggtgaatacagaaaagcttcaagccacaaacacacacttgttcagcatcagagtgtctgttctgaaggagggctttatgagtgtagcaaatgtgagaaagccttcacttgcaagaacacacttgttcagcaccagcaaattcacactggacaaaagatgtttgagtgtagtgaatgtgaggaatcctttagcaaaaagtgccacctaatcttacacaagataattcacactggagaaaggccttatgaatgcagtgatcgtgagaaagcctttatccataaatctgaattcattcaccaccagagacgtcacactggaggagtgcgtcatgagtgtggtgaatgtaggaaaacctttagctacaaatctaacctcattgaacaccagagagttcacactggagaaaggccttatgaatgtggcgagtgcgggaaatcctttagacaaagctctagcctttttcgacaccagagagttcactctggagaaaggccttatcagtgctgtgagtgtgggaaatcctttagacaaatcttcaatctcattcgacatagaagagttcacactggagaaatgccttatcagtgcagtgattgtgggaaatcttttagctgcaaatcggaactcattcaacaccagagaattcacagtggagaaagaccttatgaatgcagagaatgtgggaaatcctttagacaattctctaacctcattcgacaccgcagcattcacactggtgataggccttatgagtgcagtgaatgtgagaaatcctttagccgcaaatttatcctgattcaacaccaaagagttcacactggagaaagaccttatgaatgcagtgaatgtggaaaatcctttacccgcaaatctgacctcattcaacaccggagaattcatactggcacaagaccttatgagtgcagtgaatgtggcaaatcttttagacagcgctctggcctcattcagcaccggagacttcatactggagaaaggccttatgaatgtagtgaatgtggaaagtcttttagccaaagtgctagcctcattcaacaccagagagttcacactggagaaaggccttatgaatgtagtgaatgtgggaaatcctttagccagagctctagcctcattcaacaccagagaggtcacactggagaaagaccttatgagtgcagtcaatgtgggaaaccctttacccacaaatcagaccttattcagcaccaaagagttcacactggagaaaggccttatgaatgcagtgaatgtgggaaatcctttagccgcaaatctaacctcattcgacatcggagagttcacactgaagaaaggccttagtaatgaactagtccgtaacttgaaagtatttcgatttcttggctttatatatcttgtggaaaggacgaaaagatctgccacccaattgccct

SEQ ID NO: 859 - DNA, 1013 bp, Homo sapiens
  source 1..1013: mol_type = genomic DNA
accgccaccatggccccggctgctgacatgacttctttgccactcggtgtcaaagtggaggactccgccttcggcaagccggcggggggaggcgcgggccaggcccccagcgccgccgcggccacggcagccgccatgggcgcggacgaggagggggccaagcccaaagtgtccccttcgctcctgcccttcagcgtggaggcgctcatggccgaccacaggaagccgggggccaaggagagcgccctggcgccctccgagggcgtgcaggcggcgggtggctcggcgcagccactgggcgtcccgccggggtcgctgggagccccggacgcgccctcttcgccgcggccgctcggccatttctcggtggggggactcctcaagctgccagaagatgcgctcgtcaaagccgagagccccgagaagcccgagaggaccccgtggatgcagagcccccgcttctccccgccgccggccaggcggctgagccccccagcctgcaccctccgcaaacacaagacgaaccgtaagccgcggacgcccttcaccaccgcgcagctgctggcgctggagcgcaagttccgccagaagcagtacctgtccatcgccgagcgcgcggagttctccagctcgctcagcctcactgagacgcaggtgaagatatggttccagaaccgccgcgccaaggcaaagagactacaagaggcagagctggagaagctgaagatggccgccaagcccatgctgccaccggctgccttcggcctctccttccctctcggcggccccgcagctgtagcggccgcggcgggtgcctcgctctacggtgcctctggccccttccagcgcgccgcgctgcctgtggcgcccgtgggactctacacggcccatgtgggctacagcatgtaccacctgacatagtaatgaactagtccgtaacttgaaagtatttcgatttcttggctttatatatcttgtggaaaggacgagccgcgacctgtgcctgtgcggaa

SEQ ID NO: 860 - DNA, 905 bp, Homo sapiens
  source 1..905: mol_type = genomic DNA
accgccaccatggcttctccgtccaaaggcaatgacttgttttcgcccgacgaggagggcccagcagtggtggccggaccaggcccggggcctgggggcgccgagggggccgcggaggagcgccgcgtcaaggtctccagcctgcccttcagcgtggaggcgctcatgtccgacaagaagccgcccaaggaggcgtccccgctgccggccgaaagcgcctcggccggggccaccctgcggccactgctgctgtcggggcacggcgctcgggaagcgcacagccccgggccgctggtgaagcccttcgagaccgcctcggtcaagtcggaaaattcagaagatggagcggcgtggatgcaggaacccggccgatattcgccgccgccaagacatatgagccctaccacctgcaccctgaggaaacacaagaccaatcggaagccgcgcacgccctttaccacatcccagctcctcgccctggagcgcaagttccgtcagaaacagtacctctccattgcagagcgtgcagagttctccagctctctgaacctcacagagacccaggtcaaaatctggttccagaaccgaagggccaaggcgaaaagactgcaggaggcagaactggaaaagctgaaaatggctgcaaaacctatgctgccctccagcttcagtctccctttccccatcagctcgcccctgcaggcagcgtccatatatggagcatcctacccgttccatagacctgtgcttcccatcccgcctgtgggactctatgccacgccagtgggatatggcatgtaccacctgtcctagtaatgaactagtccgtaacttgaaagtatttcgatttcttggctttatatatcttgtggaaaggacgaccggtcttacaagaggaaactaga

SEQ ID NO: 861 - DNA, 506 bp, Homo sapiens
  source 1..506: mol_type = genomic DNA
accgccaccatggcttctccgtccaaaggcaatgacttgttttcgcccgacgaggagggcccagcagtggtggccggaccaggcccggggcctgggggcgccgagggggccgcggaggagcgccgcgtcaaggtctccagcctgcccttcagcgtggaggcgctcatgtccgacaagaagccgcccaaggaggcgtccccgctgccggccgaaagcgcctcggccggggccaccctgcggccactgctgctgtcggggcacggcgctcgggaagcgcacagccccgggccgctggtgaagcccttcgagaccgcctcggtcaagtcggaaaattcagaagatggagcggcgtggatgcaggaacccggccgatattcgccgccgccaagtgagtgcgcgccggggcaggagtagtaatgaactagtccgtaacttgaaagtatttcgatttcttggctttatatatcttgtggaaaggacgaccgttgttccgacttactggacaa

SEQ ID NO: 862 - DNA, 3923 bp, Homo sapiens
  source 1..3923: mol_type = genomic DNA
accgccaccatgaagcggcgtttggatgaccaggagtcaccggtgtatgcagcccagcagcgtcggatccctggcagcacagaggcttttcctcaccagcaccgggtgcttgcccctgcccctcctgtgtatgaagcagtgtctgagaccatgcagtcagctacgggaattcagtactctgtaacacccagctaccaggtttcagccatgccacagagctccggcagtcatgggcccgctatagcagcagttcatagcagccatcatcacccaacagcggtgcagccccacggaggccaggtggtccagagtcatgctcatccagccccaccagttgcaccagtgcagggacagcagcaatttcagaggctgaaggtggaggatgcgctatcttatcttgaccaggtgaagctgcagtttggtagtcagcctcaggtctacaatgatttccttgacatcatgaaggaatttaaatctcagagcatcgacaccccaggagtgattagtcgtgtgtcccagctattcaaaggccaccccgatctgataatgggattcaacaccttcttgccccctggctacaaaattgaggtgcaaaccaatgacatggtgaatgtgacaactcctggccaggttcatcagattcccacccatggcatccagccacagcctcaaccaccaccccaacatccttcccagccttcagcccagtcagccccagctcctgcccagccagctcctcagcccccacctgccaaagtcagcaagccctcccaactgcaagcacatactccggccagtcagcagactcccccacttccaccgtatgcatccccacgttctccgccggtccagcctcacacaccagtgacaatctcgttgggaacggccccatccttgcagaacaatcaacctgtggagtttaatcatgccatcaactatgttaataagatcaagaacagatttcagggccaaccagacatctacaaagcattcctggagattttgcacacatatcagaaagagcagagaaatgccaaggaagctggaggaaactacactccagcattgacagagcaggaggtgtatgcccaggttgctcgtctctttaaaaaccaggaagatttgttgtcagagtttggacaattcctaccagatgccaacagctccgtgcttttaagcaaaacaactgctgagaaggttgattctgtgagaaatgatcatggaggcactgtcaagaagccccaactgaacaacaagccgcagaggcccagccagaatggctgccagatccgcagacatcctacaggaaccacccctccagttaagaagaaacccaaactgctcaatctgaaggattcttctatggcagatgccagcaaacatggtggtggaacagaatcgttattttttgataaggtccgaaaggctcttcggagtgcagaagcctacgaaaatttcctacgctgtcttgttatttttaaccaggaggtgatctctcgtgctgagcttgtgcaactagtctctcctttcctggggaaattccctgagttgtttaattggtttaaaaactttctgggctataaggagtctgtacatctggaaacttatccaaaggagcgagccacagagggcattgctatggagatagattatgcttcttgtaaacgattgggctccagctatcgagccttaccaaagagttaccagcagcccaagtgtacaggacggactcctctctgtaaagaggttttaaatgatacctgggtttccttcccttcgtggtctgaggactctacctttgtgagttccaagaagactcaatatgaagaacatatttatcgttgtgaagatgaacgctttgagcttgatgtagttttagagaccaatctggcaacaatccgggttctggaagcaatacagaagaagctttcccgcttgtctgctgaagaacaagccaaatttcgcttggacaacacccttgggggcacatcagaagtcatccatagaaaagcactccagaggatatatgctgataaagcagctgacatcattgatggtctgagaaagaatccctccattgctgttccaattgtccttaaaaggttgaagatgaaagaggaagaatggcgagaagctcagagaggctttaacaaagtatggcgagaacaaaatgagaaatactacttgaagtctctggaccaccaggggatcaactttaaacagaatgacaccaaggtcctgaggtctaagagcttactcaatgagattgagagtatctatgatgagaggcaagagcaggctacggaggagaatgctggtgtacctgttggcccacacctctcacttgcgtatgaagacaaacaaatactggaagatgctgctgctctgattatccaccatgtgaagaggcagacaggcattcagaaggaggacaaatataagataaaacaaatcatgcatcattttattccagatttgctctttgcccaaagaggtgatctctcagatgtggaggaagaggaagaagaagagatggatgtagatgaagccacaggggcagttaagaagcacaatggtgttgggggcagtccccctaagtccaagttactgtttagtaacacagcagctcaaaaattaagaggaatggatgaagtatacaacctcttctatgtcaacaacaactggtatatttttatgcgactgcaccagattctctgcctgaggctgctacggatttgttcccaagccgaacggcaaattgaagaagaaaaccgagagagagaatgggaacgggaagtgctgggcataaagcgagacaagagtgacagccctgccattcagctacgtctcaaagaacctatggatgttgatgtagaagattattacccagctttcctggacatggtgcggagcctgctggatggcaacatagactcatcacagtatgaagattcactgagagagatgttcaccattcatgcctacattgcctttaccatggacaaactgatccagagcattgtcagacagctgcagcatatcgtgagtgatgagatctgtgtgcaggtgactgacctttacctggcagaaaataataatggggccaccggaggccagctgaacacacagaactcaaggagcctcctggagtcaacgtatcagcggaaagctgagcagctaatgtcagatgagaattgctttaagcttatgtttattcagagccaaggccaggtccagctgactattgagcttctggacacagaagaggagaattcggatgaccctgtggaagcagagcgctggtcagactacgtggagcgatacatgaattcagatactacctcgcctgagcttcgtgaacatctagcacagaaaccagtatttctccccaggaatctacggcggatccggaagtgtcaacgtggtcgagagcagcaggaaaaggaagggaaggaaggaaacagcaagaagaccatggagaatgtggatagtctggataagctggagtgtagattcaagctgaattcctacaagatggtgtatgtgatcaaatcagaggactatatgtatcggaggaccgccctgctccgggctcatcagtcccatgagcgtgtaagcaagcgtctacatcagagattccaggcctgggtagataaatggaccaaggagcatgtgccccgtgaaatggcagcagagaccagcaagtggctcatgggtgaggggctggagggcctggtgccctgtaccaccacctgtgatacagagaccctgcattttgtgagcattaacaagtatcgtgtcaaatacggcacagtattcaaagccccttagtaatgaactagtccgtaacttgaaagtatttcgatttcttggctttatatatcttgtggaaaggacgaatgaggctcagctcatcacatcga

SEQ ID NO: 863 - DNA, 1766 bp, Homo sapiens
  source 1..1766: mol_type = genomic DNA
accgccaccatgggaccactgacatttagggatgtgaaaatagaattctctctagaggaatggcaatgcctggacactgcgcagcggaatttatatagagatgtgatgttagagaactacagaaacctggtcttccttgttatgtgttctcattttgcccaagatgtttggccagagcacagcataaaagattctttccaaaaagtgatactgagaacatatggaaaatatggacatgagaatttacagctaagaaaagaccataaaagtgtggatgcatgtaaggtgtacaaaggaggttataatggacttaaccagtgtttgacaactactgacagcaagatatttcagtgtgataaatatgtgaaagtctttcataaatttccaaatgtaaatagaaataagataagacatactggaaagaaacctttcaaatgtaaaaaccgtggcaaatcattttgcatgctttcacaattaactcaacataagaaaattcatactagagagtattcttacaaatgtgaagaatgtggtaaagcctttaactggtcctcaacccttactaaacataagataattcatactggagaaaaaccctacaaatgtgaagaatgtggcaaagcttttaaccggtcctcaaatcttactaaacataaaataattcatactggagagaaaccctacaaatgtgaagaatgtggcaaagcttttaaccggtcctcaacccttactaaacataaaagaattcatacagaagagaaaccctacaaatgtgaagaatgtggcaaggcctttaaccagttctcgattcttaataaacataagagaattcatatggaagataaaccctacaaatgtgaagaatgtggcaaagcctttagagtattctcaattcttaaaaaacataagataatccatactggggaaaaaccatacaaatgtgaagaatgtggcaaagcctttaaccagttctcaaaccttactaaacataagataattcatactggagagaaaccctacaaatgtgatgaatgtggcaaagcctttaaccagtcctcaacccttactaaacataaaagaattcatacgggagaaaaaccctacaaatgtgaagaatgtggcaaagcttttaaacagtcctcaacccttactgaacataagataattcatactggagagaaaccctacaaatgtgaaaaatgtggcaaggcctttagctggtcctcagcttttactaaacataagagaaatcatatggaagataaaccctacaaatgtgaagaatgtggcaaagcctttagtgtattctcaacccttactaaacataaaataattcatactagagaaaaaccctacaaatgtgaagaatgtggcaaagcctttaaccagtcctcaatttttactaaacataagataattcacactgaagggaaatcctacaaatgtgaaaaatgtggcaatgcttttaaccagtcctcaaaccttactgcacgtaagataatttatactggagagaaaccctacaaatatgaagaatgtgacaaagcctttaacaagttctcaacccttattacacatcagataatttatactggagagaaaccctgcaaacatgaatgtggcagagcctttaacaaatcctcaaattatactaaagagaaactacaaacctagtaatgaactagtccgtaacttgaaagtatttcgatttcttggctttatatatcttgtggaaaggacgactcagtattgggctaagttgggtg

SEQ ID NO: 864 - DNA, 1634 bp, Homo sapiens
  source 1..1634: mol_type = genomic DNA
accgccaccatgtgttctcattttgcccaagatgtttggccagagcacagcataaaagattctttccaaaaagtgatactgagaacatatggaaaatatggacatgagaatttacagctaagaaaagaccataaaagtgtggatgcatgtaaggtgtacaaaggaggttataatggacttaaccagtgtttgacaactactgacagcaagatatttcagtgtgataaatatgtgaaagtctttcataaatttccaaatgtaaatagaaataagataagacatactggaaagaaacctttcaaatgtaaaaaccgtggcaaatcattttgcatgctttcacaattaactcaacataagaaaattcatactagagagtattcttacaaatgtgaagaatgtggtaaagcctttaactggtcctcaacccttactaaacataagataattcatactggagaaaaaccctacaaatgtgaagaatgtggcaaagcttttaaccggtcctcaaatcttactaaacataaaataattcatactggagagaaaccctacaaatgtgaagaatgtggcaaagcttttaaccggtcctcaacccttactaaacataaaagaattcatacagaagagaaaccctacaaatgtgaagaatgtggcaaggcctttaaccagttctcgattcttaataaacataagagaattcatatggaagataaaccctacaaatgtgaagaatgtggcaaagcctttagagtattctcaattcttaaaaaacataagataatccatactggggaaaaaccatacaaatgtgaagaatgtggcaaagcctttaaccagttctcaaaccttactaaacataagataattcatactggagagaaaccctacaaatgtgatgaatgtggcaaagcctttaaccagtcctcaacccttactaaacataaaagaattcatacgggagaaaaaccctacaaatgtgaagaatgtggcaaagcttttaaacagtcctcaacccttactgaacataagataattcatactggagagaaaccctacaaatgtgaaaaatgtggcaaggcctttagctggtcctcagcttttactaaacataagagaaatcatatggaagataaaccctacaaatgtgaagaatgtggcaaagcctttagtgtattctcaacccttactaaacataaaataattcatactagagaaaaaccctacaaatgtgaagaatgtggcaaagcctttaaccagtcctcaatttttactaaacataagataattcacactgaagggaaatcctacaaatgtgaaaaatgtggcaatgcttttaaccagtcctcaaaccttactgcacgtaagataatttatactggagagaaaccctacaaatatgaagaatgtgacaaagcctttaacaagttctcaacccttattacacatcagataatttatactggagagaaaccctgcaaacatgaatgtggcagagcctttaacaaatcctcaaattatactaaagagaaactacaaacctagtaatgaactagtccgtaacttgaaagtatttcgatttcttggctttatatatcttgtggaaaggacgagcactaccgtcgaggaagtcaaca

SEQ ID NO: 865 - DNA, 1655 bp, Homo sapiens
  source 1..1655: mol_type = genomic DNA
accgccaccatggtagacaaaaccccagttatgtgttctcattttgcccaagatgtttggccagagcacagcataaaagattctttccaaaaagtgatactgagaacatatggaaaatatggacatgagaatttacagctaagaaaagaccataaaagtgtggatgcatgtaaggtgtacaaaggaggttataatggacttaaccagtgtttgacaactactgacagcaagatatttcagtgtgataaatatgtgaaagtctttcataaatttccaaatgtaaatagaaataagataagacatactggaaagaaacctttcaaatgtaaaaaccgtggcaaatcattttgcatgctttcacaattaactcaacataagaaaattcatactagagagtattcttacaaatgtgaagaatgtggtaaagcctttaactggtcctcaacccttactaaacataagataattcatactggagaaaaaccctacaaatgtgaagaatgtggcaaagcttttaaccggtcctcaaatcttactaaacataaaataattcatactggagagaaaccctacaaatgtgaagaatgtggcaaagcttttaaccggtcctcaacccttactaaacataaaagaattcatacagaagagaaaccctacaaatgtgaagaatgtggcaaggcctttaaccagttctcgattcttaataaacataagagaattcatatggaagataaaccctacaaatgtgaagaatgtggcaaagcctttagagtattctcaattcttaaaaaacataagataatccatactggggaaaaaccatacaaatgtgaagaatgtggcaaagcctttaaccagttctcaaaccttactaaacataagataattcatactggagagaaaccctacaaatgtgatgaatgtggcaaagcctttaaccagtcctcaacccttactaaacataaaagaattcatacgggagaaaaaccctacaaatgtgaagaatgtggcaaagcttttaaacagtcctcaacccttactgaacataagataattcatactggagagaaaccctacaaatgtgaaaaatgtggcaaggcctttagctggtcctcagcttttactaaacataagagaaatcatatggaagataaaccctacaaatgtgaagaatgtggcaaagcctttagtgtattctcaacccttactaaacataaaataattcatactagagaaaaaccctacaaatgtgaagaatgtggcaaagcctttaaccagtcctcaatttttactaaacataagataattcacactgaagggaaatcctacaaatgtgaaaaatgtggcaatgcttttaaccagtcctcaaaccttactgcacgtaagataatttatactggagagaaaccctacaaatatgaagaatgtgacaaagcctttaacaagttctcaacccttattacacatcagataatttatactggagagaaaccctgcaaacatgaatgtggcagagcctttaacaaatcctcaaattatactaaagagaaactacaaacctagtaatgaactagtccgtaacttgaaagtatttcgatttcttggctttatatatcttgtggaaaggacgaccagctcggcctttaggatcactt

SEQ ID NO: 866 - DNA, 1862 bp, Homo sapiens
  source 1..1862: mol_type = genomic DNA
accgccaccatgggaccactgacatttagggatgtgaaaatagaattctctctagaggaatggcaatgcctggacactgcgcagcggaatttatatagagatgtgatgttagagaactacagaaacctggtcttccttggtattgctgtctctaagccagacctgatcacctggctggagcaaggaaaagagccctggaatctgaagagacatgagatggtagacaaaaccccagttatgtgttctcattttgcccaagatgtttggccagagcacagcataaaagattctttccaaaaagtgatactgagaacatatggaaaatatggacatgagaatttacagctaagaaaagaccataaaagtgtggatgcatgtaaggtgtacaaaggaggttataatggacttaaccagtgtttgacaactactgacagcaagatatttcagtgtgataaatatgtgaaagtctttcataaatttccaaatgtaaatagaaataagataagacatactggaaagaaacctttcaaatgtaaaaaccgtggcaaatcattttgcatgctttcacaattaactcaacataagaaaattcatactagagagtattcttacaaatgtgaagaatgtggtaaagcctttaactggtcctcaacccttactaaacataagataattcatactggagaaaaaccctacaaatgtgaagaatgtggcaaagcttttaaccggtcctcaaatcttactaaacataaaataattcatactggagagaaaccctacaaatgtgaagaatgtggcaaagcttttaaccggtcctcaacccttactaaacataaaagaattcatacagaagagaaaccctacaaatgtgaagaatgtggcaaggcctttaaccagttctcgattcttaataaacataagagaattcatatggaagataaaccctacaaatgtgaagaatgtggcaaagcctttagagtattctcaattcttaaaaaacataagataatccatactggggaaaaaccatacaaatgtgaagaatgtggcaaagcctttaaccagttctcaaaccttactaaacataagataattcatactggagagaaaccctacaaatgtgatgaatgtggcaaagcctttaaccagtcctcaacccttactaaacataaaagaattcatacgggagaaaaaccctacaaatgtgaagaatgtggcaaagcttttaaacagtcctcaacccttactgaacataagataattcatactggagagaaaccctacaaatgtgaaaaatgtggcaaggcctttagctggtcctcagcttttactaaacataagagaaatcatatggaagataaaccctacaaatgtgaagaatgtggcaaagcctttagtgtattctcaacccttactaaacataaaataattcatactagagaaaaaccctacaaatgtgaagaatgtggcaaagcctttaaccagtcctcaatttttactaaacataagataattcacactgaagggaaatcctacaaatgtgaaaaatgtggcaatgcttttaaccagtcctcaaaccttactgcacgtaagataatttatactggagagaaaccctacaaatatgaagaatgtgacaaagcctttaacaagttctcaacccttattacacatcagataatttatactggagagaaaccctgcaaacatgaatgtggcagagcctttaacaaatcctcaaattatactaaagagaaactacaaacctagtaatgaactagtccgtaacttgaaagtatttcgatttcttggctttatatatcttgtggaaaggacgatttcctggttgcaaacaaagtgga

SEQ ID NO: 867 - DNA, 980 bp, Homo sapiens
  source 1..980: mol_type = genomic DNA
accgccaccatggaagagctcacggcttttgtatccaagtcttttgaccagaaaagcaaggacggtaacggcggaggcggaggcggcggaggtaagaaggattccattacgtaccgggaagttttggagagcggactggcgcgctcccgggagctggggacgtcggattccagcctccaggacatcacggagggcggcggccactgcccggtgcatttgttcaaggaccacgtagacaatgacaaggagaaactgaaagaattcggcaccgcgagagtggcagaagggatttatgaatgcaaagagaagcgcgaggacgtgaagtcggaggacgaggacgggcagaccaagctgaaacagaggcgcagccgcaccaacttcacgctggagcagctgaacgagctcgagcgactcttcgacgagacccattaccccgacgccttcatgcgcgaggagctcagccagcgcctggggctctccgaggcgcgcgtgcaggtttggttccagaaccggagagccaagtgccgcaaacaagagaatcagatgcataaaggcgtcatcttgggcacagccaaccacctagacgcctgccgagtggcaccctacgtcaacatgggagccttacggatgcctttccaacaggtccaggctcagctgcagctggaaggcgtggcccacgcgcacccgcacctgcacccgcacctggcggcgcacgcgccctacctgatgttccccccgccgcccttcgggctgcccatcgcgtcgctggccgagtccgcctcggccgccgccgtggtcgccgccgccgccaaaagcaacagcaagaattccagcatcgccgacctgcggctcaaggcgcggaagcacgcggaggccctggggctctagtaatgaactagtccgtaacttgaaagtatttcgatttcttggctttatatatcttgtggaaaggacgagaaagaatgaacctccagtgaaag

SEQ ID NO: 868 - DNA, 779 bp, Homo sapiens
  source 1..779: mol_type = genomic DNA
accgccaccatggaagagctcacggcttttgtatccaagtcttttgaccagaaaagcaaggacggtaacggcggaggcggaggcggcggaggtaagaaggattccattacgtaccgggaagttttggagagcggactggcgcgctcccgggagctggggacgtcggattccagcctccaggacatcacggagggcggcggccactgcccggtgcatttgttcaaggaccacgtagacaatgacaaggagaaactgaaagaattcggcaccgcgagagtggcagaagggatttatgaatgcaaagagaagcgcgaggacgtgaagtcggaggacgaggacgggcagaccaagctgaaacagaggcgcagccgcaccaacttcacgctggagcagctgaacgagctcgagcgactcttcgacgagacccattaccccgacgccttcatgcgcgaggagctcagccagcgcctggggctctccgaggcgcgcgtgcaggtttggttccagaaccggagagccaagtgccgcaaacaagagaatcagatgcataaaggcgtcatcttgggcacagccaaccacctagacgcctgccgagtggcaccctacgtcaacatgggagccttacggatgcctttccaacagatggagttttgctcttgtcgcccgggctggagtataatggcatagtaatgaactagtccgtaacttgaaagtatttcgatttcttggctttatatatcttgtggaaaggacgacccgctagccagttccactcacat

SEQ ID NO: 869 - DNA, 1289 bp, Homo sapiens
  source 1..1289: mol_type = genomic DNA
accgccaccatggatgaagaacctgaaagaactaagcgatgggaaggaggctatgaaagaacatgggagattcttaaagaagatgaatctggatcacttaaagctacaatagaagacattctattcaaggcaaagagaaaaagagtatttgagcaccatggacaagttcgacttggaatgatgcgccacctttatgtggtagtagatggatcaagaacaatggaagaccaagatttaaagcctaatagactgacgtgtactttaaagttgttggaatactttgtagaggaatattttgatcaaaatcctattagtcagattggaataattgtaactaagagtaaaagagctgaaaaattgactgaactttcaggaaacccaagaaaacatataacgtctttgaagaaagctgtggatatgacctgccatggagagccatctctttataattccctaagcatagctatgcagactctaaaacacatgcctggacatacaagtcgagaagtactaatcatctttagcagccttacaacttgcgatccatctaatatttatgatctaatcaagaccctaaaggcagctaaaattagagtatctgttattggattgtctgcagaagttcgcgtttgcactgtacttgctcgtgaaactggtggcacgtaccatgttattttagatgaaagccattacaaagagttgctcacacatcatgttagtcctcctcctgctagctcaagttctgaatgctcacttattcgtatgggatttcctcagcacaccattgcttctttatctgaccaggatgcaaaaccctctttcagcatggcgcatttggatggcaatactgagccagggcttacattaggaggctatttctgcccacagtgtcgggcaaagtactgtgagctacctgttgagtgtaaaatctgtggtcttactttggtgtctgctccccacttggcacggtcttaccatcatttgtttcctttggatgcttttcaagaaattcccctagaagaatataatggagaaagattttgttatggatgtcagggggaattgaaagaccaacatgtttatgtttgtgctgtgtgccaaaatgttttctgtgtggactgtgatgtttttgttcatgattctctacactgttgccctggctgtattcataagattccagctccttcaggtgtttagtaatgaactagtccgtaacttgaaagtatttcgatttcttggctttatatatcttgtggaaaggacgaagccttcgttaggcatgatgccag

SEQ ID NO: 870 - DNA, 1748 bp, Homo sapiens
  source 1..1748: mol_type = genomic DNA
accgccaccatggcaacctcatctgaagaagttttgctgattgtaaagaaagtgcgtcaaaagaagcaggatggagctctgtacctcatggcagaaagaattgcttgggcacctgaaggcaaagatagatttacaatcagccatatgtatgcagatattaaatgccagaaaattagtccagaaggaaaagctaaaattcagcttcagctggtcctacatgcaggggacacaactaacttccatttttccaatgaaagcacagcagtgaaagagcgagatgcagtaaaagaccttcttcagcagctgctgcccaaattcaagaggaaagcaaataaagaactggaagagaagaacagaatgctgcaagaagatcctgttttgtttcagctttataaagaccttgttgtgagtcaagtgatcagtgctgaggaattctgggccaatcgtttaaatgtgaatgcaacagatagttcttccacatccaatcataagcaggatgttggcatttctgctgcatttctggctgatgtccggccccaaactgatggctgtaacggtctaagatataatttaacttctgatatcattgagtccatatttaggacctatccagcagtaaaaatgaaatatgcagaaaatgttccccacaacatgacagagaaggaattctggacacgttttttccagtcccattattttcacagggatcggctgaatacagggtcaaaggatctctttgcagaatgtgccaaaatagatgaaaaaggcctaaaaacaatggtttcattaggagtgaaaaacccactactagatttaacagctttggaagataaaccattagatgagggctatggcatttcctctgtgccatctgcttccaattctaaatccataaaagagaatagtaatgctgccatcatcaagagatttaaccatcacagtgccatggtcctggcagctggactcagaaaacaagaagcacaaaatgaacaaactagtgagcccagcaacatggatggaaattccggagatgcagactgctttcagccagcagtcaaaagggcgaaattacaagagtccattgaatatgaagacttggggaaaaataattctgtaaaaacgattgcactaaacctcaagaagtcagataggtattatcatggtccaactccaatccagtcactacagtatgcaacaagtcaggacattattaattcttttcaaagtattagacaagaaatggaagcttatacacccaagttaactcaggttctctcaagtagtgctgccagtagtaccatcacagcactgtcacctggaggggcacttatgcagggaggaacacagcaagccataaaccagatggtgccaaatgatattcaatctgaattgaaacacttatatgtagctgttggagaacttctacgacatttctggtcctgctttcctgttaatacgccattcctagaagaaaaggtagtgaaaatgaaaagtaatttggaacgattccaagttacgaagctctgtccattccaagaaaagattcggagacagtatttaagcacaaatttggtaagtcacatagaagagatgctccagacagcctacaacaagctccacacatggcagtcacggcgtctgatgaagaaaacgtagtaatgaactagtccgtaacttgaaagtatttcgatttcttggctttatatatcttgtggaaaggacgacttatgcgagagaagccgcgtacg

SEQ ID NO: 871 - DNA, 1964 bp, Homo sapiens
  source 1..1964: mol_type = genomic DNA
accgccaccatgggaccattgcaatttagagatgtggccatagaattctctctggaggagtggcattgcctggacactgcacagcggaatctatataggaatgtgatgttagagaactacagtaacctggtcttccttggtattgttgtctctaagccagacctgatcgcccatctggagcaaggaaaaaaacctttgactatgaagagacatgagatggtagccaacccctcagttatatgttctcattttgcccaagatctttggccagagcagaacataaaagattctttccaaaaagtgatactgagaagatatgaaaaacgtggacatggaaatttacagttaataaaaaggtgtgaaagtgtagatgagtgtaaggtgcacacaggaggttataatggacttaaccagtgtagtacaactacccagagcaaagtatttcaatgtgataaatatgggaaagtctttcataaattttcaaattcaaatagacataatataagacatactgaaaaaaaacctttcaaatgcatagaatgtggcaaagcttttaaccagttctcaacccttataacacataagaaaattcatactggagagaaaccctacatttgtgaagaatgtggcaaagcctttaagtactcctctgcccttaatacacataagagaattcatactggagagaaaccatacaagtgtgataaatgtgacaaagcctttattgcatcctcaacccttagtaaacatgagatcattcatactggaaagaaaccctacaagtgtgaagaatgtggcaaagcttttaaccaatcctcgacacttactaaacataagaaaattcatactggagagaaaccctacaaatgtgaagaatgtggcaaagcttttaaccaatcctcaacacttactaaacataagaaaattcatactggagagaagccctacgtttgtgaagaatgtggcaaagcctttaagtactcccgtatccttactacacataagagaattcatactggagagaaaccatacaagtgtaataaatgtggcaaagcctttattgcatcctcaacccttagtagacatgagttcattcatatgggaaagaaacattacaaatgtgaagaatgtggcaaagccttcatttggtcctcagtcctaactagacataagagagttcatactggagagaagccctacaaatgtgaagaatgtggcaaagcctttaagtactcctctacccttagttcacataagagaagtcatactggagagaaaccctacaaatgtgaagaatgtggcaaagcctttgttgcatcctcaacccttagtaaacatgagatcattcatactggaaagaaaccctacaagtgtgaagaatgtggcaaagcttttaaccagtcctcatcccttactaaacataagaaaattcatactggagagaaaccctacaaatgtgaagaatgtggcaaagcttttaaccagtcctcttcccttactaaacataagaaaattcatactggagagaaaccctacaaatgtgaagaatgtggcaaagcttttaaccagtcctcaacccttattaaacataagaaaattcatactagagagaaaccctacaaatgtgaagaatgtggcaaagcttttcacctatccacacaccttactacacataagatacttcatactggagagaaaccttatagatgtagagaatgtggcaaagcttttaaccattctgcaaccctttcttcacataagaaaatccattctggagagaaaccatacgagtgtgataaatgtggcaaagcctttatttcaccctcaagccttagtagacatgagataattcatactggggagaaaccctagtaatgaactagtccgtaacttgaaagtatttcgatttcttggctttatatatcttgtggaaaggacgatcatgatgcggtcagagcaagccg

SEQ ID NO: 872 - DNA, 1655 bp, Homo sapiens
  source 1..1655: mol_type = genomic DNA
accgccaccatgatagaaagtgacacctcatccataatgtcaggaattattcgaaactcagggcaaaatcaccacccctctccacaggaatacaggcttctagccaccaccagcgatgatgaccttcccggggacctgcagtcgctgtcgtggctcacggcggtggatgtgcctcggctgcagcagatggcaagtggccgcgtggacctgggtggcccctgcgtgccacatccacacccaggtgccttggctggggtggccgacctgcatgtgggagccactccaagtccccttctccatggcccagcaggcatggccccccgaggcatgccaggtctgggccccataactggccacagagacagcatgagccagttccccgtggggggccagccctcatctggcctgcaggacccgccgcatctgtactcacctgccacccaaccacagttcccgctccccccgggtgcccagcagtgccctcctgtgggcctctatggccccccatttggggtgcggcccccctacccccagccccacgtggctgtgcattcatctcaagaactgcaccccaaacactaccccaagcccatctactcgtacagctgtctgatcgccatggccctgaagaacagcaagacaggcagcctgcctgtgagcgagatctacagcttcatgaaggagcacttcccctacttcaagacggcccccgacgggtggaagaactcggtgcggcacaacctgtctctgaacaagtgcttcgagaaggtggagaacaagatgagcggctcctcccgcaagggctgcctgtgggctctgaacctggcccgcatcgacaagatggaggaggagatgcacaagtggaagaggaaggacctggctgccatccaccggagtatggccaaccctgaggagttggacaagctgatctccgaccggcctgaaagctgccggcgccccggcaaaccgggggaaccagaggcccccgtgctgactcacgccaccacagtggccgtggcgcatggctgcctggctgtctcccagctcccaccccagccactgatgaccctgtccctgcagtcagtccccctgcaccaccaggtccagccccaggcacatcttgctccagactctccagcaccagcccagaccccgccactgcacgccctgccggacctcagccccagcccgctcccccaccccgccatgggaagggctcctgtagacttcatcaacatcagcaccgacatgaacactgaggtggatgccctcgacccgagcatcatggacttcgctctgcaggggaacctgtgggaggagatgaaggatgagggattcagcttggacacactgggcgcctttgcagactccccgcttggctgtgacctgggggcctcaggcctaacccctgcctcgggtggcagcgaccagtccttcccagacttgcaggtgacgggtctctacacagcgtactccactccggacagtgtggctgcatcgggcaccagctcctcctcccagtacctgggtgcacaggggaacaagcctatagccctgctttagtaatgaactagtccgtaacttgaaagtatttcgatttcttggctttatatatcttgtggaaaggacgaattagcaacggcagaatctgtggg

SEQ ID NO: 873 - DNA, 674 bp, Homo sapiens
  source 1..674: mol_type = genomic DNA
accgccaccatgcccagccctgtggatgcatcctcagcagacggtggcagcgggttgggttcccaccggagaaagcggaccaccttcagcaaagggcagctactggagctggagagggcgtttgcagcatggccctaccccaacatcagcacccatgagcacctggcctgggtcacttgccttcctgaggccaaggtacaggtgtggttccagaagcgctgggccaaaataatcaagaacaggaagtcaggaattctaagccctgggtctgagtgcccccagagctcctgttctcttccagacaccctccagcagccctgggatccccaaatgccaggccaacctccaccctccagcggcacacctcagcgcacctcagtgtgtcgacatagctcctgtccagctcctggcttgagtccacggcagggctgggaaggggctaaagctgtagccccatggggatcagctggggcttcagaggtccacccttctttagagcgagctactccccagacttcactaggcagcctgtctgacctcatctatgccttggccattgtcgtcaatgtggaccactcctagtaatgaactagtccgtaacttgaaagtatttcgatttcttggctttatatatcttgtggaaaggacgaactccagatgagagaacatcatat

SEQ ID NO: 874 - DNA, 2411 bp, Homo sapiens
  source 1..2411: mol_type = genomic DNA
accgccaccatgccagctaattggacctcacctcagaaatcctcagccctggctccagaggatcatggcagctcctatgagggatcagtgtccttcagggatgtggctatcgatttcagcagagaggaatggcggcacctggacccttctcagagaaacctgtaccgggatgtgatgctggagacctacagccacctgctctcagtaggatatcaagttcctgaagcagaggtggtcatgttggagcaaggaaaggaaccatgggcactgcagggtgagaggccacgtcagagctgcccaggagagaaattatgggaccataatcaatgtagaaaaatcctcagttataaacaagtatcctctcaacctcaaaaaatgtatcctggggagaaagcttatgaatgcgccaaatttgaaaagatattcacccagaagtcacagctcaaagtacacctgaaagttcttgcaggagaaaagctctatgtatgcattgaatgtgggaaggcttttgtacagaagccagaatttattatacaccagaaaacccatatgagagagaaaccctttaaatgcaatgaatgtggaaaatccttttttcaagtgtcgtccctcttcaggcatcagagaattcataccggagagaaactctatgaatgcagccagtgtgggaaaggcttctcttataactcagatctcagtatacatgagaaaattcatactggagagagacaccatgaatgcactgactgtggcaaagcattcacacaaaagtccacactcaagatgcatcagaaaatccatacaggcgagagatcctacatctgtattgaatgcggacaggccttcatccagaagacccatttgattgcacaccgaagaattcatactggagaaaaaccatatgagtgcagtaactgtggcaaatccttcatttccaagtcacaacttcaggtacatcaacgtgttcacacaagagtgaagccctatatatgtaccgaatatgggaaggtcttcagcaataattccaacctcgttacacataagaaagttcaaagtagagagaaatcttccatatgtactgagtgtgggaaggcctttacctacaggtcagagttgattattcatcagagaattcacactggagagaaaccttatgaatgcagtgactgtgggaaagccttcactcagaagtcagcactcacagtgcatcagagaattcatacaggagaaaaatcgtatatatgcatgaaatgtggactggccttcattcagaaggcacacttgattgcacatcaaataattcatactggagagaaacctcataaatgtggtcactgtgggaaattgtttacctccaagtcgcaactccatgttcataaacgaattcacacaggagaaaagccctatatgtgcaataaatgtgggaaggcattcaccaaccggtcaaatctcattacacatcagaaaactcatacaggagagaaatcttatatatgttccaaatgtggaaaggccttcacccagaggtcagacttgattacacatcagagaatccatactggggagaagccttatgaatgcaatacttgtggaaaagccttcactcagaagtcacacctcaatatacatcagaaaattcacactggagagagacagtatgaatgccacgaatgtgggaaagccttcaaccagaaatcaatactcattgttcatcagaaaattcatacaggagagaaaccctatgtatgcactgagtgtggaagagctttcatccgcaagtcaaactttattactcatcaaagaattcatactggagagaagccttatgaatgcagtgactgtgggaagtcctttacctccaagtctcagctcctggtgcatcagccagttcacacaggagagaaaccctatgtgtgtgccgagtgcgggaaggcctttagtggcaggtcaaatctcagtaagcaccagaaaactcataccggagaaaagccctacatttgttctgaatgtgggaagacctttcgacagaagtcagagttgattacacatcacagaattcatactggagagaaaccttatgagtgcagtgactgtgggaagtctttcactaaaaaatcacagctccaagtgcatcagcgaattcacactggagagaagccttacgtgtgtgctgagtgtgggaaggcctttactgacaggtccaatttgaataaacatcagacaacacacactggagacaaaccctacaagtgtggcatctgtgggaaaggcttcgttcagaaatcagtgttcagcgtccatcagagcagccacgcttagtaatgaactagtccgtaacttgaaagtatttcgatttcttggctttatatatcttgtggaaaggacgattggtcgtagtaccctagcgccaa

SEQ ID NO: 875 - DNA, 2246 bp, Homo sapiens
  source 1..2246: mol_type = genomic DNA
accgccaccatgctggagacctacagccacctgctctcagtaggatatcaagttcctgaagcagaggtggtcatgttggagcaaggaaaggaaccatgggcactgcagggtgagaggccacgtcagagctgcccaggagagaaattatgggaccataatcaatgtagaaaaatcctcagttataaacaagtatcctctcaacctcaaaaaatgtatcctggggagaaagcttatgaatgcgccaaatttgaaaagatattcacccagaagtcacagctcaaagtacacctgaaagttcttgcaggagaaaagctctatgtatgcattgaatgtgggaaggcttttgtacagaagccagaatttattatacaccagaaaacccatatgagagagaaaccctttaaatgcaatgaatgtggaaaatccttttttcaagtgtcgtccctcttcaggcatcagagaattcataccggagagaaactctatgaatgcagccagtgtgggaaaggcttctcttataactcagatctcagtatacatgagaaaattcatactggagagagacaccatgaatgcactgactgtggcaaagcattcacacaaaagtccacactcaagatgcatcagaaaatccatacaggcgagagatcctacatctgtattgaatgcggacaggccttcatccagaagacccatttgattgcacaccgaagaattcatactggagaaaaaccatatgagtgcagtaactgtggcaaatccttcatttccaagtcacaacttcaggtacatcaacgtgttcacacaagagtgaagccctatatatgtaccgaatatgggaaggtcttcagcaataattccaacctcgttacacataagaaagttcaaagtagagagaaatcttccatatgtactgagtgtgggaaggcctttacctacaggtcagagttgattattcatcagagaattcacactggagagaaaccttatgaatgcagtgactgtgggaaagccttcactcagaagtcagcactcacagtgcatcagagaattcatacaggagaaaaatcgtatatatgcatgaaatgtggactggccttcattcagaaggcacacttgattgcacatcaaataattcatactggagagaaacctcataaatgtggtcactgtgggaaattgtttacctccaagtcgcaactccatgttcataaacgaattcacacaggagaaaagccctatatgtgcaataaatgtgggaaggcattcaccaaccggtcaaatctcattacacatcagaaaactcatacaggagagaaatcttatatatgttccaaatgtggaaaggccttcacccagaggtcagacttgattacacatcagagaatccatactggggagaagccttatgaatgcaatacttgtggaaaagccttcactcagaagtcacacctcaatatacatcagaaaattcacactggagagagacagtatgaatgccacgaatgtgggaaagccttcaaccagaaatcaatactcattgttcatcagaaaattcatacaggagagaaaccctatgtatgcactgagtgtggaagagctttcatccgcaagtcaaactttattactcatcaaagaattcatactggagagaagccttatgaatgcagtgactgtgggaagtcctttacctccaagtctcagctcctggtgcatcagccagttcacacaggagagaaaccctatgtgtgtgccgagtgcgggaaggcctttagtggcaggtcaaatctcagtaagcaccagaaaactcataccggagaaaagccctacatttgttctgaatgtgggaagacctttcgacagaagtcagagttgattacacatcacagaattcatactggagagaaaccttatgagtgcagtgactgtgggaagtctttcactaaaaaatcacagctccaagtgcatcagcgaattcacactggagagaagccttacgtgtgtgctgagtgtgggaaggcctttactgacaggtccaatttgaataaacatcagacaacacacactggagacaaaccctacaagtgtggcatctgtgggaaaggcttcgttcagaaatcagtgttcagcgtccatcagagcagccacgcttagtaatgaactagtccgtaacttgaaagtatttcgatttcttggctttatatatcttgtggaaaggacgacttatattccggtgctggagctcc

SEQ ID NO: 876 - DNA, 2048 bp, Homo sapiens
  source 1..2048: mol_type = genomic DNA
accgccaccatggtgtcgctacccccgccgcagtctgacgtcacgctgccgggccccaccagactggagggcgagcgccaaggggacctcatgcaggcaccgggcctcccaggctcccctgccccacagagtaagcatgccggcttcagctgctcgtcatttgtgtccgacggccctccagagaggacaccctcactgcccccacacagcccccgcattgcgtcaccagggcccgagcaagtccagggccactgcccagccggccccggccctgggcccttcaggctctcaccctcagacaagtatcctggctttggctttgaggaggccgcagcaagcagccctgggcgattcctcaagggcagccacgcgcccttccacccgtacaagcggcctttccatgaggacgtcttcccagaggccgagaccaccctggccctcaaaggacactcctttaagaccccagggccgctggaggccttcgaggagatcccagtggacgtggcggaggccgaggccttcctgcctggcttctcagcagaggcctggtgtaacgggctcccctaccccagccaggagcatggcccccaagtcctgggttcagaggtcaaagtcaagcccccagttctggagagtggtgctgggatgttctgctaccagcctcccttgcagcatatgtactgctcctcccagccccccttccaccagtactcgccaggtggtggcagctaccccataccctacctgggctcctcacactatcagtaccagcgaatggcaccccaggccagcaccgatgggcaccagcctctcttcccaaaacccatctattcctacagcatcctcatcttcatggcccttaagaacagtaaaactgggagccttcccgtcagcgagatctacaattttatgacggagcactttccttacttcaagacagcacccgatggctggaagaattctgtccggcacaacctatccctcaacaagtgcttcgagaaggtggagaacaaatcaggaagttcctcccgcaagggctgcctgtgggccctcaatccggccaagatcgacaagatgcaagaggagctgcaaaaatggaagaggaaagatcccattgctgtgcgcaaaagcatggccaagccagaagagctggacagcctcattggagacaagagagaaaagctgggctccccactcctgggctgtccgccccctgggctgtccggctcaggccccatccggcccctggcacccccagctggcctctccccaccactgcactcactccacccagctccaggccccattcctggcaagaaccccctgcaggacctacttatggggcacacaccctcctgctatgggcagacatacttgcacctctcaccaggcctggcccctcctggacccccgcagccattgttcccacagccggacgggcaccttgagctgcgggcccagccaggcaccccccaggactcgcctctgcctgcccacaccccacccagccacagtgccaagctactggccgagccttccccagccaggactatgcacgacaccctgctgccagatggagaccttggcactgacctggatgccatcaatccctcactcactgacttcgacttccagggaaacctgtgggaacagttgaaggatgatagcttggccctcgaccccctggtactggtgacctcatccccgacatcatcttcgatgccaccaccccagccaccacctcactgcttcccccctgggccctgtctgacagagacaggcagtggggcaggtgacttggcagccccgggcagtggtggctccggggcactgggtgacctgcacctcaccaccctctactctgcctttatggagctggagcccacgccccccacggcccctgcaggcccctctgtgtacctcagccccagctccaagcccgtggccctggcatagtaatgaactagtccgtaacttgaaagtatttcgatttcttggctttatatatcttgtggaaaggacgatcagcgaccgggacgtcaatgcaa

SEQ ID NO: 877 - DNA, 1976 bp, Homo sapiens
  source 1..1976: mol_type = genomic DNA
accgccaccatggggataggggtgtctttattactgcagttttctctaacacctgggggctaccggagtgtgggccgaagcaggcgctgcagccgcggaagtatccccaggaacatccccaagaggagctggaaaaagcctcatccccagctctgcagtctccaggcagaggaagaaccgatgctggaacgtcgttgcaggggccccctggccatgggcctggcccagccccgactcctttctgggccctcccaggagtcaccccagaccctggggaaggagtcccgcgggctgaggcaacaaggcacgtcagtggcccagtctggtgcccaagccccaggcagggcccatcgctgtgcccactgtcgaaggcacttccctggctgggtggctctgtggcttcacacccgccggtgccaggcccggctgcccttgccctgccctgagtgtggccgtcgctttcgccatgcccccttcttagcactgcaccgccaggtccatgctgctgccaccccagacctgggctttgcctgccacctctgtgggcagagcttccgaggctgggtggccctggttctgcatctgcgggcccattcagctgcaaagcggcccatcgcttgtcccaaatgcgagagacgcttctggcgacgaaagcagcttcgagctcatctgcggcggtgccaccctcccgccccggaggcccggcccttcatatgcggcaactgtggccggagctttgcccagtgggaccagctagttgcccacaagcgggtgcacgtagctgaggccctggaggaggccgcagccaaggctctggggccccggcccaggggccgccccgcggtgaccgccccccggcccggtggagatgccgtcgaccgccccttccagtgtgcctgttgtggcaagcgcttccggcacaagcccaacttgatcgctcaccgccgcgtgcacacgggcgagcggccccaccagtgccccgagtgcgggaagcgctttaccaataagccctatctgacttcgcaccggcgcatccacaccggcgagaagccctacccgtgcaaagagtgcggccgccgcttccggcacaaacccaacctgctgtctcacagcaagattcacaagcgatccgaggggtcggcccaggccgcccccggcccggggagcccccagctgccagccggcccccaggagtccgcggccgagcccaccccggcggtacctctgaaaccggcccaggagccgccgccaggggccccgccagagcacccgcaggacccgatcgaagcccccccctccctctacagctgcgacgactgcggcaggagcttccggctggagcgcttcctgcgggcccaccagcggcagcacaccggggagcggcccttcacctgcgccgagtgcgggaagaacttcggcaagaagacgcacctggtggcgcactcgcgcgtgcactccggcgagcggcccttcgcctgcgaggagtgcggccgccgcttctcccagggcagccatctggcggcgcatcggcgcgaccacgcccccgatcggcccttcgtgtgtcccgactgcggcaaggccttccgccacaaaccctacctggcggcgcaccggcgcatccacaccggcgagaagccctacgtctgccccgactgcggcaaagccttcagccagaagtccaacctggtgtcgcaccggcgcatccacacgggcgagcggccctacgcctgtcccgactgcgaccgcagcttcagccagaagtccaacctcatcacccaccgcaagagccacatccgggacggcgccttctgctgtgccatctgtggccagaccttcgacgacgaggagagactcctggcccaccagaagaagcacgatgtctagtaatgaactagtccgtaacttgaaagtatttcgatttcttggctttatatatcttgtggaaaggacgatctgggcgccataacacacgtgtc

SEQ ID NO: 878 - DNA, 1805 bp, Homo sapiens
  source 1..1805: mol_type = genomic DNA
accgccaccatgctggaacgtcgttgcaggggccccctggccatgggcctggcccagccccgactcctttctgggccctcccaggagtcaccccagaccctggggaaggagtcccgcgggctgaggcaacaaggcacgtcagtggcccagtctggtgcccaagccccaggcagggcccatcgctgtgcccactgtcgaaggcacttccctggctgggtggctctgtggcttcacacccgccggtgccaggcccggctgcccttgccctgccctgagtgtggccgtcgctttcgccatgcccccttcttagcactgcaccgccaggtccatgctgctgccaccccagacctgggctttgcctgccacctctgtgggcagagcttccgaggctgggtggccctggttctgcatctgcgggcccattcagctgcaaagcggcccatcgcttgtcccaaatgcgagagacgcttctggcgacgaaagcagcttcgagctcatctgcggcggtgccaccctcccgccccggaggcccggcccttcatatgcggcaactgtggccggagctttgcccagtgggaccagctagttgcccacaagcgggtgcacgtagctgaggccctggaggaggccgcagccaaggctctggggccccggcccaggggccgccccgcggtgaccgccccccggcccggtggagatgccgtcgaccgccccttccagtgtgcctgttgtggcaagcgcttccggcacaagcccaacttgatcgctcaccgccgcgtgcacacgggcgagcggccccaccagtgccccgagtgcgggaagcgctttaccaataagccctatctgacttcgcaccggcgcatccacaccggcgagaagccctacccgtgcaaagagtgcggccgccgcttccggcacaaacccaacctgctgtctcacagcaagattcacaagcgatccgaggggtcggcccaggccgcccccggcccggggagcccccagctgccagccggcccccaggagtccgcggccgagcccaccccggcggtacctctgaaaccggcccaggagccgccgccaggggccccgccagagcacccgcaggacccgatcgaagcccccccctccctctacagctgcgacgactgcggcaggagcttccggctggagcgcttcctgcgggcccaccagcggcagcacaccggggagcggcccttcacctgcgccgagtgcgggaagaacttcggcaagaagacgcacctggtggcgcactcgcgcgtgcactccggcgagcggcccttcgcctgcgaggagtgcggccgccgcttctcccagggcagccatctggcggcgcatcggcgcgaccacgcccccgatcggcccttcgtgtgtcccgactgcggcaaggccttccgccacaaaccctacctggcggcgcaccggcgcatccacaccggcgagaagccctacgtctgccccgactgcggcaaagccttcagccagaagtccaacctggtgtcgcaccggcgcatccacacgggcgagcggccctacgcctgtcccgactgcgaccgcagcttcagccagaagtccaacctcatcacccaccgcaagagccacatccgggacggcgccttctgctgtgccatctgtggccagaccttcgacgacgaggagagactcctggcccaccagaagaagcacgatgtctagtaatgaactagtccgtaacttgaaagtatttcgatttcttggctttatatatcttgtggaaaggacgagattgaacggtacacgggctggca

SEQ ID NO: 879 - DNA, 1121 bp, Homo sapiens
  source 1..1121: mol_type = genomic DNA
accgccaccatgctccccagcgcggtcgcagcccacgccggtgcgtactgggacgttgtggcttcctccgcgctcctcaacctccccgctgcgcccggctttggcaacctgggcaagagtttcctgatcgagaatttgctgcgggtcgggggcgccccaacgcccaggctgcagccgcccgcgccccacgacccggcgaccgccctggccaccgcgggcgcgcagctccggcccctgcctgctagcccagttcccctaaagctgtgccccgcagccgaacaagttagccccgccggggcgccctacggaacgcggtgggcttttcaagtgctcagtccctctgcggacagtgcgaggctgccgggccgggctccgggggaccgagactgtaccttccagccttcagcgccagcaccttccaaacctttccttctgagcaccccgccattctactcggcgtgctgcggtgggtcctgtcggcgccctgcatcctccactgcttttccaagagaagagagcatgctgcctctcctgacacaggactctaattccaaagctcggaggggcattttaagaagagctgtcttttctgaggaccagagaaaggctctggagaaaatgtttcagaaacagaaatatatcagcaaaacagaccgaaagaaacttgccatcaacttgggactaaaggaatcacaggtgaaaatttggtttcagaacaggaggatgaaatggcggaattccaaagaaaaggaagtgctttccaacaggtgtatccaagaagtaggtcttcaagaggatcccctctcacggtctgctctgggtttcccttctccatgtccttcaatatgggacgtcccccaacagcactcaagtccaagatggagggagaattctccagaaccttcagaaagactaatccaggagagttcaggggcaccacccccagaagcaaattcactgcaaggtgccttatatttatgttctgaagaagaagctggaagcaagggtgtacttactggggctgtctagtaatgaactagtccgtaacttgaaagtatttcgatttcttggctttatatatcttgtggaaaggacgagaacgccgggaggtggtcggtcgg

SEQ ID NO: 880 - DNA, 1133 bp, Homo sapiens
  source 1..1133: mol_type = genomic DNA
accgccaccatgatgttccccggcctcctcgcgccccccgccgggtaccctagcctcctgcggcccacgcccaccttgacgctgccccagtccttgcagtcggcattttccggccactccagcttcctggtggaggatctgatccgcatcagccgaccccccgcctacctgccccgcagcgtgcccaccgccagcatgtcgccgcccaggcagggggcccccacggccctcaccgacacgggggcctcggacctgggctccccgggtcccggcagccgacggggcggctctccgccgactgccttctcccctgccagcgagacgacgtttctgaagtttggagtgaacgccatcctctcctcggggcccagaacagaaacatccccagccttgctccagagcgtccctcccaagaccttcgcctttccctacttcgaagggtcttttcagcctttcatcagatcttcttatttcccagcttcctccagcgtggtgcccatccccgggaccttctcctggccgctggccgcgcgcgggaagcctcggcggggcatgctgcgtcgagcagtcttctccgacgtgcagcggaaggcgctggagaagatgttccagaagcagaagtacatcagcaagcccgaccgcaagaagctggcggccaagctgggcctgaaagactcgcaggtgaaaatctggttccagaaccgacgcatgaaatggcggaactccaaggagcgcgaactcctgtctagcgggggctgtcgcgagcagaccctgcccaccaagctcaatccgcacccggacctcagcgacgtgggccagaagggccctgggaacgaagaggaggaggagggcccgggcagccccagccaccgcctggcctaccacgcgtcctccgacccccagcacctgcgggacccgcggctgccagggccgctgcccccctcgcccgcgcactcgagcagtcccgggaaaccttcggacttctcagattccgaggaggaagaggagggcgaggaacaggaggaaatcaccgtgtcctagtaatgaactagtccgtaacttgaaagtatttcgatttcttggctttatatatcttgtggaaaggacgatagcatgcgtctgagtcaagtatt

SEQ ID NO: 881 - DNA, 2696 bp, Homo sapiens
  source 1..2696: mol_type = genomic DNA
accgccaccatgggatcgttgacattttgggatgtgaccatagaattcgctctggaggagtggcaatgcctggacatggctcagcagaatttatataggaatgttatgttagagaactacagaaacctggtcttcctgggtatcgctgtctctaagctagacttgataacttgtctgaagcaagggaaagagccttggaatatgaagagacatgagatggtaactaaacccccagttattagttctcattttacacaagacttttggccagatcagagcataaaagattctttccaagaaataatattgagaacatatgcaagatgtggacataagaatttacgattaagaaaagattgtgaaagtgtcaatgagggtaagatgcacgaagaagcttataataaacttaaccaatgttggacaactacccagggaaaaatatttcagtgtaacaaatatgtgaaagtctttcataaatattcaaattcaaatagatataagattagacacactaaaaagaaaactttcaaatgtatgaaatgtagcaaatcatttttcatgctttcacacttaattcaacataagagaattcatactagagagaatatctacaaatgtgaagaacgtggcaaagcctttaaatggttctcaacccttattaaacataagataattcatactgaagacaaaccctacaaatataagaaatgtggcaaagcttttaacatctcttcaatgttcactaaatgtaagataattcatactggaaagaaaccctgcaaatgtgaagaatgtggcaaagtttttaacaattcctcaacccttatgaaacataagataattcatactgggaagaaaccatataaatgtgaagaatgtggcaaagcttttaagcaatcctcacaccttactagacataaagcaattcatactggagagaaaccctacaaatgcgaagaatgtggcaaagcttttaaccatttctcagcccttagaaaacatcagataattcatactggaaagaaaccctacaaatgtgaagaatgtggcaaagcttttagccagtcctcaacccttagaaaacatgagataattcatactgaagagaaaccctacaaatatgaagaatgcggcaaagcttttagcaatttgtcagcccttagaaaacatgagataattcatactggacagaaaccctacaaatgtgaagaatgtggtaaagcttttaagtggtcctcaaaacttactgtacataaggtaattcatactgcagagaaaccctgcaaatgtgaagaatgtggcaaagcttttaagcgtttctcagcccttagaaaacataagataattcatactggaaagcaaccctacaaatgtgaagaatgcagcaaagcttttagcaatttttcagcccttagaaaacatgagataattcatactggagagaaaccctacaaatgtgaagaatgtggtaaagcttttaagtggtcctcaaaacttactgtacataaggtaattcatatggaagagaaaccttgcaaatgtgaagaatgtggcaaagcttttaagcatttctcagcccttagaaaacataagataattcatactggaaagaaaccctacaaatgtgaagaatgtggcaaagcttttaacaattcctcaacccttatgaaacataagataattcatactgggaagaaaccatacaaatgtgaagaatgtggcaaagcttttaagcaatcttcacatcttactagacataaagcaattcatactggggagaaaccctacaaatgtgaagaatgtggcaaagcttttaaccacttctcagcccttagaaaacatcagataattcatactggaaagaaaccctacaaatgtgaagaatgtggcaaagcttttagccagtcctcaacccttagaaaacatgagataattcatactggagagaaaccctacaaatgtgaagaatgtggtaaagcttttaagtggtcctcacaccttactagacataaagtaattcatactgaagagaaaccctacaaatgtgaagaatgtggcaaggcttttaaccatttctcagcccttaggaaacataagataattcatactggaaagaaaccctacaaatgtgaagaatgtggcaaagcttttagccagtcctcaactcttagaaaacatgagataattcatactggagagaaaccctacaaatgtgaagaatgtggtaaagcttttaagtggtcctcaaaacttactgtacataaggtaattcatactgcagagaaaccctgcaaatgtgaagaatgtggcaaagcttttaagcatttctcagcccttagaaaacataagataattcatactggaaagaaaccctataaatgtgaagaatgtggcaaagcttttaacaattcctcaacccttagaaaacatgagataattcatactggagagaaatcctacaaatgtgaagaatgtggtaaagcttttcagtggtcctcaaaacttactttacataaggtaattcatatggagagaaaccctgcaaatgtgaagaatgtggcaaagcttttaaacatttctcagcccttagaaaacatgagatagtaatgaactagtccgtaacttgaaagtatttcgatttcttggctttatatatcttgtggaaaggacgagctcacggtctatccgtggaaaca

SEQ ID NO: 882 - DNA, 1139 bp, Homo sapiens
  source 1..1139: mol_type = genomic DNA
accgccaccatgctggccgccaacccaggcaagaccccgatcagccttctgcaggagtatgggaccagaatagggaagacgcctgtgtacgaccttctcaaagccgagggccaagcccaccagcctaatttcaccttccgggtcaccgttggcgacaccagctgcactggtcagggccccagcaagaaggcagccaagcacaaggcagctgaggtggccctcaaacacctcaaaggggggagcatgctggagccggccctggaggacagcagttctttttctcccctagactcttcactgcctgaggacattccggtttttactgctgcagcagctgctaccccagttccatctgtagtcctaaccaggagcccccccatggaactgcagccccctgtctcccctcagcagtctgagtgcaaccccgttggtgctctgcaggagctggtggtgcagaaaggctggcggttgccggagtacacagtgacccaggagtctgggccagcccaccgcaaagaattcaccatgacctgtcgagtggagcgtttcattgagattgggagtggcacttccaaaaaattggcaaagcggaatgcggcggccaaaatgctgcttcgagtgcacacggtgcctctggatgcccgggatggcaatgaggtggagcctgatgatgaccacttctccattggtgtgggctcccgcctggatggtcttcgaaaccggggcccaggttgcacctgggattctctacgaaattcagtaggagagaagatcctgtccctccgcagttgctccctgggctccctgggtgccctgggccctgcctgctgccgtgtcctcagtgagctctctgaggagcaggcctttcacgtcagctacctggatattgaggagctgagcctgagtggactctgccagtgcctggtggaactgtccacccagccggccactgtgtgtcatggctctgcaaccaccagggaggcagcccgtggtgaggctgcccgccgtgccctgcagtacctcaagatcatggcaggcagcaagtagtaatgaactagtccgtaacttgaaagtatttcgatttcttggctttatatatcttgtggaaaggacgaagggatgccctactatattactcc

SEQ ID NO: 883 - DNA, 950 bp, Homo sapiens
  source 1..950: mol_type = genomic DNA
accgccaccatgtcactcctggcgaccctggggctggagctggacagggccctgctcccagctagtgggctgggatggctcgtagactatgggaaactccccccggcccctgcccccctggctccctatgaggtccttgggggagccctggagggcgggcttccagtggggggagagcccctggcaggtgatggcttctctgactggatgactgagcgagttgatttcacagctctcctccctctggagcctcccttaccccccggcaccctcccccaaccttccccaaccccacctgacctggaagctatggcctccctcctcaagaaggagctggaacagatggaagacttcttcctagatgccccgcccctcccaccaccctccccgccgccactaccaccaccaccactaccaccagccccctccctccccctgtccctcccctcctttgacctcccccagccccctgtcttggatactctggacttgctggccatctactgccgcaacgaggccgggcaggaggaagtggggatgccgcctctgcccccgccacagcagccccctcctccttctccacctcaaccttctcgcctggccccctacccacatcctgccaccacccgaggggaccgcaagcaaaagaagagagaccagaacaagtcggcggctctgaggtaccgccagcggaagcgggcagagggtgaggccctggagggcgagtgccaggggctggaggcacggaatcgcgagctgaaggaacgggcagagtccgtggagcgcgagatccagtacgtcaaggacctgctcatcgaggtttacaaggcccggagccagaggacccgtagctgctagtaatgaactagtccgtaacttgaaagtatttcgatttcttggctttatatatcttgtggaaaggacgagcatgggaagtggacacgtacgca

SEQ ID NO: 884 - DNA, 1553 bp, Homo sapiens
  source 1..1553: mol_type = genomic DNA
accgccaccatgggagacgacagaccgtttgtgtgcaatgccccgggctgtggacagagatttacaaacgaggaccacctggcagttcataaacacaagcatgagatgacattgaaatttggcccagcccgaactgactcagtcatcattgcagatcaaacgcctactccaactagattcctgaagaactgtgaggaggtgggactcttcaatgaactagctagctcctttgaacatgaattcaagaaagctgcagatgaggatgagaaaaaggctgctgctgggccccttgacatgtctctgccttccacaccagacatcaaaatcaaagaagaagagccagtggaggtagactcatccccacctgatagccctgcctctagtccctgttccccaccactgaaggagaaggaggttaccccaaagcctgttctgatctctacccccacacccaccattgtacgtcctggctccctgcctctccacttgggctatgatccacttcatccaacccttccctccccaacctctgtcatcacacaggctccaccatccaacaggcaaatggggtctcccactggctccctccctcttgtcatgcatcttgctaatggacagaccatgcctgtgttgccagggcctccagtacagatgccgtctgttatatcgctggccagacctgtgtccatggtgcccaacattcctggtatccctggcccaccagttaacagtagtggctccatttctccctctggccaccctataccatcagaagccaagatgagactgaaagccaccctaactcaccaagtctcctcaatcaatggtggttgtggaatggtggtgggtactgccagcaccatggtgacagcccgcccagagcagagccagattctcatccagcaccctgatgccccatcccctgcccagccacaggtctcaccagctcagcccacccctagtactggggggcgacggcggcgcacagtagatgaagatccagatgagcgacggcagcgctttctggagcgcaaccgggctgcagcctcccgctgccgccaaaagcgaaagctgtgggtgtcctccctagagaagaaggccgaagaactcacttctcagaacattcagctgagtaatgaagtcacattactacgcaatgaggtggcccagttgaaacagctactgttagctcataaagactgcccagtcactgcactacagaaaaagactcaaggctatttagaaagccccaaggaaagctcagagccaacgggttctccagcccctgtgattcagcacagctcagcaacagcccctagcaatggcctcagtgttcgctctgcagctgaagctgtggccacctcggtcctcactcagatggccagccaaaggacagaactgagcatgccgatacaatcgcatgtaatcatgaccccacagtcccagtctgcgggcagatagtaatgaactagtccgtaacttgaaagtatttcgatttcttggctttatatatcttgtggaaaggacgacagtctgggccgtcgtgcccagtt

SEQ ID NO: 885 - DNA, 455 bp, Homo sapiens
  source 1..455: mol_type = genomic DNA
accgccaccatgggagacgacagaccgtttgtgtgcaatgccccgggctgtggacagagatttacaaacgaggaccacctggcagttcataaacacaagcatgagatgacattgaaatttggcccagcccgaactgactcagtcatcattgcagatcaaacgcctactccaactagattcctgaagaactgtgaggaggtgggactcttcaatgaactagctagctcctttgaacatgaattcaagaaagctgcagatgaggatgagaaaaaggcaagaagcaggactgttgccaaaaaactggtggtattcagacctaggctatttttattgtgctttgggataattttcttaattggttagtaatgaactagtccgtaacttgaaagtatttcgatttcttggctttatatatcttgtggaaaggacgaccactcttatcgtatatttcacgt

SEQ ID NO: 886 - DNA, 2114 bp, Homo sapiens
  source 1..2114: mol_type = genomic DNA
accgccaccatgggggagccggctggggttgccggcaccatggagtcaccttttagcccgggactctttcacaggctggatgaagattgggattctgctctctttgctgaactcggttatttcacagacactgatgagctgcaattggaagcagcaaatgagacgtatgaaaacaattttgataatcttgattttgatttggatttgatgccttgggagtcagacatttgggacatcaacaaccaaatctgtacagttaaagatattaaggcagaacctcagccactttctccagcctcctcaagttattcagtctcgtctcctcggtcagtggactcttattcttcaactcagcatgttcctgaggagttggatttgtcttctagttctcagatgtctcccctttccttatatggtgaaaactctaatagtctctcttcagcggagccactgaaggaagataagcctgtcactggtcctaggaacaagactgaaaatggactgactccaaagaaaaaaattcaggtgaattcaaaaccttcaattcagcccaagcctttattgcttccagcagcacccaagactcaaacaaactccagtgttccagcaaaaaccatcattattcagacagtaccaacgcttatgccattggcaaagcagcaaccaattatcagtttacaacctgcacccactaaaggccagacggttttgctgtctcagcctactgtggtacaacttcaagcacctggagttctgccctctgctcagccagtccttgctgttgctgggggagtcacacagctccctaatcacgtggtgaatgtggtaccagccccttcagcgaatagcccagtgaatggaaaactttccgtgactaaacctgtcctacaaagtaccatgagaaatgtcggttcagatattgctgtgctaaggagacagcaacgtatgataaaaaatcgagaatccgcttgtcagtctcgcaagaagaagaaagaatatatgctagggttagaggcgagattaaaggctgccctctcagaaaacgagcaactgaagaaagaaaatggaacactgaagcggcagctggatgaagttgtgtcagagaaccagaggcttaaagtccctagtccaaagcgaagagttgtctgtgtgatgatagtattggcatttataatactgaactatggacctatgagcatgttggaacaggattccaggagaatgaaccctagtgtgagccctgcaaatcaaaggaggcaccttctaggattttctgctaaagaggcacaggacacatcagatggtattatccagaaaaacagctacagatatgatcattctgtttcaaatgacaaagccctgatggtgctaactgaagaaccattgctttacattcctccacctccttgtcagcccctaattaacacaacagagtctctcaggttaaatcatgaacttcgaggatgggttcatagacatgaagtagaaaggaccaagtcaagaagaatgacaaataatcaacagaaaacccgtattcttcagggtgctctggaacagggctcaaattctcagctgatggctgttcaatacacagaaaccactagtagtatcagcaggaactcagggagtgagctacaagtgtattatgcttcacccagaagttatcaagacttttttgaagccatccgcagaaggggagacacattttatgttgtgtcatttcgaagggatcacctgctgttaccagctaccacccataacaagaccacaagaccaaaaatgtcaattgtgttaccagcaataaacataaatgagaatgtgatcaatgggcaggactacgaagtgatgatgcagattgactgtcaggtgatggacaccaggatcctccatatcaaaagttcgtcagttcctccttacctccgagatcagcagaggaatcaaaccaacaccttctttggctcccctcccgcagccacagaggcaacccacgttgtcagcaccatccctgagtcattacaatagtaatgaactagtccgtaacttgaaagtatttcgatttcttggctttatatatcttgtggaaaggacgatccgcggaatacagtggtctgtct

SEQ ID NO: 887 - DNA, 917 bp, Homo sapiens
  source 1..917: mol_type = genomic DNA
accgccaccatggaagattcccacaagagtaccacgtcagagacagcacctcaacctggttcagcagttcagggagctcacatttctcatattgctcaacaggtatcatctttatcagaaagtgaggagtcccaggactcatccgacagcataggctcctcacagaaagcccacgggatcctagcacggcgcccatcttacagaaaaattttgaaagacttatcttctgaagatacacggggcagaaaaggagacggagaaaattctggagtttctgctgctgtcacttctatgtctgttccaactcccatctatcagactagcagcggacagtacattgccattgccccaaatggagccttacagttggcaagtccaggcacagatggagtacagggacttcagacattaaccatgacaaattcaggcagtactcagcaaggtacaactattcttcagtatgcacagacctctgatggacagcagatacttgtgcccagcaatcaggtggtcgtacaaactgcatcaggagatatgcaaacatatcagatccgaactacaccttcagctacttctctgccacaaactgtggtgatgacatctcctgtgactctcacctctcagacaactaagacagatgacccccaattgaaaagagaaataaggttaatgaaaaacagagaagctgctcgagaatgtcgcagaaagaagaaagaatatgtgaaatgcctggaaaaccgagttgcagtcctggaaaatcaaaataaaactctaatagaagagttaaaaactttgaaggatctttattccaataaaagtgtttagtaatgaactagtccgtaacttgaaagtatttcgatttcttggctttatatatcttgtggaaaggacgaacgtccgattgagccatcagggtt

SEQ ID NO: 888 - DNA, 422 bp, Homo sapiens
  source 1..422: mol_type = genomic DNA
accgccaccatgatgcttcaacacccaggccaggtctctgcctcggaagaagagctgaggtttgccatccagaacaagcacctctgccaccggatgtcctctgcgctggaatcagtcactgtcagcgacagacccctcggggtgtccatcacaaaagccgaggtagcccctgaagaagatgaaaggaaaaagaggcgacgagaaagaaataagattgcagctgcaaagtgccgaaacaagaagaaggagaagacggagtgcctgcagaaactcccaaggcccttttgggtccagaagacctgcatatgggctgttgactcatgcaaatagtaatgaactagtccgtaacttgaaagtatttcgatttcttggctttatatatcttgtggaaaggacgagtaagtcgtgttcctaggtatcct

SEQ ID NO: 889 - DNA, 509 bp, Homo sapiens
  source 1..509: mol_type = genomic DNA
accgccaccatgatgcttcaacacccaggccaggtctctgcctcggaagtgagtgcttctgccatcgtcccctgcctgtcccctcctgggtcactggtgtttgaggattttgctaacctgacgccctttgtcaaggaagagctgaggtttgccatccagaacaagcacctctgccaccggatgtcctctgcgctggaatcagtcactgtcagcgacagacccctcggggtgtccatcacaaaagccgaggtagcccctgaagaagatgaaaggaaaaagaggcgacgagaaagaaataagattgcagctgcaaagtgccgaaacaagaagaaggagaagacggagtgcctgcagaaactcccaaggcccttttgggtccagaagacctgcatatgggctgttgactcatgcaaatagtaatgaactagtccgtaacttgaaagtatttcgatttcttggctttatatatcttgtggaaaggacgagaggagacgctttgacgtgcagtt

SEQ ID NO: 890 - DNA, 476 bp, Homo sapiens
  source 1..476: mol_type = genomic DNA
accgccaccatgtcctctgcgctggaatcagtcactgtcagcgacagacccctcggggtgtccatcacaaaagccgaggtagcccctgaagaagatgaaaggaaaaagaggcgacgagaaagaaataagattgcagctgcaaagtgccgaaacaagaagaaggagaagacggagtgcctgcagaaagagtcggagaagctggaaagtgtgaatgctgaactgaaggctcagattgaggagctcaagaacgagaagcagcatttgatatacatgctcaaccttcatcggcccacgtgtattgtccgggctcagaatgggaggactccagaagatgagagaaacctctttatccaacagataaaagaaggaacattgcagagctagtaatgaactagtccgtaacttgaaagtatttcgatttcttggctttatatatcttgtggaaaggacgaccggtgttcaccgggtacgagcct

SEQ ID NO: 891 - DNA, 647 bp, Homo sapiens
  source 1..647: mol_type = genomic DNA
accgccaccatgatgcttcaacacccaggccaggtctctgcctcggaagtgagtgcttctgccatcgtcccctgcctgtcccctcctgggtcactggtgtttgaggattttgctaacctgacgccctttgtcaaggaagagctgaggtttgccatccagaacaagcacctctgccaccggatgtcctctgcgctggaatcagtcactgtcagcgacagacccctcggggtgtccatcacaaaagccgaggtagcccctgaagaagatgaaaggaaaaagaggcgacgagaaagaaataagattgcagctgcaaagtgccgaaacaagaagaaggagaagacggagtgcctgcagaaagagtcggagaagctggaaagtgtgaatgctgaactgaaggctcagattgaggagctcaagaacgagaagcagcatttgatatacatgctcaaccttcatcggcccacgtgtattgtccgggctcagaatgggaggactccagaagatgagagaaacctctttatccaacagataaaagaaggaacattgcagagctagtaatgaactagtccgtaacttgaaagtatttcgatttcttggctttatatatcttgtggaaaggacgaccatacgcgaaagcaatcaacaca

SEQ ID NO: 892 - DNA, 1565 bp, Homo sapiens
  source 1..1565: mol_type = genomic DNA
accgccaccatgagtgatgacaaaccctttctatgtactgcgcctggatgtggccagcgttttaccaacgaggatcatttggctgtccataaacataaacatgagatgacactgaaatttggtccagcacgtaatgacagtgtcattgtggctgatcagaccccaacaccaacaagattcttgaaaaactgtgaagaagtgggtttgtttaatgagttggcgagtccatttgagaatgaattcaagaaagcttcagaagatgacattaaaaaaatgcctctagatttatcccctcttgcaacacctatcataagaagcaaaattgaggagccttctgttgtagaaacaactcaccaggatagtcctttacctcacccagagtctactaccagtgatgagaaggaagtaccattggcacaaactgcacagcccacatcagctattgttcgtccagcatcattacaggttcccaatgtgctgcttacaagttctgactcaagtgtaattattcagcaggcagtaccttcaccaacctcaagtactgtaatcacccaggcaccatcctctaacaggccaattgtccctgtaccaggcccatttcctcttctgttacatcttcctaatggacaaaccatgcctgttgctattcctgcatcaattacaagttctaatgtgcatgttccagctgcagtcccactcgttcgaccagtcaccatggtgcctagtgttccaggaatcccaggtccttcctctccccaaccagtacagtcagaagcaaaaatgagattaaaagctgctttgacccagcaacatcctccagttaccaatggtgatactgtcaaaggtcatggtagcggattggttaggactcagtcagaggaatctcgaccgcagtcattacaacagccagccacatccactacagaaactccggcttctccagctcacacaactccacagacccaaagtacaagtggtcgtcggagaagagcagctaacgaagatcctgatgaaaaaaggagaaagtttttagagcgaaatagagcagcagcttcaagatgccgacaaaaaaggaaagtctgggttcagtctttagagaagaaagctgaagacttgagttcattaaatggtcagctgcagagtgaagtcaccctgctgagaaatgaagtggcacagctgaaacagcttcttctggctcataaagattgccctgtaaccgccatgcagaagaaatctggctatcatactgctgataaagatgatagttcagaagacatttcagtgccgagtagtccacatacagaagctatacagcatagttcggtcagcacatccaatggagtcagttcaacctccaaggcagaagctgtagccacttcagtcctcacccagatggcggaccagagtacagagcctgctctttcacagatcgttatggctccttcctcccagtcacagccctcaggaagttagtaatgaactagtccgtaacttgaaagtatttcgatttcttggctttatatatcttgtggaaaggacgacaggtcagatgtagcatgcgaatt

SEQ ID NO: 893 - DNA, 1445 bp, Homo sapiens
  source 1..1445: mol_type = genomic DNA
accgccaccatgtactgcgcctggatgtggccagatcagaccccaacaccaacaagattcttgaaaaactgtgaagaagtgggtttgtttaatgagttggcgagtccatttgagaatgaattcaagaaagcttcagaagatgacattaaaaaaatgcctctagatttatcccctcttgcaacacctatcataagaagcaaaattgaggagccttctgttgtagaaacaactcaccaggatagtcctttacctcacccagagtctactaccagtgatgagaaggaagtaccattggcacaaactgcacagcccacatcagctattgttcgtccagcatcattacaggttcccaatgtgctgcttacaagttctgactcaagtgtaattattcagcaggcagtaccttcaccaacctcaagtactgtaatcacccaggcaccatcctctaacaggccaattgtccctgtaccaggcccatttcctcttctgttacatcttcctaatggacaaaccatgcctgttgctattcctgcatcaattacaagttctaatgtgcatgttccagctgcagtcccactcgttcgaccagtcaccatggtgcctagtgttccaggaatcccaggtccttcctctccccaaccagtacagtcagaagcaaaaatgagattaaaagctgctttgacccagcaacatcctccagttaccaatggtgatactgtcaaaggtcatggtagcggattggttaggactcagtcagaggaatctcgaccgcagtcattacaacagccagccacatccactacagaaactccggcttctccagctcacacaactccacagacccaaagtacaagtggtcgtcggagaagagcagctaacgaagatcctgatgaaaaaaggagaaagtttttagagcgaaatagagcagcagcttcaagatgccgacaaaaaaggaaagtctgggttcagtctttagagaagaaagctgaagacttgagttcattaaatggtcagctgcagagtgaagtcaccctgctgagaaatgaagtggcacagctgaaacagcttcttctggctcataaagattgccctgtaaccgccatgcagaagaaatctggctatcatactgctgataaagatgatagttcagaagacatttcagtgccgagtagtccacatacagaagctatacagcatagttcggtcagcacatccaatggagtcagttcaacctccaaggcagaagctgtagccacttcagtcctcacccagatggcggaccagagtacagagcctgctctttcacagatcgttatggctccttcctcccagtcacagccctcaggaagttagtaatgaactagtccgtaacttgaaagtatttcgatttcttggctttatatatcttgtggaaaggacgaacacagggcagctcagtaacactc

SEQ ID NO: 894 - DNA, 3839 bp, Homo sapiens
  source 1..3839: mol_type = genomic DNA
accgccaccatggcggtgcggaagaaggacggcggccccaacgtgaagtactacgaggccgcggacaccgtgacccagttcgacaacgtgcggctgtggctcggcaagaactacaagaagtatatacaagctgaaccacccaccaacaagtccctgtctagcctggttgtacagttgctacaatttcaggaagaagtttttggcaaacatgtcagcaatgcaccgctcactaaactgccgatcaaatgtttcctagatttcaaagcgggaggctccttgtgccacattcttgcagctgcctacaaattcaagagtgaccagggatggcggcgttacgatttccagaatccatcacgcatggaccgcaatgtggaaatgtttatgaccattgagaagtccttggtgcagaataattgcctgtctcgacctaacatttttctgtgcccagaaattgagcccaaactactagggaaattaaaggacattatcaagagacaccagggaacagtcactgaggataagaacaatgcctcccatgttgtgtatcctgtcccggggaatctagaagaagaggaatgggtacgaccagtcatgaagagggataagcaggttcttctgcactggggctactatcctgacagttacgacacgtggatcccagcgagtgaaattgaggcatctgtggaagatgctccaactcctgagaaacctaggaaggttcatgcaaagtggatcctggacaccgacaccttcaatgaatggatgaatgaggaagactatgaagtaaatgatgacaaaaaccctgtctcccgccgaaagaagatttcagccaagacactgacagatgaggtgaacagcccagattcagatcgacgggacaagaaggggggaaactataagaagaggaagcgctccccctctccttcaccaaccccagaagcaaagaagaaaaatgctaagaaaggtccctcaacaccttacactaagtcaaagcgtggccacagagaagaggagcaagaagacctgacaaaggacatggacgagccctcaccagtccccaatgtagaagaggtgacacttcccaaaacagtcaacacaaagaaagactcagagtcggccccagtcaaaggcggcaccatgaccgacctggatgaacaggaagatgaaagcatggagacgacgggcaaggatgaggatgagaacagtacggggaacaagggagagcagaccaagaatccagacctgcatgaggacaatgtgactgaacagacccaccacatcatcattcccagctacgctgcctggtttgactacaatagtgttcatgccattgagcggagggctctccccgagttcttcaacggcaagaacaagtccaagactccagagatctacctggcctatcgaaactttatgattgacacttaccgactgaacccccaagagtatcttacctctaccgcctgccgccgaaacctagcgggtgatgtctgtgccatcatgagggtccatgccttcctagaacagtggggtcttattaactaccaggtggatgctgagagtcgaccaaccccaatggggcctccgcctacctctcacttccatgtcttggctgacacaccatcagggctggtgcctctgcagcccaagacacctcagggccgccaggttgatgctgataccaaggctgggcgaaagggcaaagagctggatgacctggtgccagagacggctaagggcaagccagagctgcagacctctgcttcccaacaaatgctcaactttcctgacaaaggcaaagagaaaccaacagacatgcaaaactttgggctgcgcacagacatgtacacaaaaaagaatgttccctccaagagcaaggctgcagccagtgccactcgtgagtggacagaacaggaaaccctgcttctcctggaggcactggaaatgtacaaagatgactggaacaaagtgtccgagcatgtgggaagccgcacacaggacgagtgcatcttgcattttcttcgtcttcccattgaagacccatacctggaggactcagaggcctccctaggccccctggcctaccaacccatccccttcagtcagtcgggcaaccctgttatgagcactgttgccttcctggcctctgtcgtcgatccccgagtcgcctctgctgctgcaaagtcagccctagaggagttctccaaaatgaaggaagaggtacccacggccttggtggaggcccatgttcgaaaagtggaagaagcagccaaagtaacaggcaaggcggaccctgccttcggtctggaaagcagtggcattgcaggaaccacctctgatgagcctgagcggattgaggagagcgggaatgacgaggctcgggtggaaggccaggccacagatgagaagaaggagcccaaggaaccccgagaaggagggggtgctatagaggaggaagcaaaagagaaaaccagcgaggctcccaagaaggatgaggagaaagggaaagaaggcgacagtgagaaggagtccgagaagagtgatggagacccaatagtcgatcctgagaaggagaaggagccaaaggaagggcaggaggaagtgctgaaggaagtggtggagtctgagggggaaaggaagacaaaggtggagcgggacattggcgagggcaacctctccaccgctgctgccgccgccctggccgccgccgcagtgaaagctaagcacttggctgctgttgaggaaaggaagatcaaatctttggtggccctgctggtggagacccagatgaaaaagttggagatcaaacttcggcactttgaggagctggagactatcatggaccgggagcgagaagcactggagtatcagaggcagcagctcctggccgacagacaagccttccacatggagcagctgaagtatgcggagatgagggctcggcagcagcacttccaacagatgcaccaacagcagcagcagccaccaccagccctgcccccaggctcccagcctatccccccaacaggggctgctgggccacccgcagtccatggcttggctgtggctccagcctctgtagtccctgctcctgctggcagtggggcccctccaggaagtttgggcccttctgaacagattgggcaggcagggtcaactgcagggccacagcagcagcaaccagctggagccccccagcctggggcagtcccaccaggggttcccccccctggaccccatggcccctcaccgttccccaaccaacaaactcctccctcaatgatgccaggggcagtgccaggcagcgggcacccaggcgtggcgggtaatgctcctttgggtttgccttttggcatgccgcctcctcctcctcctcctgctccatccatcatcccatttggtagtctagctgactccatcagtattaacctccccgctcctcctaacctgcatgggcatcaccaccatctcccgttcgccccgggcactctccccccacctaacctgcctgtgtccatggcgaaccctctacatcctaacctgccggcgaccaccaccatgccatcttccttgcctctcgggccggggctcggatccgccgcagcccaaagccctgccattgtggcagctgttcagggcaacctcctgcccagtgccagcccactgccagacccaggcacccccctgcctccagaccccacagccccgagcccaggcacggtcacccctgtgccacctccacagtagtaatgaactagtccgtaacttgaaagtatttcgatttcttggctttatatatcttgtggaaaggacgattcagaactctagaagaatccagc

SEQ ID NO: 895 - DNA, 3560 bp, Homo sapiens
  source 1..3560: mol_type = genomic DNA
accgccaccatggcggtgcggaagaaggacggcggccccaacgtgaagtactacgaggccgcggacaccgtgacccagttcgacaacgtgcggctgtggctcggcaagaactacaagaagtatatacaagctgaaccacccaccaacaagtccctgtctagcctggttgtacagttgctacaatttcaggaagaagtttttggcaaacatgtcagcaatgcaccgctcactaaactgccgatcaaatgtttcctagatttcaaagcgggaggctccttgtgccacattcttgcagctgcctacaaattcaagagtgaccagggatggcggcgttacgatttccagaatccatcacgcatggaccgcaatgtggaaatgtttatgaccattgagaagtccttggtgcagaataattgcctgtctcgacctaacatttttctgtgcccagaaattgagcccaaactactagggaaattaaaggacattatcaagagacaccagggaacagtcactgaggataagaacaatgcctcccatgttgtgtatcctgtcccggggaatctagaagaagaggaatgggtacgaccagtcatgaagagggataagcaggttcttctgcactggggctactatcctgacagttacgacacgtggatcccagcgagtgaaattgaggcatctgtggaagatgctccaactcctgagaaacctaggaaggttcatgcaaagtggatcctggacaccgacaccttcaatgaatggatgaatgaggaagactatgaagtaaatgatgacaaaaaccctgtctcccgccgaaagaagatttcagccaagacactgacagatgaggtgaacagcccagattcagatcgacgggacaagaaggggggaaactataagaagaggaagcgctccccctctccttcaccaaccccagaagcaaagaagaaaaatgctaagaaaggtccctcaacaccttacactaagtcaaagcgtggccacagagaagaggagcaagaagacctgacaaaggacatggacgagccctcaccagtccccaatgtagaagaggtgacacttcccaaaacagtcaacacaaagaaagactcagagtcggccccagtcaaaggcggcaccatgaccgacctggatgaacaggaagatgaaagcatggagacgacgggcaaggatgaggatgagaacagtacggggaacaagggagagcagaccaagaatccagacctgcatgaggacaatgtgactgaacagacccaccacatcatcattcccagctacgctgcctggtttgactacaatagtgttcatgccattgagcggagggctctccccgagttcttcaacggcaagaacaagtccaagactccagagatctacctggcctatcgaaactttatgattgacacttaccgactgaacccccaagagtatcttacctctaccgcctgccgccgaaacctagcgggtgatgtctgtgccatcatgagggtccatgccttcctagaacagtggggtcttattaactaccaggtggatgctgagagtcgaccaaccccaatggggcctccgcctacctctcacttccatgtcttggctgacacaccatcagggctggtgcctctgcagcccaagacacctcagggccgccaggttgatgctgataccaaggctgggcgaaagggcaaagagctggatgacctggtgccagagacggctaagggcaagccagagctgcagacctctgcttcccaacaaatgctcaactttcctgacaaaggcaaagagaaaccaacagacatgcaaaactttgggctgcgcacagacatgtacacaaaaaagaatgttccctccaagagcaaggctgcagccagtgccactcgtgagtggacagaacaggaaaccctgcttctcctggaggcactggaaatgtacaaagatgactggaacaaagtgtccgagcatgtgggaagccgcacacaggacgagtgcatcttgcattttcttcgtcttcccattgaagacccatacctggaggactcagaggcctccctaggccccctggcctaccaacccatccccttcagtcagtcgggcaaccctgttatgagcactgttgccttcctggcctctgtcgtcgatccccgagtcgcctctgctgctgcaaagtcagccctagaggagttctccaaaatgaaggaagaggtacccacggccttggtggaggcccatgttcgaaaagtggaagaagcagccaaagtaacaggcaaggcggaccctgccttcggtctggaaagcagtggcattgcaggaaccacctctgatgagcctgagcggattgaggagagcgggaatgacgaggctcgggtggaaggccaggccacagatgagaagaaggagcccaaggaaccccgagaaggagggggtgctatagaggaggaagcaaaagagaaaaccagcgaggctcccaagaaggatgaggagaaagggaaagaaggcgacagtgagaaggagtccgagaagagtgatggagacccaatagtcgatcctgagaaggagaaggagccaaaggaagggcaggaggaagtgctgaaggaagtggtggagtctgagggggaaaggaagacaaaggtggagcgggacattggcgagggcaacctctccaccgctgctgccgccgccctggccgccgccgcagtgaaagctaagcacttggctgctgttgaggaaaggaagatcaaatctttggtggccctgctggtggagacccagatgaaaaagttggagatcaaacttcggcactttgaggagctggagactatcatggaccgggagcgagaagcactggagtatcagaggcagcagctcctggccgacagacaagccttccacatggagcagctgaagtatgcggagatgagggctcggcagcagcacttccaacagatgcaccaacagcagcagcagccaccaccagccctgcccccaggctcccagcctatccccccaacaggggctgctgggccacccgcagtccatggcttggctgtggctccagcctctgtagtccctgctcctgctggcagtggggcccctccaggaagtttgggcccttctgaacagattgggcaggcagggtcaactgcagggccacagcagcagcaaccagctggagccccccagcctggggcagtcccaccaggggttcccccccctggaccccatggcccctcaccgttccccaaccaacaaactcctccctcaatgatgccaggggcagtgccaggcagcgggcacccaggcgtggcggcccaaagccctgccattgtggcagctgttcagggcaacctcctgcccagtgccagcccactgccagacccaggcacccccctgcctccagaccccacagccccgagcccaggcacggtcacccctgtgccacctccacagtagtaatgaactagtccgtaacttgaaagtatttcgatttcttggctttatatatcttgtggaaaggacgagtctacctgctgccttggttctct

SEQ ID NO: 896 - DNA, 3494 bp, Homo sapiens
  source 1..3494: mol_type = genomic DNA
accgccaccatggcggtgcggaagaaggacggcggccccaacgtgaagtactacgaggccgcggacaccgtgacccagttcgacaacgtgcggctgtggctcggcaagaactacaagaagtatatacaagctgaaccacccaccaacaagtccctgtctagcctggttgtacagttgctacaatttcaggaagaagtttttggcaaacatgtcagcaatgcaccgctcactaaactgccgatcaaatgtttcctagatttcaaagcgggaggctccttgtgccacattcttgcagctgcctacaaattcaagagtgaccagggatggcggcgttacgatttccagaatccatcacgcatggaccgcaatgtggaaatgtttatgaccattgagaagtccttggtgcagaataattgcctgtctcgacctaacatttttctgtgcccagaaattgagcccaaactactagggaaattaaaggacattatcaagagacaccagggaacagtcactgaggataagaacaatgcctcccatgttgtgtatcctgtcccggggaatctagaagaagaggaatgggtacgaccagtcatgaagagggataagcaggttcttctgcactggggctactatcctgacagttacgacacgtggatcccagcgagtgaaattgaggcatctgtggaagatgctccaactcctgagaaacctaggaaggttcatgcaaagtggatcctggacaccgacaccttcaatgaatggatgaatgaggaagactatgaagtaaatgatgacaaaaaccctgtctcccgccgaaagaagatttcagccaagacactgacagatgaggtgaacagcccagattcagatcgacgggacaagaaggggggaaactataagaagaggaagcgctccccctctccttcaccaaccccagaagcaaagaagaaaaatgctaagaaaggtccctcaacaccttacactaagtcaaagcgtggccacagagaagaggagcaagaagacctgacaaaggacatggacgagccctcaccagtccccaatgtagaagaggtgacacttcccaaaacagtcaacacaaagaaagactcagagtcggccccagtcaaaggcggcaccatgaccgacctggatgaacaggaagatgaaagcatggagacgacgggcaaggatgaggatgagaacagtacggggaacaagggagagcagaccaagaatccagacctgcatgaggacaatgtgactgaacagacccaccacatcatcattcccagctacgctgcctggtttgactacaatagtgttcatgccattgagcggagggctctccccgagttcttcaacggcaagaacaagtccaagactccagagatctacctggcctatcgaaactttatgattgacacttaccgactgaacccccaagagtatcttacctctaccgcctgccgccgaaacctagcgggtgatgtctgtgccatcatgagggtccatgccttcctagaacagtggggtcttattaactaccaggtggatgctgagagtcgaccaaccccaatggggcctccgcctacctctcacttccatgtcttggctgacacaccatcagggctggtgcctctgcagcccaagacacctcagggccgccaggttgatgctgataccaaggctgggcgaaagggcaaagagctggatgacctggtgccagagacggctaagggcaagccagagctgcagacctctgcttcccaacaaatgctcaactttcctgacaaaggcaaagagaaaccaacagacatgcaaaactttgggctgcgcacagacatgtacacaaaaaagaatgttccctccaagagcaaggctgcagccagtgccactcgtgagtggacagaacaggaaaccctgcttctcctggaggcactggaaatgtacaaagatgactggaacaaagtgtccgagcatgtgggaagccgcacacaggacgagtgcatcttgcattttcttcgtcttcccattgaagacccatacctggaggactcagaggcctccctaggccccctggcctaccaacccatccccttcagtcagtcgggcaaccctgttatgagcactgttgccttcctggcctctgtcgtcgatccccgagtcgcctctgctgctgcaaagtcagccctagaggagttctccaaaatgaaggaagaggtacccacggccttggtggaggcccatgttcgaaaagtggaagaagcagccaaagtaacaggcaaggcggaccctgccttcggtctggaaagcagtggcattgcaggaaccacctctgatgagcctgagcggattgaggagagcgggaatgacgaggctcgggtggaaggccaggccacagatgagaagaaggagcccaaggaaccccgagaaggagggggtgctatagaggaggaagcaaaagagaaaaccagcgaggctcccaagaaggatgaggagaaagggaaagaaggcgacagtgagaaggagtccgagaagagtgatggagacccaatagtcgatcctgagaaggagaaggagccaaaggaagggcaggaggaagtgctgaaggaagtggtggagtctgagggggaaaggaagacaaaggtggagcgggacattggcgagggcaacctctccaccgctgctgccgccgccctggccgccgccgcagtgaaagctaagcacttggctgctgttgaggaaaggaagatcaaatctttggtggccctgctggtggagacccagatgaaaaagttggagatcaaacttcggcactttgaggagctggagactatcatggaccgggagcgagaagcactggagtatcagaggcagcagctcctggccgacagacaagccttccacatggagcagctgaagtatgcggagatgagggctcggcagcagcacttccaacagatgcaccaacagcagcagcagccaccaccagccctgcccccaggctcccagcctatccccccaacaggggctgctgggccacccgcagtccatggcttggctgtggctccagcctctgtagtccctgctcctgctggcagtggggcccctccaggaagtttgggcccttctgaacagattgggcaggcagggtcaactgcagggccacagcagcagcaaccagctggagccccccagcctggggcagtcccaccaggggttcccccccctggaccccatggcccctcaccgttccccaaccaacaaactcctccctcaatgatgccaggggcagtgccaggcagcgggcacccaggcgtggcggacccaggcacccccctgcctccagaccccacagccccgagcccaggcacggtcacccctgtgccacctccacagtagtaatgaactagtccgtaacttgaaagtatttcgatttcttggctttatatatcttgtggaaaggacgatgagatgactattcgcccgttatg

SEQ ID NO: 897 - DNA, 3746 bp, Homo sapiens
  source 1..3746: mol_type = genomic DNA
accgccaccatggcggtgcggaagaaggacggcggccccaacgtgaagtactacgaggccgcggacaccgtgacccagttcgacaacgtgcggctgtggctcggcaagaactacaagaagtatatacaagctgaaccacccaccaacaagtccctgtctagcctggttgtacagttgctacaatttcaggaagaagtttttggcaaacatgtcagcaatgcaccgctcactaaactgccgatcaaatgtttcctagatttcaaagcgggaggctccttgtgccacattcttgcagctgcctacaaattcaagagtgaccagggatggcggcgttacgatttccagaatccatcacgcatggaccgcaatgtggaaatgtttatgaccattgagaagtccttggtgcagaataattgcctgtctcgacctaacatttttctgtgcccagaaattgagcccaaactactagggaaattaaaggacattatcaagagacaccagggaacagtcactgaggataagaacaatgcctcccatgttgtgtatcctgtcccggggaatctagaagaagaggaatgggtacgaccagtcatgaagagggataagcaggttcttctgcactggggctactatcctgacagttacgacacgtggatcccagcgagtgaaattgaggcatctgtggaagatgctccaactcctgagaaacctaggaaggttcatgcaaagtggatcctggacaccgacaccttcaatgaatggatgaatgaggaagactatgaagtaaatgatgacaaaaaccctgtctcccgccgaaagaagatttcagccaagacactgacagatgaggtgaacagcccagattcagatcgacgggacaagaaggggggaaactataagaagaggaagcgctccccctctccttcaccaaccccagaagcaaagaagaaaaatgctaagaaaggtccctcaacaccttacactaagtcaaagcgtggccacagagaagaggagcaagaagacctgacaaaggacatggacgagccctcaccagtccccaatgtagaagaggtgacacttcccaaaacagtcaacacaaagaaagactcagagtcggccccagtcaaaggcggcaccatgaccgacctggatgaacaggaagatgaaagcatggagacgacgggcaaggatgaggatgagaacagtacggggaacaagggagagcagaccaagaatccagacctgcatgaggacaatgtgactgaacagacccaccacatcatcattcccagctacgctgcctggtttgactacaatagtgttcatgccattgagcggagggctctccccgagttcttcaacggcaagaacaagtccaagactccagagatctacctggcctatcgaaactttatgattgacacttaccgactgaacccccaagagtatcttacctctaccgcctgccgccgaaacctagcgggtgatgtctgtgccatcatgagggtccatgccttcctagaacagtggggtcttattaactaccaggtggatgctgagagtcgaccaaccccaatggggcctccgcctacctctcacttccatgtcttggctgacacaccatcagggctggtgcctctgcagcccaagacacctcagcagacctctgcttcccaacaaatgctcaactttcctgacaaaggcaaagagaaaccaacagacatgcaaaactttgggctgcgcacagacatgtacacaaaaaagaatgttccctccaagagcaaggctgcagccagtgccactcgtgagtggacagaacaggaaaccctgcttctcctggaggcactggaaatgtacaaagatgactggaacaaagtgtccgagcatgtgggaagccgcacacaggacgagtgcatcttgcattttcttcgtcttcccattgaagacccatacctggaggactcagaggcctccctaggccccctggcctaccaacccatccccttcagtcagtcgggcaaccctgttatgagcactgttgccttcctggcctctgtcgtcgatccccgagtcgcctctgctgctgcaaagtcagccctagaggagttctccaaaatgaaggaagaggtacccacggccttggtggaggcccatgttcgaaaagtggaagaagcagccaaagtaacaggcaaggcggaccctgccttcggtctggaaagcagtggcattgcaggaaccacctctgatgagcctgagcggattgaggagagcgggaatgacgaggctcgggtggaaggccaggccacagatgagaagaaggagcccaaggaaccccgagaaggagggggtgctatagaggaggaagcaaaagagaaaaccagcgaggctcccaagaaggatgaggagaaagggaaagaaggcgacagtgagaaggagtccgagaagagtgatggagacccaatagtcgatcctgagaaggagaaggagccaaaggaagggcaggaggaagtgctgaaggaagtggtggagtctgagggggaaaggaagacaaaggtggagcgggacattggcgagggcaacctctccaccgctgctgccgccgccctggccgccgccgcagtgaaagctaagcacttggctgctgttgaggaaaggaagatcaaatctttggtggccctgctggtggagacccagatgaaaaagttggagatcaaacttcggcactttgaggagctggagactatcatggaccgggagcgagaagcactggagtatcagaggcagcagctcctggccgacagacaagccttccacatggagcagctgaagtatgcggagatgagggctcggcagcagcacttccaacagatgcaccaacagcagcagcagccaccaccagccctgcccccaggctcccagcctatccccccaacaggggctgctgggccacccgcagtccatggcttggctgtggctccagcctctgtagtccctgctcctgctggcagtggggcccctccaggaagtttgggcccttctgaacagattgggcaggcagggtcaactgcagggccacagcagcagcaaccagctggagccccccagcctggggcagtcccaccaggggttcccccccctggaccccatggcccctcaccgttccccaaccaacaaactcctccctcaatgatgccaggggcagtgccaggcagcgggcacccaggcgtggcgggtaatgctcctttgggtttgccttttggcatgccgcctcctcctcctcctcctgctccatccatcatcccatttggtagtctagctgactccatcagtattaacctccccgctcctcctaacctgcatgggcatcaccaccatctcccgttcgccccgggcactctccccccacctaacctgcctgtgtccatggcgaaccctctacatcctaacctgccggcgaccaccaccatgccatcttccttgcctctcgggccggggctcggatccgccgcagcccaaagccctgccattgtggcagctgttcagggcaacctcctgcccagtgccagcccactgccagacccaggcacccccctgcctccagaccccacagccccgagcccaggcacggtcacccctgtgccacctccacagtagtaatgaactagtccgtaacttgaaagtatttcgatttcttggctttatatatcttgtggaaaggacgagttgcgcgacgccgagccggttct

SEQ ID NO: 898 - DNA, 3419 bp, Homo sapiens
  source 1..3419: mol_type = genomic DNA
accgccaccatggccgcagcggcgggcggcggcgggccggggacagcggtaggcgccacgggctcggggattgcggcggcagccgcaggcctagctgtttatcgacggaaggatgggggcccggccaccaagttttgggagagcccggagacggtgtcccagctggattcggtgcgggtctggctgggcaagcactacaagaagtatgttcatgcggatgctcctaccaataaaacactggctgggctggtggtgcagcttcttcagttccaggaagatgcctttgggaagcatgtcaccaacccggccttcaccaaactccctgcaaagtgtttcatggatttcaaagctggaggcgccttatgtcacattcttggggctgcttacaagtataaaaatgaacagggatggcggaggtttgacctacagaacccatctcgaatggatcgtaatgtggaaatgtttatgaacattgaaaaaacattggtgcagaacaattgtttgaccagacccaacatctacctcattccagacattgatctgaagttggctaacaaattgaaagatatcatcaaacgacatcagggaacatttacggatgagaagtcaaaagcttcccaccacatttacccatattcttcctcacaagacgatgaagaatggttgagaccggtgatgagaaaagagaagcaagtgttagtgcattggggcttttacccagacagctatgatacttgggtccatagtaatgatgttgatgctgaaattgaagatccaccaattccagaaaaaccatggaaggttcatgtgaaatggattttggacactgatattttcaatgaatggatgaatgaggaggattatgaggtggatgaaaataggaagcctgtgagttttcgtcagcggatttcaaccaagaatgaagagccagtcagaagtccagaaagaagagatagaaaagcatcagctaatgctcgaaagaggaaacattcgccttcgcctccccctccgacaccaacagaatcacggaagaagagtgggaagaaaggccaagctagcctttatgggaagcgcagaagtcagaaagaggaagatgagcaagaagatctaaccaaggatatggaagacccaacacctgtacccaatatagaagaagtagtacttcccaaaaatgtgaacctaaagaaagatagtgaaaatacacctgttaaaggaggaactgtagcggatctagatgagcaggatgaagaaacagtcacagcaggaggaaaggaagatgaagatcctgccaaaggtgatcagagtcgatcagttgaccttggggaagataatgtgacagagcagaccaatcacattattattcctagttatgcatcatggtttgattataactgtattcatgtgattgaacggcgtgctcttcctgagttcttcaatggaaaaaacaaatccaagactccagaaatatacttggcatatcgaaattttatgattgacacgtatcgtctaaacccccaagagtatttaactagcactgcttgtcggaggaacttgactggagatgtgtgtgctgtgatgagggtccatgcctttttagagcagtggggactcgttaattaccaagttgacccggaaagtagacccatggcaatgggacctcctcctactcctcattttaatgtattagctgataccccctctgggcttgtgcctctgcatcttcgatcacctcaggttcctgctgctcaacagatgctaaattttcctgagaaaaacaaggaaaaaccagttgatttgcagaactttggtctccgtactgacatttactccaagaaaacattagcaaagagtaaaggtgctagtgctggaagagaatggactgaacaggagacccttctactcctggaggccctggagatgtacaaggatgattggaacaaagtgtcggaacatgttggaagtcgtactcaggatgaatgcatcctccactttttgagacttcccattgaggacccataccttgagaattcagatgcttcccttgggcctttggcctaccagcctgtccccttcagtcagtcaggaaatccagttatgagtactgttgcttttttggcatctgtggtggaccctcgcgtggcatctgctgcagcaaaagcggctttggaggagttttctcgggtccgggaggaggtaccactggaattggttgaagctcatgtcaagaaagtacaagaagcagcacgagcctctgggaaagtggatcccacctacggtctggagagcagctgcattgcaggcacagggcccgatgagccagagaagcttgaaggagctgaagaggaaaaaatggaagccgaccctgatggtcagcagcctgaaaaggcagaaaataaagtggaaaatgaaacggatgaaggtgataaagcacaagatggagaaaatgaaaaaaatagtgaaaaggaacaggatagtgaagtgagtgaggataccaaatcagaagaaaaggagactgaagagaacaaagaactcactgatacatgtaaagaaagagaaagtgatactgggaagaagaaagtagaacatgaaatttccgaaggaaatgttgccacagccgcagcagctgctcttgcctcagcggctaccaaagccaagcacctggctgcagtggaagaaagaaagatcaagtccctggtagctctcttggttgagacacaaatgaagaaactagagatcaaacttcgacattttgaagagctggaaactatcatggacagagagaaagaagctctagaacaacagaggcagcagttgcttactgaacgccaaaacttccacatggaacagctgaagtatgctgaattacgagcacgacagcaaatggaacagcagcagcatggccagaaccctcaacaggcacaccagcactcaggaggacctggcctggccccacttggagcagcagggcaccctggcatgatgcctcatcaacagccccctccctaccctctgatgcaccaccagatgccaccacctcatccaccccagccaggtcagataccaggcccaggttccatgatgcccgggcagcacatgccaggccgcatgattcccactgttgcagccaacatccacccctctgggagtggccctacccctcctggcatgccaccaatgccaggaaacatcttaggaccccgggtacccctgacagcacctaacggcatgtatccccctccaccacagcagcagccaccgccaccaccacctgcagatggggtccctccgcctcctgctcctggcccgccagcctcagctgctccttagtaatgaactagtccgtaacttgaaagtatttcgatttcttggctttatatatcttgtggaaaggacgaggttaatgaagtcgctgggtcccg

SEQ ID NO: 899 - DNA, 1088 bp, Homo sapiens
  source 1..1088: mol_type = genomic DNA
accgccaccatggcgtcccggtgctccgagccctacccggaggtctccagaatccctaccgtcaggggatgcaacggctccctgtctggtgccctctcctgctgcgaggactcggcccggggctcgggcccgcccaaggcccctacggtggccgagggtcccagctcctgccttcggcggaacgtgatcagcgagagggagcgcaggaagcggatgtcgttgagctgtgagcgtctgcgggccctgctgccccagttcgatggccggcgggaggacatggcctcggtcctggagatgtctgtgcagttcctgcggcttgccagcgccctggggcccagtcaggagcagcacgctattcttgcttcctccaaggaaatgtggcactcgttgcaggaggatgttttacagttgacgttgtcgagtcagattcaagcaggtgtgccagaccctgggacgggagcgtccagcgggactcgaaccccagatgtgaaggcgtttctggaaagtccttggtccctggatccagcgtcggccagcccagagcccgtgccgcacatccttgcgtcctccaggcagtgggaccccgcgagctgcacgtccctgggcacggacaagtgtgaggcactgttggggctgtgccaggtgcggggtgggctgccccctttctcagaaccttccagcctggtgccgtggcccccaggccggagtcttcctaaggctgtgaggccacccctgtcctggcctccgttctcgcagcagcagaccttgcccgtgatgagcggggaggcccttggctggctgggccaggctgggcccctggccatgggggctgcacctctgggggagccagccaaggaggaccccatgctggcgcaggaggccgggtctgcgttggggtctgatgtggacgatgggacgtccttcctgctgactgctggtcccagctcgtggccgggtgagtggggccctgggttcagggctggtccccccgcgtagtaatgaactagtccgtaacttgaaagtatttcgatttcttggctttatatatcttgtggaaaggacgatttatctatgagggttcccggtga

SEQ ID NO: 900 - DNA, 1265 bp, Homo sapiens
  source 1..1265: mol_type = genomic DNA
accgccaccatggcgtcccggtgctccgagccctacccggaggtctccagaatccctaccgtcaggggatgcaacggctccctgtctggtgccctctcctgctgcgaggactcggcccggggctcgggcccgcccaaggcccctacggtggccgagggtcccagctcctgccttcggcggaacgtgatcagcgagagggagcgcaggaagcggatgtcgttgagctgtgagcgtctgcgggccctgctgccccagttcgatggccggcgggaggacatggcctcggtcctggagatgtctgtgcagttcctgcggcttgccagcgccctggggcccagtcaggagcagcacgctattcttgcttcctccaaggaaatgtggcactcgttgcaggaggatgttttacagttgacgttgtcgagtcagattcaagcaggtgtgccagaccctgggacgggagcgtccagcgggactcgaaccccagatgtgaaggcgtttctggaaagtccttggtccctggatccagcgtcggccagcccagagcccgtgccgcacatccttgcgtcctccaggcagtgggaccccgcgagctgcacgtccctgggcacggacaagtgtgaggcactgttggggctgtgccaggtgcggggtgggctgccccctttctcagaaccttccagcctggtgccgtggcccccaggccggagtcttcctaaggctgtgaggccacccctgtcctggcctccgttctcgcagcagcagaccttgcccgtgatgagcggggaggcccttggctggctgggccaggctgggcccctggccatgggggctgcacctctgggggagccagccaaggaggaccccatgctggcgcaggaggccgggtctgcgttggggtctgatgtggacgatgggacgtccttcctgctgactgctggtcccagctcgtggccggggtctctggagggtcgaggaggcagtggccctgcatgggccccagctgagagcagtccactggatgttggagagccaggcttcctaggggaccctgagcttggctcccaggagctccaggacagccctctggagccgtggggcctggatgtggactgtgcaggcctggccctgaaggacgaggtggagagcatcttccctgacttctttgcctgctagtaatgaactagtccgtaacttgaaagtatttcgatttcttggctttatatatcttgtggaaaggacgatcgcagtaggatccctcggcaagg

SEQ ID NO: 901 - DNA, 1466 bp, Homo sapiens
  source 1..1466: mol_type = genomic DNA
accgccaccatggagttggcgactcgctaccagatccctaaagaagtggctgacatctttaacgcccccagtgatgatgaagagtttgttggcttccgagatgatgttcccatggaaaccctctcgtcagaggagagctgcgatagttttgactcactagagtcagggaaacagcaggatgtgcgctttcattccaaatacttcacagaagagctaagaagaatttttatagaggacactgactcagagactgaggattttgcaggatttacgcagagtgatctgaatggaaagactaacccagaagtaatggtcgtggagtcagatttgagtgatgatggcaaagcatctttggtgagcgaggaagaggaagatgaagaagaagataaggctacccctagaagaagcaggtctagaagaagtagtattggtcttcgagtagcctttcagttccccaccaagaagctggccaacaaaccagataaaaacagttcttccgagcagttgttttctagcgcacgcttacagaatgagaaaaaaacaattcttgaaagaaagaaagactgtagacaggtgatacaaagggaagattctacctctgagtctgaggatgactctcgggatgagagccaggagagttcagatgctttgctgaaaaggaccatgaacatcaaggagaacaaagccatgcttgcccagttattggcggaattgaactcgatgccagatttcttcccagtacgaaccccaacctcagcttctaggaagaagacagtgaggcgggccttctcggagggacagatcacgcggcgtatgaacccaacccggagtgcgcggcctcctgagaagtttgctctagagaacttcactgtctcagccgctaaatttgcggaagagttttacagcttccgaagaaggaagacaattggggggaaatgccgggagtacagacgacgtcaccgtatatcttcttttcggccagtggaggatatcaccgaagaggacttagaaaatgttgccataactgttcgagataaaatctatgataaagttctgggtaacacgtgccatcagtgtcgacaaaagaccatcgacaccaagacagtgtgtcggaaccagggttgctgtggtgtgcgaggacagttctgtggaccatgcctgcggaaccgctatggggaggatgtcagatcggcattgctggacccggattgggtgtgtcccccctgtcgtgggatctgcaattgcagctactgtcggaagcgtgacggccgctgtgccacaggaatcctcattcatctggccaagttttatggttatgacaatgttaaggaatatctggagagcttacaaaaggagctggtagaagacaattagtaatgaactagtccgtaacttgaaagtatttcgatttcttggctttatatatcttgtggaaaggacgacgcctacttccacagtcggaatcc

SEQ ID NO: 902 - DNA, 1364 bp, Homo sapiens
  source 1..1364: mol_type = genomic DNA
accgccaccatggaaaccctctcgtcagaggagagctgcgatagttttgactcactagagtcagggaaacagcaggatgtgcgctttcattccaaatacttcacagaagagctaagaagaatttttatagaggacactgactcagagactgaggattttgcaggatttacgcagagtgatctgaatggaaagactaacccagaagtaatggtcgtggagtcagatttgagtgatgatggcaaagcatctttggtgagcgaggaagaggaagatgaagaagaagataaggctacccctagaagaagcaggtctagaagaagtagtattggtcttcgagtagcctttcagttccccaccaagaagctggccaacaaaccagataaaaacagttcttccgagcagttgttttctagcgcacgcttacagaatgagaaaaaaacaattcttgaaagaaagaaagactgtagacaggtgatacaaagggaagattctacctctgagtctgaggatgactctcgggatgagagccaggagagttcagatgctttgctgaaaaggaccatgaacatcaaggagaacaaagccatgcttgcccagttattggcggaattgaactcgatgccagatttcttcccagtacgaaccccaacctcagcttctaggaagaagacagtgaggcgggccttctcggagggacagatcacgcggcgtatgaacccaacccggagtgcgcggcctcctgagaagtttgctctagagaacttcactgtctcagccgctaaatttgcggaagagttttacagcttccgaagaaggaagacaattggggggaaatgccgggagtacagacgacgtcaccgtatatcttcttttcggccagtggaggatatcaccgaagaggacttagaaaatgttgccataactgttcgagataaaatctatgataaagttctgggtaacacgtgccatcagtgtcgacaaaagaccatcgacaccaagacagtgtgtcggaaccagggttgctgtggtgtgcgaggacagttctgtggaccatgcctgcggaaccgctatggggaggatgtcagatcggcattgctggacccggattgggtgtgtcccccctgtcgtgggatctgcaattgcagctactgtcggaagcgtgacggccgctgtgccacaggaatcctcattcatctggccaagttttatggttatgacaatgttaaggaatatctggagagcttacaaaaggagctggtagaagacaattagtaatgaactagtccgtaacttgaaagtatttcgatttcttggctttatatatcttgtggaaaggacgattccaatcgcccattcacctttac

SEQ ID NO: 903 - DNA, 1328 bp, Homo sapiens
  source 1..1328: mol_type = genomic DNA
accgccaccatggagttggcgactcgctaccagatccctaaagaagtggctgacatctttaacgcccccagtgatgatgaagagtttgttggcttccgagatgatgttcccatggaaaccctctcgtcagaggagagctgcgatagttttgactcactagagtcagggaaacaggtcgtggagtcagatttgagtgatgatggcaaagcatctttggtgagcgaggaagaggaagatgaagaagaagataaggctacccctagaagaagcaggtctagaagaagtagtattggtcttcgagtagcctttcagttccccaccaagaagctggccaacaaaccagataaaaacagttcttccgagcagttgttttctagcgcacgcttacagaatgagaaaaaaacaattcttgaaagaaagaaagactgtagacaggtgatacaaagggaagattctacctctgagtctgaggatgactctcgggatgagagccaggagagttcagatgctttgctgaaaaggaccatgaacatcaaggagaacaaagccatgcttgcccagttattggcggaattgaactcgatgccagatttcttcccagtacgaaccccaacctcagcttctaggaagaagacagtgaggcgggccttctcggagggacagatcacgcggcgtatgaacccaacccggagtgcgcggcctcctgagaagtttgctctagagaacttcactgtctcagccgctaaatttgcggaagagttttacagcttccgaagaaggaagacaattggggggaaatgccgggagtacagacgacgtcaccgtatatcttcttttcggccagtggaggatatcaccgaagaggacttagaaaatgttgccataactgttcgagataaaatctatgataaagttctgggtaacacgtgccatcagtgtcgacaaaagaccatcgacaccaagacagtgtgtcggaaccagggttgctgtggtgtgcgaggacagttctgtggaccatgcctgcggaaccgctatggggaggatgtcagatcggcattgctggacccggattgggtgtgtcccccctgtcgtgggatctgcaattgcagctactgtcggaagcgtgacggccgctgtgccacaggaatcctcattcatctggccaagttttatggttatgacaatgttaaggaatatctggagagcttacaaaaggagctggtagaagacaattagtaatgaactagtccgtaacttgaaagtatttcgatttcttggctttatatatcttgtggaaaggacgaacgaacttctggtctgtataagct

SEQ ID NO: 904 - DNA, 1322 bp, Homo sapiens
  source 1..1322: mol_type = genomic DNA
accgccaccatggttcactgtgccggctgcaaaaggcccatcctggaccgctttctcttgaacgtgctggacagggcctggcacgtcaagtgcgtccagtgctgtgaatgtaaatgcaacctgaccgagaagtgcttctccagggaaggcaaactctactgcaagaacgacttcttccggtgtttcggtaccaaatgcgcaggctgcgctcagggcatctcccctagcgacctggtgcggagagcgcggagcaaagtgtttcacctgaactgcttcacctgcatgatgtgtaacaagcagctctccactggcgaggaactctacatcatcgacgagaataagttcgtctgcaaagaggattacctaagtaacagcagtgttgccaaagagaacagccttcactcggccaccacgggcagtgaccccagtttgtctccggattcccaagacccgtcgcaggacgacgccaaggactcggagagcgccaacgtgtcggacaaggaagcgggtagcaacgagaatgacgaccagaacctgggcgccaagcggcggggaccgcgcaccaccatcaaagccaagcagctggagacgctgaaggccgccttcgctgctacacccaagcccacccgccacatccgcgagcagctggcgcaggagaccggcctcaacatgcgcgtcattcaggtctggttccagaaccggcgctccaaggagcggaggatgaagcagctgagcgccctgggcgcccggcgccacgccttcttccgcagtccgcgccggatgcggccgctggtggaccgcctggagccgggcgagctcatccccaatggtcccttctccttctacggagattaccagagcgagtactacgggcccgggggcaactacgacttcttcccgcaaggccccccgtcctcgcaggcccagacaccagtggacctacccttcgtgccgtcatctgggccgtccgggacgcccctgggtggcctggagcacccgctgccgggccaccacccgtcgagcgaggcgcagcggtttaccgacatcctggcgcacccacccggggactcgcccagccccgagcccagcctgcccgggcctctgcactccatgtcggccgaggtcttcggacccagcccgcccttctcgtcgctgtcggtcaacggtggggcgagctacggaaaccacctgtcccacccccccgaaatgaacgaggcggccgtgtggtagtaatgaactagtccgtaacttgaaagtatttcgatttcttggctttatatatcttgtggaaaggacgagtctctgcgaagactggagtagct

SEQ ID NO: 905 - DNA, 1322 bp, Homo sapiens
  source 1..1322: mol_type = genomic DNA
accgccaccatgctgttccacagtctgtcgggccccgaggtgcacggggtcatcgacgagatggaccgcagggccaagagcgaggctcccgccatcagctccgccatcgaccgcggcgacaccgagacgaccatgccgtccatcagcagtgaccgcgccgcgctgtgcgccggctgcgggggcaagatctcggaccgctactacctgctggcggtggacaagcagtggcacatgcgctgcctcaagtgctgcgagtgcaagctcaacctggagtcggagctcacctgtttcagcaaggacggtagcatctactgcaaggaagactactacaggcgcttctctgtgcagcgctgcgcccgctgccacctgggcatctcggcctcggagatggtgatgcgcgctcgggacttggtttatcacctcaactgcttcacgtgcaccacgtgtaacaagatgctgaccacgggcgaccacttcggcatgaaggacagcctggtctactgccgcttgcacttcgaggcgctgctgcagggcgagtaccccgcacacttcaaccatgccgacgtggcagcggcggccgctgcagccgcggcggccaagagcgcggggctgggcgcagcaggggccaaccctctgggtcttccctactacaatggcgtgggcactgtgcagaaggggcggccgaggaaacgtaagagcccgggccccggtgcggatctggcggcctacaacgctgcgctaagctgcaacgaaaacgacgcagagcacctggaccgtgaccagccatacccgagcagccagaagaccaagcgcatgcgcacgtccttcaagcaccaccagcttcggaccatgaagtcttactttgccattaaccacaaccccgacgccaaggacttgaagcagctcgcgcaaaagacgggcctcaccaagcgggtcctccaggtctggttccagaacgcccgagccaagttcaggcgcaacctcttacggcaggaaaacacgggcgtggacaagtcgacagacgcggcgctgcagacagggacgccatcgggcccggcctcggagctctccaacgcctcgctcagcccctccagcacgcccaccaccctgacagacttgactagccccaccctgccaactgtgacgtccgtcttaacttctgtgcctggcaacctggagggccatgagcctcacagcccctcacaaacgactcttaccaaccttttctagtaatgaactagtccgtaacttgaaagtatttcgatttcttggctttatatatcttgtggaaaggacgatctacatgtctaattgccagttct

SEQ ID NO: 906 - DNA, 1310 bp, Homo sapiens
  source 1..1310: mol_type = genomic DNA
accgccaccatggaggcgcgcggggagctgggcccggcccgggagtcggcgggaggcgacctgctgctagcactgctggcgcggagggcggacctgcgccgagagatcccgctgtgcgctggctgtgaccagcacatcctggaccgcttcatcctcaaggctctggaccgccactggcacagcaagtgtctcaagtgcagcgactgccacacgccactggccgagcgctgcttcagccgaggggagagcgtttactgcaaggacgactttttcaagcgcttcgggaccaagtgcgccgcgtgccagctgggcatcccgcccacgcaggtggtgcgccgcgcccaggacttcgtgtaccacctgcactgctttgcctgcgtcgtgtgcaagcggcagctggccacgggcgacgagttctacctcatggaggacagccggctcgtgtgcaaggcggactacgaaaccgccaagcagcgagaggccgaggccacggccaagcggccgcgcacgaccatcaccgccaagcagctggagacgctgaagagcgcttacaacacctcgcccaagccggcgcgccacgtgcgcgagcagctctcgtccgagacgggcctggacatgcgcgtggtgcaggtttggttccagaaccgccgggccaaggagaagaggctgaagaaggacgccggccggcagcgctgggggcagtatttccgcaacatgaagcgctcccgcggcggctccaagtcggacaaggacagcgttcaggaggggcaggacagcgacgctgaggtctccttccccgatgagccttccttggcggaaatgggcccggccaatggcctctacgggagcttgggggaacccacccaggccttgggccggccctcgggagccctgggcaacttctccctggagcatggaggcctggcaggcccagagcagtaccgagagctgcgtcccggcagcccctacggtgtccccccatcccccgccgccccgcagagcctccctggcccccagcccctcctctccagcctggtgtacccagacaccagcttgggccttgtgccctcgggagcccccggcgggcccccacccatgagggtgctggcagggaacggacccagttctgacctatccacggggagcagcgggggttaccccgacttccctgccagccccgcctcctggctggatgaggtagaccacgctcagttctagtaatgaactagtccgtaacttgaaagtatttcgatttcttggctttatatatcttgtggaaaggacgattcagttcgacacgcacttcactc

SEQ ID NO: 907 - DNA, 1295 bp, Homo sapiens
  source 1..1295: mol_type = genomic DNA
accgccaccatgctgctggaaacggggctcgagcgcgaccgagcgaggcccggggccgccgccgtctgcaccttgggcgggactcgggagatcccgctgtgcgctggctgtgaccagcacatcctggaccgcttcatcctcaaggctctggaccgccactggcacagcaagtgtctcaagtgcagcgactgccacacgccactggccgagcgctgcttcagccgaggggagagcgtttactgcaaggacgactttttcaagcgcttcgggaccaagtgcgccgcgtgccagctgggcatcccgcccacgcaggtggtgcgccgcgcccaggacttcgtgtaccacctgcactgctttgcctgcgtcgtgtgcaagcggcagctggccacgggcgacgagttctacctcatggaggacagccggctcgtgtgcaaggcggactacgaaaccgccaagcagcgagaggccgaggccacggccaagcggccgcgcacgaccatcaccgccaagcagctggagacgctgaagagcgcttacaacacctcgcccaagccggcgcgccacgtgcgcgagcagctctcgtccgagacgggcctggacatgcgcgtggtgcaggtttggttccagaaccgccgggccaaggagaagaggctgaagaaggacgccggccggcagcgctgggggcagtatttccgcaacatgaagcgctcccgcggcggctccaagtcggacaaggacagcgttcaggaggggcaggacagcgacgctgaggtctccttccccgatgagccttccttggcggaaatgggcccggccaatggcctctacgggagcttgggggaacccacccaggccttgggccggccctcgggagccctgggcaacttctccctggagcatggaggcctggcaggcccagagcagtaccgagagctgcgtcccggcagcccctacggtgtccccccatcccccgccgccccgcagagcctccctggcccccagcccctcctctccagcctggtgtacccagacaccagcttgggccttgtgccctcgggagcccccggcgggcccccacccatgagggtgctggcagggaacggacccagttctgacctatccacggggagcagcgggggttaccccgacttccctgccagccccgcctcctggctggatgaggtagaccacgctcagttctagtaatgaactagtccgtaacttgaaagtatttcgatttcttggctttatatatcttgtggaaaggacgatgacaacccatttgaagtgcagct

SEQ ID NO: 908 - DNA, 1262 bp, Homo sapiens
  source 1..1262: mol_type = genomic DNA
accgccaccatgacgcttaacatgaaggagacccgatggggtgccccagctccagagatcccgctgtgcgctggctgtgaccagcacatcctggaccgcttcatcctcaaggctctggaccgccactggcacagcaagtgtctcaagtgcagcgactgccacacgccactggccgagcgctgcttcagccgaggggagagcgtttactgcaaggacgactttttcaagcgcttcgggaccaagtgcgccgcgtgccagctgggcatcccgcccacgcaggtggtgcgccgcgcccaggacttcgtgtaccacctgcactgctttgcctgcgtcgtgtgcaagcggcagctggccacgggcgacgagttctacctcatggaggacagccggctcgtgtgcaaggcggactacgaaaccgccaagcagcgagaggccgaggccacggccaagcggccgcgcacgaccatcaccgccaagcagctggagacgctgaagagcgcttacaacacctcgcccaagccggcgcgccacgtgcgcgagcagctctcgtccgagacgggcctggacatgcgcgtggtgcaggtttggttccagaaccgccgggccaaggagaagaggctgaagaaggacgccggccggcagcgctgggggcagtatttccgcaacatgaagcgctcccgcggcggctccaagtcggacaaggacagcgttcaggaggggcaggacagcgacgctgaggtctccttccccgatgagccttccttggcggaaatgggcccggccaatggcctctacgggagcttgggggaacccacccaggccttgggccggccctcgggagccctgggcaacttctccctggagcatggaggcctggcaggcccagagcagtaccgagagctgcgtcccggcagcccctacggtgtccccccatcccccgccgccccgcagagcctccctggcccccagcccctcctctccagcctggtgtacccagacaccagcttgggccttgtgccctcgggagcccccggcgggcccccacccatgagggtgctggcagggaacggacccagttctgacctatccacggggagcagcgggggttaccccgacttccctgccagccccgcctcctggctggatgaggtagaccacgctcagttctagtaatgaactagtccgtaacttgaaagtatttcgatttcttggctttatatatcttgtggaaaggacgactgattatgccgtattcttgctat

SEQ ID NO: 909 - DNA, 1310 bp, Homo sapiens
  source 1..1310: mol_type = genomic DNA
accgccaccatgatggtgcactgcgccggttgcgagcggcccatcctcgaccgctttctgctgaacgtgctggaccgcgcgtggcacatcaaatgtgttcagtgctgcgagtgcaaaaccaacctctcggagaagtgcttctcgcgcgagggcaagctctactgcaaaaatgactttttcaggcgctttggcacgaaatgcgccggctgcgcgcaaggcatctcgcccagcgacctggtgcgcaaggcccggagcaaagtctttcacctcaactgtttcacctgcatggtgtgtaacaagcagctgtccaccggcgaggagctctacgtcatcgacgagaacaagttcgtgtgcaaagacgactacctgagctcatccagcctcaaggagggcagcctcaactcagtgtcatcctgtacggaccgcagtttgtccccggacctccaggacgcactgcaggacgaccccaaagagacggacaactcgacctcgtcggacaaggagacggccaacaacgagaacgaggagcagaactcgggcaccaagcggcgcggcccccgcaccaccatcaaggccaagcagctggagacgctcaaggctgccttcgccgccacgcccaagcccacgcgccacatccgcgagcagctggcgcaggagaccggcctcaacatgcgcgtcatccaggtgtggtttcagaaccgacggtccaaagaacgccggatgaaacagctgagcgccctaggcgcccggaggcacgccttcttccggagtccgcggcgcatgcgtccgctgggcggccgcttggacgagtctgagatgttggggtccaccccgtacacctactacggagactaccaaggcgactactacgcgccgggaagcaactacgacttcttcgcgcacggcccgccttcgcaggcgcagtccccggccgactccagcttcctggcggcctctggccccggctcgacgccgctgggagcgctggaaccgccgctcgccggcccgcacgccgcggacaaccccaggttcaccgacatgatctcgcacccggacacaccgagccccgagccaggcctgccgggcacgctgcaccccatgcccggcgaggtattcagcggcgggcccagcccgcccttcccaatgagcggcaccagcggctacagcggacccctgtcgcatcccaaccccgagctcaacgaagccgccgtgtggtagtaatgaactagtccgtaacttgaaagtatttcgatttcttggctttatatatcttgtggaaaggacgacatcggcgatacccttgcttaaga

SEQ ID NO: 910 - DNA, 1280 bp, Homo sapiens
  source 1..1280: mol_type = genomic DNA
accgccaccatgtactggaagcatgagaacgccgccccggcgttgcccgagggctgccggctgccggccgagggcggccccgccaccgaccaggtgatggcccagccagggtccggctgcaaagcgaccacccgctgtcttgaagggaccgcgccgcccgccatggctcagtctgacgccgaggccctggcaggagctctggacaaggacgagggtcaggcctccccatgtacgcccagcacgccatctgtctgctcaccgccctctgccgcctcctccgtgccgtctgcaggcaagaacatctgctccagctgcggcctcgagatcctggaccgatatctgctcaaggtcaacaacctcatctggcacgtgcggtgcctcgagtgctccgtgtgtcgcacgtcgctgaggcagcagaacagctgctacatcaagaacaaggagatcttctgcaagatggactacttcagccgattcgggaccaagtgtgcccggtgcggccgacagatctacgccagcgactgggtgcggagagctcgcggcaacgcctaccacctggcctgcttcgcctgcttctcgtgcaagcgccagctgtccactggtgaggagttcggcctggtcgaggagaaggtgctctgccgcatccactacgacaccatgattgagaacctcaagagggccgccgagaacgggaacggcctcacgttggagggggcagtgccctcggaacaggacagtcaacccaagccggccaagcgcgcgcggacgtccttcaccgcggaacagctgcaggttatgcaggcgcagttcgcgcaggacaacaaccccgacgctcagacgctgcagaagctggcggacatgacgggcctcagccggagagtcatccaggtgtggtttcaaaactgccgggcgcgtcataaaaagcacacgccgcaacacccagtgccgccctcgggggcgcccccgtcccgccttccctccgccctgtccgacgacatccactacaccccgttcagcagccccgagcgggcgcgcatggtcaccctgcacggctacattgagagtcaggtacagtgcgggcaggtgcactgccggctgccttacaccgcaccccccgtccacctcaaagccgatatggatgggccgctctccaaccggggtgagaaggtcatcctttttcagtactagtaatgaactagtccgtaacttgaaagtatttcgatttcttggctttatatatcttgtggaaaggacgacactgctttacaagaggatcccgc

SEQ ID NO: 911 - DNA, 1202 bp, Homo sapiens
  source 1..1202: mol_type = genomic DNA
accgccaccatgcgccgggggttgtgccggcgcagcgctgagaatcccgacgcggggccggtgatggcccagccagggtccggctgcaaagcgaccacccgctgtcttgaagggaccgcgccgcccgccatggctcagtctgacgccgaggccctggcaggagctctggacaaggacgagggtcaggcctccccatgtacgcccagcacgccatctgtctgctcaccgccctctgccgcctcctccgtgccgtctgcaggcaagaacatctgctccagctgcggcctcgagatcctggaccgatatctgctcaaggtcaacaacctcatctggcacgtgcggtgcctcgagtgctccgtgtgtcgcacgtcgctgaggcagcagaacagctgctacatcaagaacaaggagatcttctgcaagatggactacttcagccgattcgggaccaagtgtgcccggtgcggccgacagatctacgccagcgactgggtgcggagagctcgcggcaacgcctaccacctggcctgcttcgcctgcttctcgtgcaagcgccagctgtccactggtgaggagttcggcctggtcgaggagaaggtgctctgccgcatccactacgacaccatgattgagaacctcaagagggccgccgagaacgggaacggcctcacgttggagggggcagtgccctcggaacaggacagtcaacccaagccggccaagcgcgcgcggacgtccttcaccgcggaacagctgcaggttatgcaggcgcagttcgcgcaggacaacaaccccgacgctcagacgctgcagaagctggcggacatgacgggcctcagccggagagtcatccaggtgtggtttcaaaactgccgggcgcgtcataaaaagcacacgccgcaacacccagtgccgccctcgggggcgcccccgtcccgccttccctccgccctgtccgacgacatccactacaccccgttcagcagccccgagcgggcgcgcatggtcaccctgcacggctacattgagagtcatcctttttcagtactaacgctgccggcacttccgcatctgcccgtgggcgccccacagctgcccctcagccgctagtaatgaactagtccgtaacttgaaagtatttcgatttcttggctttatatatcttgtggaaaggacgaataggcgctattcctccgagggct

SEQ ID NO: 912 - DNA, 1235 bp, Homo sapiens
  source 1..1235: mol_type = genomic DNA
accgccaccatgtactggaagcatgagaacgccgccccggcgttgcccgagggctgccggctgccggccgagggcggccccgccaccgaccaggtgatggcccagccagggtccggctgcaaagcgaccacccgctgtcttgaagggaccgcgccgcccgccatggctcagtctgacgccgaggccctggcaggagctctggacaaggacgagggtcaggcctccccatgtacgcccagcacgccatctgtctgctcaccgccctctgccgcctcctccgtgccgtctgcaggcaagaacatctgctccagctgcggcctcgagatcctggaccgatatctgctcaaggtcaacaacctcatctggcacgtgcggtgcctcgagtgctccgtgtgtcgcacgtcgctgaggcagcagaacagctgctacatcaagaacaaggagatcttctgcaagatggactacttcagccgattcgggaccaagtgtgcccggtgcggccgacagatctacgccagcgactgggtgcggagagctcgcggcaacgcctaccacctggcctgcttcgcctgcttctcgtgcaagcgccagctgtccactggtgaggagttcggcctggtcgaggagaaggtgctctgccgcatccactacgacaccatgattgagaacctcaagagggccgccgagaacgggaacggcctcacgttggagggggcagtgccctcggaacaggacagtcaacccaagccggccaagcgcgcgcggacgtccttcaccgcggaacagctgcaggttatgcaggcgcagttcgcgcaggacaacaaccccgacgctcagacgctgcagaagctggcggacatgacgggcctcagccggagagtcatccaggtgtggtttcaaaactgccgggcgcgtcataaaaagcacacgccgcaacacccagtgccgccctcgggggcgcccccgtcccgccttccctccgccctgtccgacgacatccactacaccccgttcagcagccccgagcgggcgcgcatggtcaccctgcacggctacattgagagtcatcctttttcagtactaacgctgccggcacttccgcatctgcccgtgggcgccccacagctgcccctcagccgctagtaatgaactagtccgtaacttgaaagtatttcgatttcttggctttatatatcttgtggaaaggacgaggtaggcgtgttatcaattccaac

SEQ ID NO: 913 - DNA, 632 bp, Homo sapiens
  source 1..632: mol_type = genomic DNA
accgccaccatgattgagaacctcaagagggccgccgagaacgggaacggcctcacgttggagggggcagtgccctcggaacaggacagtcaacccaagccggccaagcgcgcgcggacgtccttcaccgcggaacagctgcaggttatgcaggcgcagttcgcgcaggacaacaaccccgacgctcagacgctgcagaagctggcggacatgacgggcctcagccggagagtcatccaggtgtggtttcaaaactgccgggcgcgtcataaaaagcacacgccgcaacacccagtgccgccctcgggggcgcccccgtcccgccttccctccgccctgtccgacgacatccactacaccccgttcagcagccccgagcgggcgcgcatggtcaccctgcacggctacattgagagtcaggtacagtgcgggcaggtgcactgccggctgccttacaccgcaccccccgtccacctcaaagccgatatggatgggccgctctccaaccggggtgagaaggtcatcctttttcagtactagtaatgaactagtccgtaacttgaaagtatttcgatttcttggctttatatatcttgtggaaaggacgatgaaggcgacctcttcccgtaata

SEQ ID NO: 914 - DNA, 1142 bp, Homo sapiens
  source 1..1142: mol_type = genomic DNA
accgccaccatgtcagaggagtgcgggcggactacagccctggcggccgggaggactcgcaaaggcgccggggaagagggactggtgagccccgagggagcgggggacgaggactcgtgctcctcctcggccccgctgtccccgtcgtcctcgccccggtccatggcctcgggctccggctgccctcctggcaagtgtgtgtgcaacagttgcggcctggagatcgtggacaaataccttctcaaggtgaatgacctatgctggcatgtccggtgtctctcctgcagtgtttgcagaacctccctaggaaggcacaccagctgttatattaaagacaaagacattttctgcaaacttgattatttcagaaggtatggaactcgctgctctcgatgtgggagacacatccattctactgactgggtccggagagccaaggggaatgtctatcacttggcatgctttgcctgcttttcctgcaaaaggcaactttccacaggagaggagtttgctttggtggaagagaaagtcctctgcagagtacattatgactgcatgctggataatttaaaaagagaagtagaaaatgggaatgggattagtgtggaaggtgccctcctcacagagcaagatgttaaccatccaaaaccagcaaaaagagctcggaccagctttacagcagatcagcttcaggttatgcaagcacaatttgctcaggacaacaacccagatgcacagacactccagaaattggcagaaaggacaggcttgagcagacgtgtgatacaggtgtggtttcagaattgtagagcacgccacaagaaacacgtcagtcctaatcactcatcctccaccccagtcacagcagtcccaccctccaggctgtctccacccatgttagaagaaatggcttattctgcctacgtgccccaagatggaacgatgttaactgcgctgcatagttatatggatgctcattcaccaacaactcttggactccagcccttgttaccccattcaatgacacaactgccaataagtcatacctagtaatgaactagtccgtaacttgaaagtatttcgatttcttggctttatatatcttgtggaaaggacgatgtcaaatcacgaccctgagtgca

SEQ ID NO: 915 - DNA, 1172 bp, Homo sapiens
  source 1..1172: mol_type = genomic DNA
accgccaccatgcagattctgagcaggtgtcaggggctcatgtcagaggagtgcgggcggactacagccctggcggccgggaggactcgcaaaggcgccggggaagagggactggtgagccccgagggagcgggggacgaggactcgtgctcctcctcggccccgctgtccccgtcgtcctcgccccggtccatggcctcgggctccggctgccctcctggcaagtgtgtgtgcaacagttgcggcctggagatcgtggacaaataccttctcaaggtgaatgacctatgctggcatgtccggtgtctctcctgcagtgtttgcagaacctccctaggaaggcacaccagctgttatattaaagacaaagacattttctgcaaacttgattatttcagaaggtatggaactcgctgctctcgatgtgggagacacatccattctactgactgggtccggagagccaaggggaatgtctatcacttggcatgctttgcctgcttttcctgcaaaaggcaactttccacaggagaggagtttgctttggtggaagagaaagtcctctgcagagtacattatgactgcatgctggataatttaaaaagagaagtagaaaatgggaatgggattagtgtggaaggtgccctcctcacagagcaagatgttaaccatccaaaaccagcaaaaagagctcggaccagctttacagcagatcagcttcaggttatgcaagcacaatttgctcaggacaacaacccagatgcacagacactccagaaattggcagaaaggacaggcttgagcagacgtgtgatacaggtgtggtttcagaattgtagagcacgccacaagaaacacgtcagtcctaatcactcatcctccaccccagtcacagcagtcccaccctccaggctgtctccacccatgttagaagaaatggcttattctgcctacgtgccccaagatggaacgatgttaactgcgctgcatagttatatggatgctcattcaccaacaactcttggactccagcccttgttaccccattcaatgacacaactgccaataagtcatacctagtaatgaactagtccgtaacttgaaagtatttcgatttcttggctttatatatcttgtggaaaggacgatatgtatactagtcgacagcggac

SEQ ID NO: 916 - DNA, 1112 bp, Homo sapiens
  source 1..1112: mol_type = genomic DNA
accgccaccatgcagacgctccaaacgccctctccacttcggatgaagccagcatctagtagggtctccggccctcaagaagccatgctctttcacgggatctccggaggccacatccaaggcatcatggaggagatggagcgcagatccaagactgaggcccgtctggccaaaggcgcccagctcaacggccgcgacgcgggcatgcccccgctcagcccggagaagcccgccctgtgcgccggctgcgggggcaagatctcggacaggtactatctgctggctgtggacaaacagtggcatctgagatgcctgaagtgctgtgaatgtaagctggccctcgagtccgagctcacctgctttgccaaggacggtagcatttactgcaaggaggattactacagaaggttctctgtgcagagatgtgcccgctgccaccttggcatttccgcctcggagatggtcatgcgcgcccgagactctgtctaccacctgagctgcttcacctgctccacttgcaacaagactctgaccacgggcgaccatttcggcatgaaggacagcctggtgtactgccgcgcccacttcgagaccctcttgcaaggagagtatccaccgcagctgagctacacggagctggcggccaagagcggcggcctggccctgccttacttcaacggtacgggcaccgtgcagaaagggcggccccggaagcggaagagcccagcgctgggagtggacatcgtcaattacaactcaggttgtaatgagaatgaggcagaccacttggaccgggaccagcagccttatccaccctcgcagaagaccaagcgcatgcgaacctctttcaagcatcaccagctccggaccatgaaatcctactttgccatcaaccacaacccggatgccaaggacctcaagcagcttgcccagaaaacaggtctgaccaaaagagttttgcagggagaacaaatcttggggcattacagccaaacatcccgacgtttgaaaattccctagtaatgaactagtccgtaacttgaaagtatttcgatttcttggctttatatatcttgtggaaaggacgacgtattgtgtgaggcgattggata

SEQ ID NO: 917 - DNA, 1268 bp, Homo sapiens
  source 1..1268: mol_type = genomic DNA
accgccaccatgctgaacggtaccactctagaggcagccatgctctttcacgggatctccggaggccacatccaaggcatcatggaggagatggagcgcagatccaagactgaggcccgtctggccaaaggcgcccagctcaacggccgcgacgcgggcatgcccccgctcagcccggagaagcccgccctgtgcgccggctgcgggggcaagatctcggacaggtactatctgctggctgtggacaaacagtggcatctgagatgcctgaagtgctgtgaatgtaagctggccctcgagtccgagctcacctgctttgccaaggacggtagcatttactgcaaggaggattactacagaaggttctctgtgcagagatgtgcccgctgccaccttggcatttccgcctcggagatggtcatgcgcgcccgagactctgtctaccacctgagctgcttcacctgctccacttgcaacaagactctgaccacgggcgaccatttcggcatgaaggacagcctggtgtactgccgcgcccacttcgagaccctcttgcaaggagagtatccaccgcagctgagctacacggagctggcggccaagagcggcggcctggccctgccttacttcaacggtacgggcaccgtgcagaaagggcggccccggaagcggaagagcccagcgctgggagtggacatcgtcaattacaactcaggttgtaatgagaatgaggcagaccacttggaccgggaccagcagccttatccaccctcgcagaagaccaagcgcatgcgaacctctttcaagcatcaccagctccggaccatgaaatcctactttgccatcaaccacaacccggatgccaaggacctcaagcagcttgcccagaaaacaggtctgaccaaaagagttttgcaggtttggttccaaaacgcacgagccaaattcagaaggaaccttttgcggcaggagaatgggggtgttgataaagctgacggcacgtcgcttccggccccgccctcagcagacagcggagctctcactccacccggcactgcgaccactttaacagacctgaccaatcccactatcactgtagtgacatccgtgacctctaacatggacagccacgaatccggaagcccctcacaaactaccttaacaaaccttttctagtaatgaactagtccgtaacttgaaagtatttcgatttcttggctttatatatcttgtggaaaggacgatacagcgagcgacggtcgttgagg

SEQ ID NO: 918 - DNA, 2411 bp, Homo sapiens
  source 1..2411: mol_type = genomic DNA
accgccaccatgccagctagttggacctcaccccagaaatcctcagccctggctccagaggatcatggcagctcctatgagggatcagtgtccttcagggatgtggctatcgatttcagcagagaggaatggcggcacctggacctttctcagagaaacctgtaccgggatgtgatgctggagacctacagccacctgctctcagtagggtatcaagttcctaaaccagaggtggtcatgttggagcaaggaaaggaaccatgggcactgcagggtgagaggccacgtcacagctgcccaggagagaaattatgggaccataatcaacatagaaaaatcatcggttataaaccagcttcctctcaagatcaaaaaatttattctggggaaaaatcctatgagtgtgctgaatttggaaagagcttcacctggaagtcacagttcaaggtacatctgaaagttcctacaggagaaaaactctatgtatgtattgaatgtgggagggcttttgtacagaagccagaattcatcacacatcagaaaacccatatgagagagaagccctataagtgcaatgaatgtggaaaatccttttttcaagtatcgtctcttttcaggcatcacagaattcataccggagaaaaactatatgaatgtagtgaatgtgggaaaggtttcccttataactcagatctcagtatacatgagaaaattcatactggagagagacaccatgaatgcactgactgtggcaaagcgttcacacaaaagtccacactcaagattcatcagaaaatccatacaggcgagagatcctacatctgtattgaatgcgggcaggccttcatccagaaaacacaattgattgcacaccgaagaattcatagtggagaaaaaccatatgaatgcaataactgtggcaaatccttcatttccaagtcacaacttcaggtacatcaacgtgttcacacaagagtgaagccctatatatgtaccgaatatgggaaggtcttcagcaataattccaacctcattacacatgagaagattcaaagtagagagaaatcttccatatgtactgagtgtgggaaggcctttacctacaggtcagagttgattattcatcagagaattcacactggagagaaaccttatgaatgcagtgactgtgggagagccttcactcagaagtcagcactcacagtgcatcagagaattcatacaggagaaaaatcgtatatatgcatgaaatgtggactggccttcatccggaaggcacacttgattacacatcaaataattcatactggagagaaaccttataaatgtggtcactgtgggaaattgtttacttccaagtcacaactccatgttcataaacgaattcacacaggagaaaagccctatgtatgcaataaatgtgggaaggcattcaccaaccggtcaaatctcattacacatcagaaaactcatacaggagagaaatcttatatatgttccaaatgtggaaaggccttcacccagaggtcagacttgattacacatcagagaatccatactggggagaagccttatgaatgcaatacttgtggaaaagcctttactcagaagtcaaatcttaatatacatcagaaaattcacactggagagagacagtatgaatgccacgaatgtgggaaagccttcaaccagaaatcaatactcattgttcatcagaaaattcatacaggagagaaaccctatgtatgcactgagtgtggaagagctttcatccgcaagtcaaactttattactcatcaaagaattcatactggagagaagccttatgaatgcagtgactgtgggaagtcctttacctccaagtctcagctcctggtgcatcagccagttcacacaggagagaaaccctatgtgtgtgccgagtgtgggaaagcctttagtggcaggtcaaatctcagtaagcaccagaaaactcataccggagaaaagccctacatttgttctgaatgtgggaagacctttcgacagaagtcagagttgattacacatcacagaattcatactggagagaaaccttatgagtgcagtgactgtgggaagtctttcactaaaaaatcacagctccaagtgcatcagcgaattcacactggagagaagccttacgtgtgtgctgagtgtgggaaggcctttagcaacaggtccaatttgaataaacatcagacaacacacactggagacaaaccctacaagtgtggcatctgtgggaaaggcttcgttcagaaatcagtgttcagtgttcatcagagcagccacgcttagtaatgaactagtccgtaacttgaaagtatttcgatttcttggctttatatatcttgtggaaaggacgagatgccgatggtcccatattacgt

SEQ ID NO: 919 - DNA, 1694 bp, Homo sapiens
  source 1..1694: mol_type = genomic DNA
accgccaccatgggtagcaacagtgggcaggctggccgccacatctataaatccctagctgatgatggcccctttgactctgtggagccgcctaaaagacccaccagcagactcatcatgcacagcatggccatgttcggaagagagttctgctacgcggtggaggcagcgtatgtgaccccagtcctgctcagcgtaggtctgcccagcagcctgtacagcattgtgtggttcctcagccccatcctgggattcctgctgcagcccgtggtcggatcggccagcgaccactgccggtccaggtggggccgccggagaccctacatcctcaccctgggagtcatgatgctcgtgggcatggctctgtacctcaatggggctactgttgtagcagctttgattgctaacccaaggaggaagctggtttgggccataagtgtcaccatgataggtgtcgttctctttgattttgctgccgacttcattgatgggcccatcaaagcctacttatttgatgtctgctcccatcaggacaaggagaagggcctccactaccatgccctcttcacaggttttggaggtgccctgggttaccttttgggtgctatagactgggcccatctggagctgggaagactgttgggtacagaattccaggtcatgttcttcttctctgcattggtgctcactttgtgttttactgttcatctgtgcagtatctctgaagccccacttacagaggttgcaaagggcattcccccacagcaaacccctcaggaccctccattgtcatcagatggaatgtacgagtatggttctatcgagaaagttaaaaatggttacgtaaatccagagctggcaatgcagggagcaaaaaacaaaaatcatgctgaacagactcgcagggcaatgacattaaagtcactgctgagagcactggtgaacatgcctcctcactaccgctacctttgcatcagccacctcattggatggacagccttcctgtccaacatgctgttcttcacagatttcatgggccagattgtgtaccgcggggatccctatagtgcacacaactccacagagtttctcatctacgaaagaggagtcgaggttggatgttggggcttgtgcatcaactccgtgttttcctcactttattcttactttcagaaagttttggtatcctacattggattaaagggtctttacttcacgggatatttgctgtttggcctggggacgggatttattgggctcttcccgaatgtctactccaccctggtcctgtgcagcctgtttggtgtaatgtccagcaccctgtacactgtgccctttaacctcattactgagtaccaccgcgaggaagaaaaggagaggcagcaggccccaggaggggacccagacaacagcgtgagagggaagggcatggactgcgccaccctcacatgcatggtgcagctggctcagatcctggtcggaggtggcctgggctttctggtcaacacagccgggaccgttgtcgtcgtggtgatcacagcgtctgcggtggcactgataggctgttgctttgtcgctctctttgttagatatgtggattagtaatgaactagtccgtaacttgaaagtatttcgatttcttggctttatatatcttgtggaaaggacgacctgaacacataatgtcttgggtt

SEQ ID NO: 920 - DNA, 833 bp, Homo sapiens
  source 1..833: mol_type = genomic DNA
accgccaccatgggtagcaacagtgggcaggctggccgccacatctataaatccctagctgatgatggcccctttgactctgtggagccgcctaaaagacccaccagcagactcatcatgcacagcatggccatgttcggaagagagttctgctacgcggtggaggcagcgtatgtgaccccagtcctgctcagcgtaggtctgcccagcagcctgtacagcattgtgtggttcctcagccccatcctgggattcctgctgcagcccgtggtcggatcggccagcgaccactgccggtccaggtggggccgccggagaccctacatcctcaccctgggagtcatgatgctcgtgggcatggctctgtacctcaatggggctactgttgtagcagctttgattgctaacccaaggaggaagctggtttgggccataagtgtcaccatgataggtgtcgttctctttgattttgctgccgacttcattgatgggcccatcaaagcctacttatttgatgtctgctcccatcaggacaaggagaagggcctccactaccatgccctcttcacagactcgcagggcaatgacattaaagtcactgctgagagcactggtgaacatgcctcctcactaccgctacctttgcatcagccacctcattggatggacagccttcctgtccaacatgctgttcttcacagatttcatgggccagattgtgtaccgcggggatccctatagtaatgaactagtccgtaacttgaaagtatttcgatttcttggctttatatatcttgtggaaaggacgaacgaggcgctgcgatgttgatcat

SEQ ID NO: 921 - DNA, 2120 bp, Homo sapiens
  source 1..2120: mol_type = genomic DNA
accgccaccatggagagtagaaaactgatttctgctacagacattcagtactctggcagtctgctgaactccttgaatgagcaacgtggccatggactcttctgtgatgttaccgttattgtggaagaccgaaaattccgggctcacaagaatattctttcagcttctagtacctacttccatcagctcttctctgttgctgggcaagttgttgaactgagctttataagagcagagatctttgcagaaattctcaattatatctatagttctaaaattgttcgtgttagatcagatttgcttgatgagttaattaaatcagggcagttattaggagtgaaatttatagcagagcttggtgtcccattgtcacaggttaaaagcatctcaggtacagcgcaggatggtaatactgagcctttacctcctgattctggtgacaagaaccttgtaatacagaaatcaaaagatgaagcccaagataatggggctactataatgcctattataacagagtctttttcattatctgccgaagattatgaaatgaaaaagatcattgttaccgattctgatgatgatgatgatgatgtcattttttgctccgagattctgcccacaaaggagactttgccgagtaataacacagtggcacaggtccaatctaacccaggccctgttgctatttcagatgttgcacctagtgctagcaataactcgccccctttaacaaatatcacacctactcagaaacttcctactcctgtgaatcaggcaactttgagccaaacacaaggaagtgaaaaattgttggtatcttcagctccaacacatctgactcccaatattattttgttaaatcagacaccactttctacaccaccaaatgtcagttcttcacttccaaatcatatgccctcttcaatcaatttacttgtgcagaatcagcagacaccaaacagtgctattttaacaggaaacaaggccaatgaagaggaggaggaggaaataatagatgatgatgatgacactattagctccagtcctgactcggccgtcagtaatacatctttggtcccacaggctgatacctcccaaaataccagttttgatggatcattaatacagaagatgcagattcctacacttcttcaagaaccactttccaattccttaaaaatttcagatataattactagaaatactaatgatccaggcgtaggatcaaaacatctaatggagggtcagaagatcattactttagatacagctactgaaattgaaggcttatcgactggttgcaaggtttatgcaaatatcggtgaagatacttatgatatagtgatccctgtcaaagatgaccctgatgaaggggaggccagacttgagaatgaaataccaaaaacgtctggcagcgagatggcaaacaaacgtatgaaagtaaaacatgatgatcactatgagttaatagtagatggaagggtctattatatctgtattgtatgcaaaaggtcatatgtctgtctgacaagcttgcggagacattttaacattcattcttgggagaagaagtatccgtgccgttactgtgagaaggtatttcctcttgcagaatatcgcacaaagcatgaaattcatcacacaggggagcgaaggtatcagtgtttggcctgtggcaaatctttcatcaactatcagtttatgtcttcacatataaagtcagttcatagtcaagatccttctggggactcaaagctttatcgtttacatccatgcaggtctttacaaatcagacaatatgcatatctttccgatagatcaagcactattcctgcaatgaaggatgatggtattgggtataaggttgacactggaaaagaacctccagtagggaccactacatctactcagaacaagccaatgacctgggaagatatttttattcagcaggaaaatgattcaatttttaaacaaaatgtaacagatggcagtactgagtttgaatttataataccagagtcttactagtaatgaactagtccgtaacttgaaagtatttcgatttcttggctttatatatcttgtggaaaggacgagaagatactctttggacatcctgc

SEQ ID NO: 922 - DNA, 1655 bp, Homo sapiens
  source 1..1655: mol_type = genomic DNA
accgccaccatggcggccctaggccctagcagccagaatgtcactgaatacgtcgttcgagttcctaagaatacaaccaaaaaatataacatcatggcttttaatgcagccgacaaagtcaactttgctacgtggaatcaggctcggctggagcgggacttgagcaacaagaaaatctaccaagaggaggagatgcccgaatcgggcgcgggcagtgagttcaaccgcaagcttcgggaggaggctcggaggaagaagtacggcatcgtcctcaaggagttccggcccgaggaccagccctggctgctccgggtcaacggcaaatcaggcaggaagttcaagggcatcaagaagggaggcgtaacagagaacacgtcctactacatcttcacccagtgccccgacggggccttcgaggccttccccgtgcacaactggtacaatttcacaccgctggcccggcatcgcacgctcactgccgaggaggccgaggaggagtgggagaggaggaacaaggtgctgaaccacttcagcatcatgcagcagcggcggctcaaggatcaggaccaggacgaggatgaggaggagaaggagaaacgtggccgcaggaaggcgagcgagctgcgcatccacgacctggaggacgacctggagatgtcgtccgatgccagtgatgccagtggtgaggaggggggcagagtccccaaggccaagaagaaggcgccgctggccaagggcggcaggaaaaagaagaagaagaagggttcagacgacgaggccttcgaggacagcgatgatggggacttcgagggccaagaggtggactacatgtcagacggctccagtagctcccaagaagagcctgagagcaaggccaaggcgccgcagcaggaggaggggcccaagggtgtcgatgagcagagcgacagtagtgaggagagtgaggaggagaagccgcctgaggaggacaaggaggaggaggaggagaagaaggcacccaccccgcaggagaagaagcgcaggaaagacagcagcgaggagtcggacagctcagaggagagcgacattgacagcgaggcctcctcagccctcttcatggcgaagaagaagacgccacccaagagagagcggaagccgtcgggagggagctcaaggggcaacagccgcccaggcacgcccagcgcagagggtggcagcacctcctccaccctgcgggcggctgccagcaaactcgagcaagggaagcgggtgagcgagatgcctgcagccaagcggttgcggctggacacgggaccccagagcctgtctgggaagtcgacaccccagccaccatcaggcaagacaacacccaacagcggcgacgtgcaggtgactgaggatgccgtgcgccgctacctgacacggaagcccatgaccactaaggacctgctgaaaaagttccagaccaagaagacagggctgagcagcgagcagacagtgaacgtgttggcccagatcctcaagcgactcaaccccgagcgcaagatgatcaacgacaaaatgcacttctccctcaaggagtagtaatgaactagtccgtaacttgaaagtatttcgatttcttggctttatatatcttgtggaaaggacgatcactgtctgggcccgctaggctg

SEQ ID NO: 923 - DNA, 851 bp, Homo sapiens
  source 1..851: mol_type = genomic DNA
accgccaccatggccgagcgcggggaactcgacttgaccggcgccaaacagaacacaggagtgtggctagtcaaggttcctaaatatttgtcacagcaatgggctaaagcctctggaagaggtgaagttgggaaactgcggattgccaagactcaaggaaggactgaggtgtcatttactttgaatgaggatcttgcaaatattcatgatattggtggaaaaccagcttcagtcagtgctcctagagaacatccatttgtcttgcaaagtgttggaggacagacattaacagtatttactgagagctcatcagataagctgtcattggaaggaatagtggtacaaagagctgaatgccgaccagctgccagtgaaaactacatgcgattaaaaagattgcaaatagaagagtcttccaaaccagtgaggctatcacaacagctggacaaagttgtaacaaccaattacaaacctgttgctaatcatcaatacaatatcgaatatgaaaggaaaaagaaagaagacggaaagcgagctcgagctgataaacaacatgttttagacatgctattttcagcctttgagaaacatcaatactataatcttaaggacttggtggacatcacaaagcaacctgtggtgtacctgaaggaaatcttaaaagaaattggtgttcagaatgtaaaagggatccacaaaaacacatgggagctgaagccagagtacagacactatcaaggagaagaaaagagtgactagtaatgaactagtccgtaacttgaaagtatttcgatttcttggctttatatatcttgtggaaaggacgaatcatacggagataaattattgca

SEQ ID NO: 924 - DNA, 713 bp, Homo sapiens
  source 1..713: mol_type = genomic DNA
accgccaccatggcacatgtttcttcagaaactcaagatgtttcccccaaagatgaattaactgcttcagaagcctccactaggtctccattgtgtgaacacaccttccctggggactcagacttacggtcaatgattgaagaacatgcttttcaggttttgtcacaaggatccttgttagaaagtccaagttacacagtttgtgtctctgagccagataaagatgatgattttctttctctgaactttcccaggaaactttggaaaatagtggaaagtgaccaattcaagtctatttcatgggatgagaatggaacttgcatagtgattaatgaagaactcttcaagaaagaaattttggaaacaaaggctccttacagaatatttcaaactgatgctatcaaaagttttgttcgacagctcaacctttatggatttagtaaaattcaacagaattttcaaagatctgcctttctagccacctttctgtcagaagagaaagaatcgtctgtcttaagcaagatacgcttcaccaaaatgaaactttccagatcttcaacttatgaaaacaggtatttatgttgcaacttacatttaaaagatgagtcgaattactcatagtaatgaactagtccgtaacttgaaagtatttcgatttcttggctttatatatcttgtggaaaggacgacttcaaccgaataagataacttag

SEQ ID NO: 925 - DNA, 1307 bp, Homo sapiens
  source 1..1307: mol_type = genomic DNA
accgccaccatggcacatgtttcttcagaaactcaagatgtttcccccaaagatgaattaactgcttcagaagcctccactaggtctccattgtgtgaacacaccttccctggggactcagacttacggtcaatgattgaagaacatgcttttcaggttttgtcacaaggatccttgttagaaagtccaagttacacagtttgtgtctctgagccagataaagatgatgattttctttctctgaactttcccaggaaactttggaaaatagtggaaagtgaccaattcaagtctatttcatgggatgagaatggaacttgcatagtgattaatgaagaactcttcaagaaagaaattttggaaacaaaggctccttacagaatatttcaaactgatgctatcaaaagttttgttcgacagctcaacctttatggatttagtaaaattcaacagaattttcaaagatctgcctttctagccacctttctgtcagaagagaaagaatcgtctgtcttaagcaagttaaagttctattataatccaaatttcaagcgtggctatccccaacttttagtaagagtgaagagaagaattggtgttaaaaatgcttcacctatatctactttattcaacgaagatttcaacaagaagcattttagagcaggggctaacatggagaatcataattctgccttagctgctgaagctagtgaagaaagtttattttcagcctctaaaaatttaaatatgcctctaacaagggaatcttctgtcagacagataattgcaaattcatctgtccccattagaagtggtttccctcctccttcaccttcaacctcagttggaccatcagaacaaattgcaacagatcaacatgctattttaaatcagttgaccactattcatatgcactctcatagtacctacatgcaagcaaggggccacattgtgaattttattacaaccacaacttctcaataccacatcatatctcccttacaaaatggttattttgggctgacagtggaaccatctgctgttcccacacgatatcctctggtatcagtcaatgaggctccatatcgtaacatgctaccagcaggcaacccgtggttgcaaatgcctacgatcgctgatagatcagctgcccctcattccaggctagctcttcaaccatcaccactggacaaatatcaccctaattacaactagtaatgaactagtccgtaacttgaaagtatttcgatttcttggctttatatatcttgtggaaaggacgactaccgtgcacataacttaagcac

SEQ ID NO: 926 - DNA, 1634 bp, Homo sapiens
  source 1..1634: mol_type = genomic DNA
accgccaccatgttgcctttggagaaggcgtttgcctcccccaggagctccccagccccgccggatctgcccacgccggggtcagcagccggagtccagcaggaagaacccgagaccatccctgagaggacccctgctgacctggagttctcccgcctgcgtttccgggaatttgtctaccaggaggctgccgggccccaccagaccctggcccggctgcatgagctgtgccgccagtggctgatgcctgaggcgcgctccaaggagcagatgctggagctgctggtgctggagcagttcctgggcatcctgcctgataaggtccggccctgggtggtggcacagtaccctgagagctgcaagaaggcagcctccctggtggagggcctcgctgatgtcctggaagagccagggatgctgctgggctcccctgcgggctcatcctcaattcttagcgatggagtgtacgagaggcacatggaccctctgctgctaccaggcgagctcgcgagccccagccaggcccttggagctggggagatcccggcaccttctgagacaccctggctttctccggaccccctgtttctggaacagaggagggtcagagaagcaaagaccgaagaggacggccctgccaacaccgagcagaagctgaagtcctttccagaggaccctcagcacctgggggagtggggccacctggaccctgccgaggagaacctgaagagctaccggaagctgctcctgtgggggtatcagctttcccagcctgacgctgcctccaggctggacactgaggaactccggttggtggaaagagatccacaaggaagcagcctcccagaaggcgggaggcggcaggagagcgctgggtgcgcctgcgaggaggccgcccccgcgggggtgctgcctgagctgcctacggaggcgccccctggggacgcccttgccgatcccccgtcgggcaccactgaggaggaggaagagcagcctgggaaggccccggacccgcaggacccccaggacgcggagtccgactctgccaccggatcgcagaggcagtccgtcatccagcagcctgccccggacaggggcacggcgaaactgggaaccaagaggccgcaccccgaggatggggacgggcagagcctcgagggcgtctctagctccggcgacagcgcagggctggaggccgggcagggccctggggctgacgagccgggcttgtcccgcgggaagccctatgcctgcggcgagtgcggggaggccttcgcgtggctctcgcacctgatggagcaccacagcagccatggcggccggaagcgctacgcctgtcagggctgctggaagaccttccacttcagcctggccctagccgagcaccagaagacccacgagaaggagaaaagctacgcgctggggggcgcccggggcccccaaccgtccacccgcgaagcccaggcgggggctagggcgggcggtcccccagagagcgtggagggcgaggctccccccgcacccccagaggcgcagaggtagtaatgaactagtccgtaacttgaaagtatttcgatttcttggctttatatatcttgtggaaaggacgaagcgcaccgggcaaacttcataca

SEQ ID NO: 927 - DNA, 1226 bp, Homo sapiens
  source 1..1226: mol_type = genomic DNA
accgccaccatgctgctgggctcccctgcgggctcatcctcaattcttagcgatggagtgtacgagaggcacatggaccctctgctgctaccaggcgagctcgcgagccccagccaggcccttggagctggggagatcccggcaccttctgagacaccctggctttctccggaccccctgtttctggaacagaggagggtcagagaagcaaagaccgaagaggacggccctgccaacaccgagcagaagctgaagtcctttccagaggaccctcagcacctgggggagtggggccacctggaccctgccgaggagaacctgaagagctaccggaagctgctcctgtgggggtatcagctttcccagcctgacgctgcctccaggctggacactgaggaactccggttggtggaaagagatccacaaggaagcagcctcccaggcgggaggcggcaggagagcgctgggtgcgcctgcgaggaggccgcccccgcgggggtgctgcctgagctgcctacggaggcgccccctggggacgcccttgccgatcccccgtcgggcaccactgaggaggaggaagagcagcctgggaaggccccggacccgcaggacccccaggacgcggagtccgactctgccaccggatcgcagaggcagtccgtcatccagcagcctgccccggacaggggcacggcgaaactgggaaccaagaggccgcaccccgaggatggggacgggcagagcctcgagggcgtctctagctccggcgacagcgcagggctggaggccgggcagggccctggggctgacgagccgggcttgtcccgcgggaagccctatgcctgcggcgagtgcggggaggccttcgcgtggctctcgcacctgatggagcaccacagcagccatggcggccggaagcgctacgcctgtcagggctgctggaagaccttccacttcagcctggccctagccgagcaccagaagacccacgagaaggagaaaagctacgcgctggggggcgcccggggcccccaaccgtccacccgcgaagcccaggcgggggctagggcgggcggtcccccagagagcgtggagggcgaggctccccccgcacccccagaggcgcagaggtagtaatgaactagtccgtaacttgaaagtatttcgatttcttggctttatatatcttgtggaaaggacgaattgaactaacacgcaagcatgga

SEQ ID NO: 928 - DNA, 1802 bp, Homo sapiens
  source 1..1802: mol_type = genomic DNA
accgccaccatgcggagagtcggagggcgagctgacgaggacgctacggcggcgggaagtctgtgggttctggcaccacctgagcccactgggcatctggtcatccctggcacctctcctttggagccaccttgtccctggctagacagtcacattttccagtgccgttttggaaagatgttgcctttggagaaggcgtttgcctcccccaggagctccccagccccgccggatctgcccacgccggggtcagcagccggagtccagcaggaagaacccgagaccatccctgagaggacccctgctgacctggagttctcccgcctgcgtttccgggaatttgtctaccaggaggctgccgggccccaccagaccctggcccggctgcatgagctgtgccgccagtggctgatgcctgaggcgcgctccaaggagcagatgctggagctgctggtgctggagcagttcctgggcatcctgcctgataaggtccggccctgggtggtggcacagtaccctgagagctgcaagaaggcagcctccctggtggagggcctcgctgatgtcctggaagagccagggatgctgctgggctcccctgcgggctcatcctcaattcttagcgatggagtgtacgagaggcacatggaccctctgctgctaccaggcgagctcgcgagccccagccaggcccttggagctggggagatcccggcaccttctgagacaccctggctttctccggaccccctgtttctggaacagaggagggtcagagaagcaaagaccgaagaggacggccctgccaacaccgagcagaagctgaagtcctttccagaggaccctcagcacctgggggagtggggccacctggaccctgccgaggagaacctgaagagctaccggaagctgctcctgtgggggtatcagctttcccagcctgacgctgcctccaggctggacactgaggaactccggttggtggaaagagatccacaaggaagcagcctcccagaaggcgggaggcggcaggagagcgctgggtgcgcctgcgaggaggccgcccccgcgggggtgctgcctgagctgcctacggaggcgccccctggggacgcccttgccgatcccccgtcgggcaccactgaggaggaggaagagcagcctgggaaggccccggacccgcaggacccccaggacgcggagtccgactctgccaccggatcgcagaggcagtccgtcatccagcagcctgccccggacaggggcacggcgaaactgggaaccaagaggccgcaccccgaggatggggacgggcagagcctcgagggcgtctctagctccggcgacagcgcagggctggaggccgggcagggccctggggctgacgagccgggcttgtcccgcgggaagccctatgcctgcggcgagtgcggggaggccttcgcgtggctctcgcacctgatggagcaccacagcagccatggcggccggaagcgctacgcctgtcagggctgctggaagaccttccacttcagcctggccctagccgagcaccagaagacccacgagaaggagaaaagctacgcgctggggggcgcccggggcccccaaccgtccacccgcgaagcccaggcgggggctagggcgggcggtcccccagagagcgtggagggcgaggctccccccgcacccccagaggcgcagaggtagtaatgaactagtccgtaacttgaaagtatttcgatttcttggctttatatatcttgtggaaaggacgactgtattaagcgtgcagcaatggg

SEQ ID NO: 929 - DNA, 713 bp, Homo sapiens
  source 1..713: mol_type = genomic DNA
accgccaccatggcacatgtttcttcagaaactcaagatgtttcccccaaagatgaattaactgcttcagaagcctccactaggtctccattgtgtgaacacaccttccctggggactcagacttacggtcaatgattgaagaacatgcttttcaggttttgtcacaaggatccttgttagaaagtccaagttacacagtttgtgtctctgagccagataaagatgatgattttctttctctgaactttcccaggaaactttggaaaatagtggaaagtgaccaattcaagtctatttcatgggatgagaatggaacttgcatagtgattaatgaagaactcttcaagaaagaaattttggaaacaaaggctccttacagaatatttcaaactgatgctatcaaaagttttgttcgacagctcaacctttatggatttagtaaaattcaacagaattttcaaagatctgcctttctagccacctttctgtcagaagagaaagaatcgtctgtcttaagcaagatacgcttcaccaaaatgaaactttccagatcttcaacttatgaaaacaggtatttatgttgcaacttacatttaaaagatgagtcgaattactcatagtaatgaactagtccgtaacttgaaagtatttcgatttcttggctttatatatcttgtggaaaggacgattaaagggcctaaatagaccattt

SEQ ID NO: 930 - DNA, 1307 bp, Homo sapiens
  source 1..1307: mol_type = genomic DNA
accgccaccatggcacatgtttcttcagaaactcaagatgtttcccccaaagatgaattaactgcttcagaagcctccactaggtctccattgtgtgaacacaccttccctggggactcagacttacggtcaatgattgaagaacatgcttttcaggttttgtcacaaggatccttgttagaaagtccaagttacacagtttgtgtctctgagccagataaagatgatgattttctttctctgaactttcccaggaaactttggaaaatagtggaaagtgaccaattcaagtctatttcatgggatgagaatggaacttgcatagtgattaatgaagaactcttcaagaaagaaattttggaaacaaaggctccttacagaatatttcaaactgatgctatcaaaagttttgttcgacagctcaacctttatggatttagtaaaattcaacagaattttcaaagatctgcctttctagccacctttctgtcagaagagaaagaatcgtctgtcttaagcaagttaaagttctattataatccaaatttcaagcgtggctatccccaacttttagtaagagtgaagagaagaattggtgttaaaaatgcttcacctatatctactttattcaacgaagatttcaacaagaagcattttagagcaggggctaacatggagaatcataattctgccttagctgctgaagctagtgaagaaagtttattttcagcctctaaaaatttaaatatgcctctaacaagggaatcttctgtcagacagataattgcaaattcatctgtccccattagaagtggtttccctcctccttcaccttcaacctcagttggaccatcagaacaaattgcaacagatcaacatgctattttaaatcagttgaccactattcatatgcactctcatagtacctacatgcaagcaaggggccacattgtgaattttattacaaccacaacttctcaataccacatcatatctcccttacaaaatggttattttgggctgacagtggaaccatctgctgttcccacacgatatcctctggtatcagtcaatgaggctccatatcgtaacatgctaccagcaggcaacccgtggttgcaaatgcctacgatcgctgatagatcagctgcccctcattccaggctagctcttcaaccatcaccactggacaaatatcaccctaattacaactagtaatgaactagtccgtaacttgaaagtatttcgatttcttggctttatatatcttgtggaaaggacgaattcgagaatcctcgtaactaatg

SEQ ID NO: 931 - DNA, 2444 bp, Homo sapiens
  source 1..2444: mol_type = genomic DNA
accgccaccatgcttggagaatcagtcccagctgccgtggagcaggagcagctgggggaagtcaagctggaggaggaggaggctgtcagcccagaggaccccaggcgaccagagtccaggctgaggcccgaggtggctcaccagctgttcagatgcttccagtatcaggaggacatggggccacgggcgtccctgagccggctccgggagctctgcggccactggctgcggccggctctgcacaccaagaaacagatcctggagctgctggtgctggagcagttcctgagtgtgctgcctccgcacctcctgggccgcctgcaggggcagccgctcagggatggggaggaggtggtgctgctgctcgagggcatccaccgggagcccagccacgcggggccgctggattttagttgtaatgctggcaagagttgtccccgtgcagacgtcaccttggaggaaaaggggtgtgcttcccaggtccccagccacagccccaagaaggaattgcctgcggaagagccttcagtgctgggcccatcggatgagcctccccgaccccagccaagggctgcccagcctgctgagccgggacagtggaggcttcccccaagttcaaagcagccgctgagcccggggccccagaagacattccaggccctgcaagaaagcagtccccagggcccctcaccatggccagaggagagttcccgagatcaggagctggcggctgtgctggagtgcctgacctttgaggatgtgccagagaataaggcgtggcctgcacaccccctgggattcggaagcagaaccccagacaaggaggaatttaaacaagaagagcccaaaggggctgcctggcccactcccatcttagcagagtcccaggcagatagtcctggggtgccgggagagccttgcgcccagtcgctcggacggggcgctgcggctagcggccctggtgaagatgggtcccttcttggcagcagtgaaattttggaggtcaaagtggctgagggcgtccccgagcccaatccggagttgcagttcatctgcgcggactgcggggtgagcttcccgcagctgtctcgcctgaaggcgcaccagctgcgctcgcacccggctgggcgctccttcctgtgcctttgctgcgggaagagcttcggccgcagctccattctcaagctgcacatgcgcactcacacggacgagcggccgcacgcctgccacctgtgcggccaccgcttccgccagagctcgcacctgagcaagcacctgctgacccactcctccgaacccgccttcctgtgcgcagagtgcggccgcggcttccagcgccgcgccagccttgtgcagcacctgctggcgcacgcccaggaccagaagccgccctgcgctcctgagagtaaggccgaagcgccgccactgaccgatgtcctgtgctcccactgcggccagagcttccagcgccgctccagcctcaagcgccacctgcggatccacgccagggacaaggaccgccggtcctccgaaggctccggcagccgccgccgggactccgaccggaggcccttcgtgtgcagcgactgcggcaaggccttccggcgcagcgagcacctggtggcccaccggagggtgcacacgggcgagcggcccttctcctgccaggcttgcggccgcagcttcacgcagagctcgcagctggtcagccaccaacgggtgcacacgggcgagaagccctacgcctgtccgcagtgcgggaagcgctttgtgcgccgggccagccttgcccgccacctgctgacccacggtggccctcggccccaccactgcacccagtgcgggaagagtttcggccagacccaggatctggcccgccaccagcgcagccacacgggcgagaagccctgccgctgcagcgagtgcggtgagggcttcagccagagcgcccacctggcgcgccaccagcgcatccacacaggggagaagccccacgcctgcgacacctgcggccaccgtttccgcaatagctccaacctggcccgccatcgccgcagccacacgggcgagcggccctacagctgtcagacgtgcggtcgcagcttccggcgcaacgcgcatctgcggcggcacctggctacccatgcggagcccgggcaggagcaggccgagcccccgcaggagtgcgtggagtgcgggaagagcttcagccgcagctgcaatctgctgcgacacctgctggtgcacacgggcgccaggccctactcctgcacgcagtgtggccgcagcttcagccgcaactcccacctgctgcgccacctgcgcacccacgcccgcgagacgctgtactagtaatgaactagtccgtaacttgaaagtatttcgatttcttggctttatatatcttgtggaaaggacgagcggtatgactcagatagggcgag

SEQ ID NO: 932 - DNA, 1262 bp, Homo sapiens
  source 1..1262: mol_type = genomic DNA
accgccaccatgcgcactcacacggacgagcggccgcacgcctgccacctgtgcggccaccgcttccgccagagctcgcacctgagcaagcacctgctgacccactcctccgaacccgccttcctgtgcgcagagtgcggccgcggcttccagcgccgcgccagccttgtgcagcacctgctggcgcacgcccaggaccagaagccgccctgcgctcctgagagtaaggccgaagcgccgccactgaccgatgtcctgtgctcccactgcggccagagcttccagcgccgctccagcctcaagcgccacctgcggatccacgccagggacaaggaccgccggtcctccgaaggctccggcagccgccgccgggactccgaccggaggcccttcgtgtgcagcgactgcggcaaggccttccggcgcagcgagcacctggtggcccaccggagggtgcacacgggcgagcggcccttctcctgccaggcttgcggccgcagcttcacgcagagctcgcagctggtcagccaccaacgggtgcacacgggcgagaagccctacgcctgtccgcagtgcgggaagcgctttgtgcgccgggccagccttgcccgccacctgctgacccacggtggccctcggccccaccactgcacccagtgcgggaagagtttcggccagacccaggatctggcccgccaccagcgcagccacacgggcgagaagccctgccgctgcagcgagtgcggtgagggcttcagccagagcgcccacctggcgcgccaccagcgcatccacacaggggagaagccccacgcctgcgacacctgcggccaccgtttccgcaatagctccaacctggcccgccatcgccgcagccacacgggcgagcggccctacagctgtcagacgtgcggtcgcagcttccggcgcaacgcgcatctgcggcggcacctggctacccatgcggagcccgggcaggagcaggccgagcccccgcaggagtgcgtggagtgcgggaagagcttcagccgcagctgcaatctgctgcgacacctgctggtgcacacgggcgccaggccctactcctgcacgcagtgtggccgcagcttcagccgcaactcccacctgctgcgccacctgcgcacccacgcccgcgagacgctgtactagtaatgaactagtccgtaacttgaaagtatttcgatttcttggctttatatatcttgtggaaaggacgactatcgttccgtaatgtttacatg

SEQ ID NO: 933 - DNA, 2033 bp, Homo sapiens
  source 1..2033: mol_type = genomic DNA
accgccaccatgcttccagtatcaggaggacatggggccacgggcgtccctgagccggctccgggagctctgcggccactggctgcggccggctctgcacaccaagaaacagatcctggagctgctggtgctggagcagttcctgagtgtgctgcctccgcacctcctgggccgcctgcaggggcagccgctcagggatggggaggaggtggtgctgctgctcgagggcatccaccgggagcccagccacgcggggccgctggtccccagggcccctcaccatggccagaggagagttcccgagatcaggagctggcggctgtgctggagtgcctgacctttgaggatgtgccagagaataaggcgtggcctgcacaccccctgggattcggaagcagaaccccagacaaggaggaatttaaacaagaagagcccaaaggggctgcctggcccactcccatcttagcagagtcccaggcagatagtcctggggtgccgggagagccttgcgcccagtcgctcggacggggcgctgcggctagcggccctggtgaagatgggtcccttcttggcagcagtgaaattttggaggtcaaagtggctgagggcgtccccgagcccaatccggagttgcagttcatctgcgcggactgcggggtgagcttcccgcagctgtctcgcctgaaggcgcaccagctgcgctcgcacccggctgggcgctccttcctgtgcctttgctgcgggaagagcttcggccgcagctccattctcaagctgcacatgcgcactcacacggacgagcggccgcacgcctgccacctgtgcggccaccgcttccgccagagctcgcacctgagcaagcacctgctgacccactcctccgaacccgccttcctgtgcgcagagtgcggccgcggcttccagcgccgcgccagccttgtgcagcacctgctggcgcacgcccaggaccagaagccgccctgcgctcctgagagtaaggccgaagcgccgccactgaccgatgtcctgtgctcccactgcggccagagcttccagcgccgctccagcctcaagcgccacctgcggatccacgccagggacaaggaccgccggtcctccgaaggctccggcagccgccgccgggactccgaccggaggcccttcgtgtgcagcgactgcggcaaggccttccggcgcagcgagcacctggtggcccaccggagggtgcacacgggcgagcggcccttctcctgccaggcttgcggccgcagcttcacgcagagctcgcagctggtcagccaccaacgggtgcacacgggcgagaagccctacgcctgtccgcagtgcgggaagcgctttgtgcgccgggccagccttgcccgccacctgctgacccacggtggccctcggccccaccactgcacccagtgcgggaagagtttcggccagacccaggatctggcccgccaccagcgcagccacacgggcgagaagccctgccgctgcagcgagtgcggtgagggcttcagccagagcgcccacctggcgcgccaccagcgcatccacacaggggagaagccccacgcctgcgacacctgcggccaccgtttccgcaatagctccaacctggcccgccatcgccgcagccacacgggcgagcggccctacagctgtcagacgtgcggtcgcagcttccggcgcaacgcgcatctgcggcggcacctggctacccatgcggagcccgggcaggagcaggccgagcccccgcaggagtgcgtggagtgcgggaagagcttcagccgcagctgcaatctgctgcgacacctgctggtgcacacgggcgccaggccctactcctgcacgcagtgtggccgcagcttcagccgcaactcccacctgctgcgccacctgcgcacccacgcccgcgagacgctgtactagtaatgaactagtccgtaacttgaaagtatttcgatttcttggctttatatatcttgtggaaaggacgaaccgtgtccgctacacgcaaatat

SEQ ID NO: 934 - DNA, 1937 bp, Homo sapiens
  source 1..1937: mol_type = genomic DNA
accgccaccatggcatctacttgggctatccaggcccacatggaccaggatgaacctttggaagtaaagatagaggaagagaaatataccaccagacaggattgggacctgcgtaaaaacaacacccatagcagagaggtcttccgtcagtacttcagacagttctgctaccaggagacatctggtccccgtgaggctttgagccgactccgagaactttgccatcagtggctgaggccagagacccacaccaaagaacagattctggagctgctggtgctggagcagttcctgaccatcctacctgaggagctccaggcctgggtgcaggagcagcatccagagagtggggaggaggtggtgactgtgctggaggatttagagagagaactggatgaaccaggagagcaggtctcagtccacactggggaacaggaaatgttcttgcaggagacggtacgtctacgaaaagaaggagaacccagtatgtccctccagtccatgaaagcccagccaaagtatgaatctccagaacttgaatcccaacaggagcaagttttagatgttgagactggaaatgagtatgggaatttaaagcaagaagtttctgaagaaatggaaccacatgggaagacatccagtaaatttgaaaatgatatgtccaagtctgctaggtgtggagaaactcgtgaacctgaagaaataacagaagagccctctgcttgctccagagaagataaacaacctacctgtgatgaaaatggagtaagcctgactgagaactctgaccatactgaacatcagagaatctgtccaggagaagaatcttacggatgtgatgactgtggaaaagcttttagtcagcactcacacctcatagaacatcagaggatccatactggagatagaccctacaaatgcgaagaatgtggaaaagctttccgtgggagaactgtgcttattcgacacaaaataatacacactggagagaaaccgtataagtgtaatgaatgtggcaaagcctttggccggtggtcagctcttaaccaacatcagagacttcacacaggagaaaaacactatcactgtaatgactgtggcaaagcctttagtcagaaagcaggcctctttcaccatatcaagatccacacaagagacaaaccttatcagtgcactcagtgtaataaaagttttagtcggcgttccatacttactcagcatcaaggagttcataccggcgccaagccgtatgagtgcaacgagtgtggaaaagcctttgtttataactcatcccttgtttcccatcaggaaatccaccacaaagaaaaatgctatcagtgtaaggaatgtgggaaatccttcagtcagagtggccttattcagcatcagagaattcacactggggaaaaaccctacaaatgtgacgtatgtgaaaaagcctttattcaaaggacaagtcttacagaacatcagcgaattcacactggagaaagaccctataaatgtgataagtgtgggaaggcgtttactcaaagatcagtcctcacggaacatcagagaatccacactggagagaggccctacaagtgtgatgagtgtgggaatgccttccgaggaatcaccagcctcattcagcatcagagaatccacactggggagaagccctaccaatgtgatgagtgtggaaaagccttcagacagaggtcagatcttagtaaacaccagagaatccataatagacgtggtacctatgtatgtaaagagtgtgggaaatcattcaggcagaactcagctcttactcaacatcagactatccacaaaggagaaaaatctgtttctgtgtagtaatgaactagtccgtaacttgaaagtatttcgatttcttggctttatatatcttgtggaaaggacgaaatcaatcgctccacatagtggtc

SEQ ID NO: 935 - DNA, 1799 bp, Homo sapiens
  source 1..1799: mol_type = genomic DNA
accgccaccatggcatctacttgggctatccaggcccacatggaccaggatgaacctttggaagtaaagatagaggaagagaaatataccaccagacaggattgggacctgcgtaaaaacaacacccatagcagagaggtcttccgtcagtacttcagacagttctgctaccaggagacatctggtccccgtgaggctttgagccgactccgagaactttgccatcagtggctgaggccagagacccacaccaaagaacagattctggagctgctggtgctggagcagttcctgaccatcctacctgaggagctccaggcctgggtgcaggagcagcatccagagagtggggaggaggtggtgactgtgctggaggatttagagagagaactggatgaaccaggagagcaggtctcagtccacactggggaacaggaaatgttcttgcaggagacggtacgtctacgaaaagaaggagaacccagtatgtccctccagtccatgaaagcccagccaaagtatgaatctccagaacttgaatcccaacaggagcaagttttagatgttgagactggaaatgagtatgggaatttaaagcaagaagtttctgaagaaatggaaccacatgggaagacatccagtaaatttgaaaatgatatgtccaagtctgctaggtgtggagaaactcgtgaacctgaagaaataacagaagagccctctgcttgctccagagaagataaacaacctacctgtgatgaaaatggagtaagcctgactgagaactctgaccatactgaacatcagagaatctgtccaggagaagaatcttacggatgtgatgactgtggaaaagcttttagtcagcactcacacctcatagaacatcagaggatccatactggagatagaccctacaaatgcgaagaatgtggaaaagctttccgtgggagaactgtgcttattcgacacaaaataatacacactggagagaaaccgtataagtgtaatgaatgtggcaaagcctttggccggtggtcagctcttaaccaacatcagagacttcacacaggagaaaaacactatcactgtaatgactgtggcaaagcctttagtcagaaagcaggcctctttcaccatatcaagatccacacaagagacaaaccttatcagtgcactcagtgtaataaaagttttagtcggcgttccatacttactcagcatcaaggagttcataccggcgccaagccgtatgagtgcaacgagtgtggaaaagcctttgtttataactcatcccttgtttcccatcaggaaatccaccacaaagaaaaatgctatcagtgtaaggaatgtgggaaatccttcagtcagagtggccttattcagcatcagagaattcacactggggaaaaaccctacaaatgtgacgtatgtgaaaaagcctttattcaaaggacaagtcttacagaacatcagcgaattcacactggagaaagaccctataaatgtgataagtgtgggaaggcgtttactcaaagatcagtcctcacggaacatcagagaatccacactggagagaggccctacaagtgtgatgagtgtgggaatgccttccgaggaatcaccagcctcattcagcatcagagaatccacactggggagaagccctaccaatgtgatgagtgtggaaaagccttcagacagaggtagtaatgaactagtccgtaacttgaaagtatttcgatttcttggctttatatatcttgtggaaaggacgactgattcagcttgacgagcttgtt

SEQ ID NO: 936 - DNA, 1076 bp, Homo sapiens
  source 1..1076: mol_type = genomic DNA
accgccaccatgagcagcgaggccgagacccagcagccgcccgccgccccccccgccgcccccgccctcagcgccgccgacaccaagcccggcactacgggcagcggcgcagggagcggtggcccgggcggcctcacatcggcggcgcctgccggcggggacaagaaggtcatcgcaacgaaggttttgggaacagtaaaatggttcaatgtaaggaacggatatggtttcatcaacaggaatgacaccaaggaagatgtatttgtacaccagactgccataaagaagaataaccccaggaagtaccttcgcagtgtaggagatggagagactgtggagtttgatgttgttgaaggagaaaagggtgcggaggcagcaaatgttacaggtcctggtggtgttccagttcaaggcagtaaatatgcagcagaccgtaaccattatagacgctatccacgtcgtaggggtcctccacgcaattaccagcaaaattaccagaatagtgagagtggggaaaagaacgagggatcggagagtgctcccgaaggccaggcccaacaacgccggccctaccgcaggcgaaggttcccaccttactacatgcggagaccctatgggcgtcgaccacagtattccaaccctcctgtgcagggagaagtgatggagggtgctgacaaccagggtgcaggagaacaaggtagaccagtgaggcagaatatgtatcggggatatagaccacgattccgcaggggccctcctcgccaaagacagcctagagaggacggcaatgaagaagataaagaaaatcaaggagatgagacccaaggtcagcagccacctcaacgtcggtaccgccgcaacttcaattaccgacgcagacgcccagaaaaccctaaaccacaagatggcaaagagacaaaagcagccgatccaccagctgagaattcgtccgctcccgaggctgagcagggcggggctgagtagtaatgaactagtccgtaacttgaaagtatttcgatttcttggctttatatatcttgtggaaaggacgattcttctgcaggagttcggtattg

SEQ ID NO: 937 - DNA, 1013 bp, Homo sapiens
  source 1..1013: mol_type = genomic DNA
accgccaccatgagtgaggcgggcgaggccaccaccaccaccaccaccaccctcccgcaggctccgacggaggcggccgccgcggctccccaggaccccgcgcccaagagcccggtgggcagcggtgcgccccaggccgcggccccggcgcccgccgcccacgtcgcaggaaaccccggtggggacgcggcccccgcagccacgggcaccgcggccgccgcctctttagccaccgccgccggcagcgaagacgcggagaaaaaagttctcgccaccaaagtccttggcactgtcaaatggttcaacgtcagaaatggatatggatttataaatcgaaatgacaccaaagaagatgtatttgtacatcagactgccatcaagaagaataacccacggaaatatctgcgcagtgtaggagatggagaaactgtagagtttgatgtggttgaaggagagaagggtgcagaagctgccaatgtgactggcccggatggagttcctgtggaagggagtcgttacgctgcagatcggcgccgttacagacgtggctactatggaaggcgccgtggccctccccggaatgctggtgagattggagagatgaaggatggagtcccagagggagcacaacttcagggaccggttcatcgaaatccaacttaccgcccaaggtaccgtagcaggggacctcctcgcccacgacctgccccagcagttggagaggctgaagataaagaaaatcagcaagccaccagtggtccaaaccagccgtctgttcgccgtggataccggcgtccctacaattaccggcgtcgcccgcgtcctcctaacgctccttcacaagatggcaaagaggccaaggcaggtgaagcaccaactgagaaccctgctccacccacccagcagagcagtgctgagtagtaatgaactagtccgtaacttgaaagtatttcgatttcttggctttatatatcttgtggaaaggacgagtgcccattagcaacacatggcct

SEQ ID NO: 938 - DNA, 1220 bp, Homo sapiens
  source 1..1220: mol_type = genomic DNA
accgccaccatgagtgaggcgggcgaggccaccaccaccaccaccaccaccctcccgcaggctccgacggaggcggccgccgcggctccccaggaccccgcgcccaagagcccggtgggcagcggtgcgccccaggccgcggccccggcgcccgccgcccacgtcgcaggaaaccccggtggggacgcggcccccgcagccacgggcaccgcggccgccgcctctttagccaccgccgccggcagcgaagacgcggagaaaaaagttctcgccaccaaagtccttggcactgtcaaatggttcaacgtcagaaatggatatggatttataaatcgaaatgacaccaaagaagatgtatttgtacatcagactgccatcaagaagaataacccacggaaatatctgcgcagtgtaggagatggagaaactgtagagtttgatgtggttgaaggagagaagggtgcagaagctgccaatgtgactggcccggatggagttcctgtggaagggagtcgttacgctgcagatcggcgccgttacagacgtggctactatggaaggcgccgtggccctccccggaattacgctggggaggaggaggaggaagggagcggcagcagtgaaggatttgacccccctgccactgataggcagttctctggggcccggaatcagctgcgccgcccccagtatcgccctcagtaccggcagcggcggttcccgccttaccacgtgggacagacctttgaccgtcgctcacgggtcttaccccatcccaacagaatacaggctggtgagattggagagatgaaggatggagtcccagagggagcacaacttcagggaccggttcatcgaaatccaacttaccgcccaaggtaccgtagcaggggacctcctcgcccacgacctgccccagcagttggagaggctgaagataaagaaaatcagcaagccaccagtggtccaaaccagccgtctgttcgccgtggataccggcgtccctacaattaccggcgtcgcccgcgtcctcctaacgctccttcacaagatggcaaagaggccaaggcaggtgaagcaccaactgagaaccctgctccacccacccagcagagcagtgctgagtagtaatgaactagtccgtaacttgaaagtatttcgatttcttggctttatatatcttgtggaaaggacgacaagactagtacgtccgtattgtt

SEQ ID NO: 939 - DNA, 1220 bp, Homo sapiens
  source 1..1220: mol_type = genomic DNA
accgccaccatgaatggcccatgtcaaagtcttaggaaagcggaggggcttttggagggttgcacttcggccgtcaccgtcttcaggaaactccctttggattccaaggctcaaagtcagaaaatgagatacaagacatccttggtgatgaggaaacgattacggctttaccgaaacactcttaaagagtcaagtagcagctctggacaccatggcccccagctcaccgccgcctccagcccctcggtgttcccgggcctccacgaggagcctccccaggcctcccccagccgtcctttgaatggactcctgcgtctggggctccctggagacatgtacgcgcggccggagcccttcccgccagggcctgcggcccgcagcgacgccctggcagctgccgcagccctgcatggctacgggggcatgaacctgacggtgaacctcgctgcgccccacggtcctggcgctttcttccgctacatgcgccagcccatcaaacaggagctcatctgcaagtggctggcggccgacggcaccgcgaccccgagcctctgctccaaaactttcagcaccatgcacgagctggtcacgcacgtcaccgtggagcacgtcggcggcccggaacaggccaaccacatttgcttctgggaggagtgtccgcgccagggaaagcccttcaaagccaaatacaaacttgtaaatcacatccgcgtgcacacgggcgagaagcccttcccttgtcctttcccggggtgtgggaaggtctttgctagatcagaaaatctcaaaatacacaaacgaactcacacaggcgagaagcccttcagatgcgagttcgagggctgcgagcggcgcttcgccaacagcagcgaccgtaagaagcattcgcacgtgcacactagcgacaagccatacacgtgcaaggtgcggggctgcgacaagtgctacacgcaccccagctcgctgcgtaagcacatgaaggtgcacgggcgctcgccgccgcccagctctggctacgattcggctacaccgtctgccctcgtgtcgccctcgtcggactgcggccacaagtcccaggtggcctcctcggcggcggtggcggcgcgtaccgccgacttgagcgaatagtaatgaactagtccgtaacttgaaagtatttcgatttcttggctttatatatcttgtggaaaggacgacttaagtcatggcttgctagctac

SEQ ID NO: 940 - DNA, 1106 bp, Homo sapiens
  source 1..1106: mol_type = genomic DNA
accgccaccatgagatacaagacatccttggtgatgaggaaacgattacggctttaccgaaacactcttaaagagtcaagtagcagctctggacaccatggcccccagctcaccgccgcctccagcccctcggtgttcccgggcctccacgaggagcctccccaggcctcccccagccgtcctttgaatggactcctgcgtctggggctccctggagacatgtacgcgcggccggagcccttcccgccagggcctgcggcccgcagcgacgccctggcagctgccgcagccctgcatggctacgggggcatgaacctgacggtgaacctcgctgcgccccacggtcctggcgctttcttccgctacatgcgccagcccatcaaacaggagctcatctgcaagtggctggcggccgacggcaccgcgaccccgagcctctgctccaaaactttcagcaccatgcacgagctggtcacgcacgtcaccgtggagcacgtcggcggcccggaacaggccaaccacatttgcttctgggaggagtgtccgcgccagggaaagcccttcaaagccaaatacaaacttgtaaatcacatccgcgtgcacacgggcgagaagcccttcccttgtcctttcccggggtgtgggaaggtctttgctagatcagaaaatctcaaaatacacaaacgaactcacacaggcgagaagcccttcagatgcgagttcgagggctgcgagcggcgcttcgccaacagcagcgaccgtaagaagcattcgcacgtgcacactagcgacaagccatacacgtgcaaggtgcggggctgcgacaagtgctacacgcaccccagctcgctgcgtaagcacatgaaggtgcacgggcgctcgccgccgcccagctctggctacgattcggctacaccgtctgccctcgtgtcgccctcgtcggactgcggccacaagtcccaggtggcctcctcggcggcggtggcggcgcgtaccgccgacttgagcgaatagtaatgaactagtccgtaacttgaaagtatttcgatttcttggctttatatatcttgtggaaaggacgaaggagtactggagaaacgtgcgcc

SEQ ID NO: 941 - DNA, 1256 bp, Homo sapiens
  source 1..1256: mol_type = genomic DNA
accgccaccatgccgcccttctgtaggaatgcaaagttaggcctcctttctttcctgatttgtgctggaaggagcttattacctttggggaagaatgccttttggttagaaagaattgaaaataataataccctctgggaaaaggctcaaagtcagaaaatgagatacaagacatccttggtgatgaggaaacgattacggctttaccgaaacactcttaaagagtcaagtagcagctctggacaccatggcccccagctcaccgccgcctccagcccctcggtgttcccgggcctccacgaggagcctccccaggcctcccccagccgtcctttgaatggactcctgcgtctggggctccctggagacatgtacgcgcggccggagcccttcccgccagggcctgcggcccgcagcgacgccctggcagctgccgcagccctgcatggctacgggggcatgaacctgacggtgaacctcgctgcgccccacggtcctggcgctttcttccgctacatgcgccagcccatcaaacaggagctcatctgcaagtggctggcggccgacggcaccgcgaccccgagcctctgctccaaaactttcagcaccatgcacgagctggtcacgcacgtcaccgtggagcacgtcggcggcccggaacaggccaaccacatttgcttctgggaggagtgtccgcgccagggaaagcccttcaaagccaaatacaaacttgtaaatcacatccgcgtgcacacgggcgagaagcccttcccttgtcctttcccggggtgtgggaaggtctttgctagatcagaaaatctcaaaatacacaaacgaactcacacaggcgagaagcccttcagatgcgagttcgagggctgcgagcggcgcttcgccaacagcagcgaccgtaagaagcattcgcacgtgcacactagcgacaagccatacacgtgcaaggtgcggggctgcgacaagtgctacacgcaccccagctcgctgcgtaagcacatgaaggtgcacgggcgctcgccgccgcccagctctggctacgattcggctacaccgtctgccctcgtgtcgccctcgtcggactgcggccacaagtcccaggtggcctcctcggcggcggtggcggcgcgtaccgccgacttgagcgaatagtaatgaactagtccgtaacttgaaagtatttcgatttcttggctttatatatcttgtggaaaggacgaatgataacttatgtagccgtatcg

SEQ ID NO: 942 - DNA, 488 bp, Homo sapiens
  source 1..488: mol_type = genomic DNA
accgccaccatgagatacaagacatccttggtgatgaggaaacgattacggctttaccgaaacactcttaaagagtcaagcgagaagcccttcagatgcgagttcgagggctgcgagcggcgcttcgccaacagcagcgaccgtaagaagcattcgcacgtgcacactagcgacaagccatacacgtgcaaggtgcggggctgcgacaagtgctacacgcaccccagctcgctgcgtaagcacatgaaggtgcacgggcgctcgccgccgcccagctctggctacgattcggctacaccgtctgccctcgtgtcgccctcgtcggactgcggccacaagtcccaggtggcctcctcggcggcggtggcggcgcgtaccgccgacttgagcgaatagtaatgaactagtccgtaacttgaaagtatttcgatttcttggctttatatatcttgtggaaaggacgattgtcagtacagcggtcaggtggg

SEQ ID NO: 943 - DNA, 2093 bp, Homo sapiens
  source 1..2093: mol_type = genomic DNA
accgccaccatgtttttgaaggcgggcagagggaataaagtccccccagtgagggtctatgggcctgattgtgtagttctgatggagccccctttgagcaagaggaacccgccagcgctgagattagcggatttggcaacggctcaggtccagccgcttcagaatatgacaggcttcccggcgctggccggcccgcccgcccactcccaactccgggccgccgtcgcgcacctccgcctgcgggacctgggcgctgaccccggcgtggccaccactccgctcggacccgagcacatggcccaggcgagcacgctgggcctcagccctccctcccaggcgttcccggcacacccggaggctccggcagccgccgcccgtgctgcagccttggtcgcgcaccccggcgcgggcagctacccctgcggcgggggcagcagtggcgcgcagccctccgcgcccccgcccccagcccctcctcttcctcccaccccttcaccccctccccctcccccgcctcctcctcctcctgccctctcgggctacaccaccaccaacagtggcggcggcggcagcagcggcaaaggccacagcagggacttcgtcctccggagggacctttccgccacggcccccgcggcggccatgcacggggccccgctcggaggggagcagcggtccggcaccggctccccccagcacccggccccgcctccccactcggccggcatgttcatctccgccagcggcacctacgcgggcccggacggcagcggcggcccggcgctcttccccgcgctgcacgacacgccgggggccccaggcggccacccgcacccgctcaacggccagatgcgcctggggctggcggcggcagcggcagccgcggcggctgagctgtacggccgcgccgaaccgcccttcgcgccgcgctctggggacgcgcactacggggcggttgcggccgcagcggcggccgccctgcacggctacggagccgtgaacttaaacctgaacctggcggctgcggcggccgcagcagcggccgggcccgggccccacctgcagcaccacgcgccgcccccggcgccgccgccgccgccggcgcccgcgcagcacccgcaccagcaccacccccacctcccaggggcggctggggccttcctgcgctacatgcggcagccaatcaagcaggagctcatctgcaagtggatcgaccccgacgagctggccgggctgccgccgccgccgccgccgccgccgccgccgccgccaccgcccccggccggcggcgccaagccctgctccaaaactttcggcaccatgcacgagctggtgaatcacgtcacggtggagcacgtgggaggccccgagcagagcagccacgtctgcttctgggaggactgtccgcgcgagggcaagcccttcaaggccaaatacaagctcatcaaccacatccgcgtgcacaccggcgagaagccctttccctgccctttccccggctgcggcaaggtcttcgcgcgctccgagaacctcaagatccacaagcgtactcatacaggggaaaagcctttcaaatgtgaatttgatggctgtgacaggaagtttgccaatagcagtgatcggaagaaacattcccatgtccacaccagtgacaagccctactactgcaagattcgaggctgtgacaaatcctacactcacccaagctccctgaggaagcacatgaagattcactgcaagtccccgccaccttctccaggaccccttggttactcatcagtggggactccagtgggcgcccccttgtcccctgtgctggacccagccaggagtcactccagcactctgtcccctcaggtgaccaacctcaatgagtggtacgtttgccaggccagtggggcccccagccacctccacaccccttccagcaacggaaccacctctgagactgaagatgaggaaatttacgggaaccctgaagttgtgcggacgatacattagtaatgaactagtccgtaacttgaaagtatttcgatttcttggctttatatatcttgtggaaaggacgacaaaccatgacacacttcaaaccg

SEQ ID NO: 944 - DNA, 1007 bp, Homo sapiens
  source 1..1007: mol_type = genomic DNA
accgccaccatgaccggccgggactcgctttccgacgggcgcactagcagcagggcgctggtgcctggcggttcccctaggggctcgcgcccccggggcttcgccatcacggacctgctgggcttggaggccgagctgccggcgcccgctggcccaggacagggatctggctgcgagggtccggcagtcgcgccgtgcccgggcccggggcttgacggctccagcctggcgcgtggggccctaccgctgggactcggcctcctctgtggcttcggcacgcagccgccggcggccgctcgagcaccctgcctgctcctagcggacgtgccgttcctgccgcccaggggccccgagcccgctgccccgctggctcccagccgtccgccgcctgcgctcggccgccagaagcgcagcgacagcgtctccacgtccgatgaggacagccagtctgaagacaggaatgacctaaaggcatcccccaccttgggcaagaggaagaagcggcggcacaggacagttttcactgctcaccagctggaagagttggagaaggcattcagcgaggcccactaccctgatgtgtatgcccgagaaatgctggctgtgaaaactgagctccccgaagaccggatacaggtctggtttcaaaaccgcagggccaaatggcgcaagcgggagaagcgctggggcggcagcagcgtgatggccgagtacgggctgtacggggccatggtgcgccactgcatcccgctgccagactccgtgctcaactccgccgagggcggcctgctgggctcctgcgcgccctggctcctggtgcaaacttctgctcctggaggctcccgttcactggactttgcaggagacacacaggctccccagaccccgtggtggtgcctgatgaccttcagctagtaatgaactagtccgtaacttgaaagtatttcgatttcttggctttatatatcttgtggaaaggacgacaagcgttgtcagcacgcgctcga

SEQ ID NO: 945 - DNA, 944 bp, Homo sapiens
  source 1..944: mol_type = genomic DNA
accgccaccatgaccggccgggactcgctttccgacgggcgcactagcagcagggcgctggtgcctggcggttcccctaggggctcgcgcccccggggcttcgccatcacggacctgctgggcttggaggccgagctgccggcgcccgctggcccaggacagggatctggctgcgagggtccggcagtcgcgccgtgcccgggcccggggcttgacggctccagcctggcgcgtggggccctaccgctgggactcggcctcctctgtggcttcggcacgcagccgccggcggccgctcgagcaccctgcctgctcctagcggacgtgccgttcctgccgcccaggggccccgagcccgctgccccgctggctcccagccgtccgccgcctgcgctcggccgccagaagcgcagcgacagcgtctccacgtccgatgaggacagccagtctgaagacaggaatgacctaaaggcatcccccaccttgggcaagaggaagaagcggcggcacaggacagttttcactgctcaccagctggaagagttggagaaggcattcagcgaggcccactaccctgatgtgtatgcccgagaaatgctggctgtgaaaactgagctccccgaagaccggatacaggtctggtttcaaaaccgcagggccaaatggcgcaagcgggagaagcgctggggcggcagcagcgtgatggccgagtacgggctgtacggggccatggtgcgccactgcatcccgctgccagactccgtgctcaactccgccgagggcggcctgctgggctcctgcgcgccctggctcctggagggtgagacattgggctgcagagaaatgaagtagtaatgaactagtccgtaacttgaaagtatttcgatttcttggctttatatatcttgtggaaaggacgatagcggtctgaagtaagagctgtc

SEQ ID NO: 946 - DNA, 821 bp, Homo sapiens
  source 1..821: mol_type = genomic DNA
accgccaccatgaccggccgggactcgctttccgacgggcgcactagcagcagggcgctggtgcctggcggttcccctaggggctcgcgcccccggggcttcgccatcacggacctgctgggcttggaggccgagctgccggcgcccgctggcccaggacagggatctggctgcgagggtccggcagtcgcgccgtgcccgggcccggggcttgacggctccagcctggcgcgtggggccctaccgctgggactcggcctcctctgtggcttcggcacgcagccgccggcggccgctcgagcaccctgcctgctcctagcggacgtgccgttcctgccgcccaggggccccgagcccgctgccccgctggctcccagccgtccgccgcctgcgctcggccgccagaagcgcagcgacagcgtctccacgtccgatgaggacagccagtctgaagacaggaatgacctaaaggcatcccccaccttgggcaagaggaagaagcggcggcacaggacagttttcactgctcaccagctggaagagttggagaaggcattcagcgaggcccactaccctgatgtgtatgcccgagaaatgctggctgtgaaaactgagctccccgaagaccggatacaggtgtctggggtcccttttctccgctccaaagataccacagagaacgtgtcattcccacattcagtgagccaatcagcagtcccttctctatagtaatgaactagtccgtaacttgaaagtatttcgatttcttggctttatatatcttgtggaaaggacgacctacgtcctttgaattgccatga

SEQ ID NO: 947 - DNA, 758 bp, Homo sapiens
  source 1..758: mol_type = genomic DNA
accgccaccatgaccggccgggactcgctttccgacgggcgcactagcagcagggcgctggtgcctggcggttcccctaggggctcgcgcccccggggcttcgccatcacggacctgctgggcttggaggccgagctgccggcgcccgctggcccaggacagggatctggctgcgagggtccggcagtcgcgccgtgcccgggcccggggcttgacggctccagcctggcgcgtggggccctaccgctgggactcggcctcctctgtggcttcggcacgcagccgccggcggccgctcgagcaccctgcctgctcctagcggacgtgccgttcctgccgcccaggggccccgagcccgctgccccgctggctcccagccgtccgccgcctgcgctcggccgccagaagcgcagcgacagcgtctccacgtccgatgaggacagccagtctgaagacaggaatgacctaaaggcatcccccaccttgggcaagaggaagaagcggcggcacaggacagttttcactgctcaccagctggaagagttggagaaggcattcagcgaggcccactaccctgatgtgtatgcccgagaaatgctggctgtgaaaactgagctccccgaagaccggatacagagggtgagacattgggctgcagagaaatagtaatgaactagtccgtaacttgaaagtatttcgatttcttggctttatatatcttgtggaaaggacgagggcctttgcaaggctcttgttgt

SEQ ID NO: 948 - DNA, 812 bp, Homo sapiens
  source 1..812: mol_type = genomic DNA
accgccaccatgaccggccgggactcgctttccgacgggcgcactagcagcagggcgctggtgcctggcggttcccctaggggctcgcgcccccggggcttcgccatcacggacctgctgggcttggaggccgagctgccggcgcccgctggcccaggacagggatctggctgcgagggtccggcagtcgcgccgtgcccgggcccggggcttgacggctccagcctggcgcgtggggccctaccgctgggactcggcctcctctgtggcttcggcacgcagccgccggcggccgctcgagcaccctgcctgctcctagcggacgtgccgttcctgccgcccaggggccccgagcccgctgccccgctggctcccagccgtccgccgcctgcgctcggccgccagaagcgcagcgacagcgtctccacgtccgatgaggacagccagtctgaagacaggaatgacctaaaggcatcccccaccttgggcaagaggaagaagcggcggcacaggacagttttcactgctcaccagctggaagagttggagaaggcattcagcgaggcccactaccctgatgtgtatgcccgagaaatgctggctgtgaaaactgagctccccgaagaccggatacagtgcaaacttctgctcctggaggctcccgttcactggactttgcaggagacacacaggctccccagaccccgtggtggtgcctagtaatgaactagtccgtaacttgaaagtatttcgatttcttggctttatatatcttgtggaaaggacgaacccgtcgttgcaattgcatgcga

SEQ ID NO: 949 - DNA, 1475 bp, Homo sapiens
  source 1..1475: mol_type = genomic DNA
accgccaccatgacgatgctcctggacggaggcccgcagttccctgggctgggagtgggcagcttcggcgcgccgcgccaccacgagatgcccaaccgtgagccggcaggcatggggctgaatcccttcggggactcaacccacgccgccgccgccgccgccgccgccgctgccttcaagctgagccctgccgcggcgcacgatctatcttcaggccagagctcggctttcacgccgcagggttcgggctacgccaacgccctgggccaccatcaccaccaccatcaccatcatcaccacaccagccaggtgcccagctacggtggcgctgcctctgccgccttcaactcaacgcgcgagtttctgttccgccagcgcagctccgggctcagtgaggcggcctcgggtggcgggcagcacgggctcttcgccggctcggcgagcagcctgcatgctccagctggcatccccgagccccctagctacttgctgtttcccgggctgcatgagcagggcgctgggcacccgtcgcccacagggcacgtggacaacaaccaggtccacctggggctgcgtggggagctgttcggccgtgctgacccataccgcccagtggccagcccgcgcacggacccctacgcggccggcgctcagtttcctaactacagccccatgaacatgaacatgggagtgaacgtggcggcccaccacgggcccggcgccttcttccgttatatgcggcagcctatcaagcaggagctgtcgtgcaagtggatcgacgaggctcagctgagccggcccaagaagagctgcgaccggaccttcagcaccatgcatgagctggtgacacatgtcaccatggagcatgtggggggcccggagcagaacaaccacgtctgctactgggaggagtgcccccgggagggcaagtctttcaaggcgaagtacaaactggtcaaccacatccgagtgcacacgggcgagaagcccttcccatgccccttcccgggctgcgggaagatctttgcccgttctgagaacctcaagatccacaagaggacccacacaggtgagaaacctttcaaatgtgaatttgaaggctgtgacagacgctttgccaacagcagcgaccgtaagaagcacatgcatgtgcatacctcggacaagccctatatctgcaaagtgtgcgacaagtcctacacgcacccgagctccctgcgcaaacacatgaagtgttgtcctgcttggtatccgggacagtctctaattcctgacgaagaacttgatactgacgttggtatgcagcagccagccctccataacactacctatcctaaatgcagggttaatgccgaacctactgtgcaagaaatgatttactagtaatgaactagtccgtaacttgaaagtatttcgatttcttggctttatatatcttgtggaaaggacgaacacgatgtaacggacaggtagta

SEQ ID NO: 950 - DNA, 1379 bp, Homo sapiens
  source 1..1379: mol_type = genomic DNA
accgccaccatgggatcaaaaatgaatctcattgaacattcccatttacctaccacagatgaattttctttttctgaaaatttatttggtgttttaacagaacaagtggcaggtcctctgggacagaacctggaagtggaaccatactcgcaatacagcaatgttcagtttccccaagttcaaccacagatttcctcgtcatcctattattccaacctgggtttctacccccagcagcctgaagagtggtactctcctggaatatatgaactcaggcgtatgccagctgagactctctaccagggagaaactgaggtagcagagatgcctgtaacaaagaagccccgcatgggcgcgtcagcagggaggatcaaaggggatgagctgtgtgttgtttgtggagacagagcctctggataccactataatgcactgacctgtgaggggtgtaaaggcttgttaactgaaattcagtgtaaatctaagcgactgagaaaaaatgtgaagcagcatgcagatcagaccgtgaatgaagacagtgaaggtcgtgacttgcgacaagtgacctcgacaacaaagtcatgcagggagaaaactgaactcaccccagatcaacagactcttctacattttattatggattcatataacaaacagaggatgcctcaggaaataacaaataaaattttaaaagaagaattcagtgcagaagaaaattttctcattttgacggaaatggcaaccaatcatgtacaggttcttgtagaattcacaaaaaagctaccaggatttcagactttggaccatgaagaccagattgctttgctgaaagggtctgcggttgaagctatgttccttcgttcagctgagattttcaataagaaacttccgtctgggcattctgacctattggaagaaagaattcgaaatagtggtatctctgatgaatatataacacctatgtttagtttttataaaagtattggggaactgaaaatgactcaagaggagtatgctctgcttacagcaattgttatcctgtctccagatagacaatacataaaggatagagaggcagtagagaagcttcaggagccacttcttgatgtgctacaaaagttgtgtaagattcaccagcctgaaaatcctcaacactttgcctgtctcctgggtcgcctgactgaattacggacattcaatcatcaccacgctgagatgctgatgtcatggagagtaaacgaccacaagtttaccccacttctctgtgaaatctgggacgtgcagtagtaatgaactagtccgtaacttgaaagtatttcgatttcttggctttatatatcttgtggaaaggacgaatgttccgagaccaccgtgcacga

SEQ ID NO: 951 - DNA, 1562 bp, Homo sapiens
  source 1..1562: mol_type = genomic DNA
accgccaccatggtaatgcagtttcaggggttagaaaatccaattcaaattagtcctcactgcagctgtacgccgtcaggatttttcatggaaatgatgagtatgaagcccgcgaaaggtgttttaacagaacaagtggcaggtcctctgggacagaacctggaagtggaaccatactcgcaatacagcaatgttcagtttccccaagttcaaccacagatttcctcgtcatcctattattccaacctgggtttctacccccagcagcctgaagagtggtactctcctggaatatatgaactcaggcgtatgccagctgagactctctaccagggagaaactgaggtagcagagatgcctgtaacaaagaagccccgcatgggcgcgtcagcagggaggatcaaaggggatgagctgtgtgttgtttgtggagacagagcctctggataccactataatgcactgacctgtgaggggtgtaaaggtttcttcaggagaagcattaccaaaaacgctgtgtacaagtgtaaaaacgggggcaactgtgtgatggatatgtacatgcgaagaaagtgtcaagagtgtcgactaaggaaatgcaaagagatgggaatgttggctgaatgtatgtatacaggcttgttaactgaaattcagtgtaaatctaagcgactgagaaaaaatgtgaagcagcatgcagatcagaccgtgaatgaagacagtgaaggtcgtgacttgcgacaagtgacctcgacaacaaagtcatgcagggagaaaactgaactcaccccagatcaacagactcttctacattttattatggattcatataacaaacagaggatgcctcaggaaataacaaataaaattttaaaagaagaattcagtgcagaagaaaattttctcattttgacggaaatggcaaccaatcatgtacaggttcttgtagaattcacaaaaaagctaccaggatttcagactttggaccatgaagaccagattgctttgctgaaagggtctgcggttgaagctatgttccttcgttcagctgagattttcaataagaaacttccgtctgggcattctgacctattggaagaaagaattcgaaatagtggtatctctgatgaatatataacacctatgtttagtttttataaaagtattggggaactgaaaatgactcaagaggagtatgctctgcttacagcaattgttatcctgtctccagatagacaatacataaaggatagagaggcagtagagaagcttcaggagccacttcttgatgtgctacaaaagttgtgtaagattcaccagcctgaaaatcctcaacactttgcctgtctcctgggtcgcctgactgaattacggacattcaatcatcaccacgctgagatgctgatgtcatggagagtaaacgaccacaagtttaccccacttctctgtgaaatctgggacgtgcagtagtaatgaactagtccgtaacttgaaagtatttcgatttcttggctttatatatcttgtggaaaggacgatattaggtcggcaactgagcgccg

SEQ ID NO: 952 - DNA, 1550 bp, Homo sapiens
  source 1..1550: mol_type = genomic DNA
accgccaccatggtaatgcagtttcaggggttagaaaatccaattcaaattagtcctcactgcagctgtacgccgtcaggatttttcatggaaatgatgagtatgaagcccgcgaaaggtgttttaacagaacaagtggcaggtcctctgggacagaacctggaagtggaaccatactcgcaatacagcaatgttcagtttccccaagttcaaccacagatttcctcgtcatcctattattccaacctgggtttctacccccagcagcctgaagagtggtactctcctggaatatatgaactcaggcgtatgccagctgagactctctaccagggagaaactgaggtagcagagatgcctgtaacaaagaagccccgcatgggcgcgtcagcagggaggatcaaaggggatgagctgtgtgttgtttgtggagacagagcctctggataccactataatgcactgacctgtgaggggtgtaaaggtttcttcaggagaagcattaccaaaaacgctgtgtacaagtgtaaaaacgggggcaactgtgtgatggatatgtacatgcgaagaaagtgtcaagagtgtcgactaaggaaatgcaaagagatgggaatgttggctgaatgcttgttaactgaaattcagtgtaaatctaagcgactgagaaaaaatgtgaagcagcatgcagatcagaccgtgaatgaagacagtgaaggtcgtgacttgcgacaagtgacctcgacaacaaagtcatgcagggagaaaactgaactcaccccagatcaacagactcttctacattttattatggattcatataacaaacagaggatgcctcaggaaataacaaataaaattttaaaagaagaattcagtgcagaagaaaattttctcattttgacggaaatggcaaccaatcatgtacaggttcttgtagaattcacaaaaaagctaccaggatttcagactttggaccatgaagaccagattgctttgctgaaagggtctgcggttgaagctatgttccttcgttcagctgagattttcaataagaaacttccgtctgggcattctgacctattggaagaaagaattcgaaatagtggtatctctgatgaatatataacacctatgtttagtttttataaaagtattggggaactgaaaatgactcaagaggagtatgctctgcttacagcaattgttatcctgtctccagatagacaatacataaaggatagagaggcagtagagaagcttcaggagccacttcttgatgtgctacaaaagttgtgtaagattcaccagcctgaaaatcctcaacactttgcctgtctcctgggtcgcctgactgaattacggacattcaatcatcaccacgctgagatgctgatgtcatggagagtaaacgaccacaagtttaccccacttctctgtgaaatctgggacgtgcagtagtaatgaactagtccgtaacttgaaagtatttcgatttcttggctttatatatcttgtggaaaggacgaatggcttgcagcggagttctgagt

SEQ ID NO: 953 - DNA, 3098 bp, Homo sapiens
  source 1..3098: mol_type = genomic DNA
accgccaccatggcccaagttgcaatgtccaccctccccgttgaagatgaggagtcctcggagagcaggatggtggtgacattcctcatgtcagctctcgagtccatgtgtaaagaactggccaagtccaaagccgaagtggcctgcattgcagtgtatgaaacagacgtgtttgtcgtcggaactgaaagaggacgtgcttttgtcaataccagaaaggattttcaaaaagattttgtaaaatattgtgttgaagaagaagaaaaagctgcagagatgcataaaatgaaatctacaacccaggcaaatcggatgagtgtagatgctgtagaaattgaaacactcagaaaaacagttgaggactatttctgcttttgctatgggaaagctttaggcaaatccacagtggtacctgtaccatatgagaagatgctgcgagaccagtcggctgtggtagtgcaggggcttccggaaggtgttgcctttaaacaccccgagaactatgatcttgcaaccctgaaatggattttggagaacaaagcagggatttcattcatcattaagagaccttttttagagccaaagaagcatgtaggtggtcgtgtgatggtaacagatgctgacaggtcaatactatctccaggtggaagttgtggccccatcaaagtgaaaactgaacccacagaagattctggcatttccctggaaatggcagctgtgacagtaaaggaagaatcagaagatcctgattattatcaatataacattcaagcaggcccttctgaaactgatgatgttgatgaaaaacagcccctatcgaagcctttgcaaggaagccaccattcttcagagggcaatgaaggcacagaaatggaagtaccagcagaagattctactcaacatgtcccttcagaaacaagtgaggaccctgaagttgaggtgactattgaagatgatgattattctccaccgtctaagagaccaaaggccaatgagctaccgcagccaccagtcccggaacccgccaatgctgggaagcggaaagtgagggagttcaacttcgagaaatggaatgctcgcatcactgatctacgtaaacaagttgaagaattgtttgaaaggaaatatgctcaagccataaaagccaaaggtccggtgacgatcccgtaccctcttttccagtctcatgttgaagatctttatgtagaaggacttcctgaaggaattccttttagaaggccatctacttacggaattcctcgcctggagaggatattacttgcaaaggaaaggattcgttttgtgattaagaaacatgagcttctgaattcaacacgtgaagatttacagcttgataagccagcttcaggagtaaaggaagaatggtatgccagaatcactaaattaagaaagatggtggatcagcttttctgcaaaaaatttgcggaagccttggggagcactgaagccaaggctgtaccgtaccaaaaatttgaggcacacccgaatgatctgtacgtggaaggactgccagaaaacattcctttccgaagtccctcatggtatggaatcccaaggctggaaaaaatcattcaagtgggcaatcgaattaaatttgttattaaaagaccagaacttctgactcacagtaccactgaagttactcagccaagaacgaatacaccagtcaaagaagattggaatgtcagaattaccaagctacggaagcaagtggaagagatttttaatttgaaatttgctcaagctcttggactcaccgaggcagtaaaagtaccatatcctgtgtttgaatcaaacccggagttcttgtatgtggaaggcttgccagaggggattcccttccgaagccctacctggtttggaattccacgacttgaaaggatcgtccgcgggagtaataaaatcaagttcgttgttaaaaaacctgaactagttatttcctacttgcctcctgggatggctagtaaaataaacactaaagctttgcagtcccccaaaagaccacgaagtcctgggagtaattcaaaggttcctgaaattgaggtcaccgtggaaggccctaataacaacaatcctcaaacctcagctgttcgaaccccgacccagactaacggttctaacgttcccttcaagccacgagggagagagttttcctttgaggcctggaatgccaaaatcacggacctaaaacagaaagttgaaaatctcttcaatgagaaatgtggggaagctcttggccttaaacaagctgtgaaggtgccgttcgcgttatttgagtctttcccggaagacttttatgtggaaggcttacctgagggtgtgccattccgaagaccatcgacttttggcattccgaggctggagaagatactcagaaacaaagccaaaattaagttcatcattaaaaagcccgaaatgtttgagacggcgattaaggagagcacctcctctaagagccctcccagaaaaataaattcatcacccaatgttaatactactgcatcaggtgttgaagaccttaacatcattcaggtgacaattccagatgatgataatgaaagactctcgaaagttgaaaaagctagacagctaagagaacaagtgaatgacctctttagtcggaaatttggtgaagctattggtatgggttttcctgtgaaagttccctacaggaaaatcacaattaaccctggctgtgtggtagttgatggcatgcccccgggggtgtccttcaaagcccccagctacctggaaatcagctccatgagaaggatcttagactctgccgagtttatcaaattcacggtcattagaccatttccaggacttgtgattaataaccagctggttgatcagagtgagtcagaaggccccgtgatacaagaatcagctgaaccaagccagttggaagttccagccacagaagaaataaaagagactgatggaagctctcagatcaagcaagaaccagaccccacgtggtagtaatgaactagtccgtaacttgaaagtatttcgatttcttggctttatatatcttgtggaaaggacgaatgcgtcatggatccgtaactctt

SEQ ID NO: 954 - DNA, 3035 bp, Homo sapiens
  source 1..3035: mol_type = genomic DNA
accgccaccatggcccaagttgcaatgtccaccctccccgttgaagatgaggagtcctcggagagcaggatggtggtgacattcctcatgtcagctctcgagtccatgtgtaaagaactggccaagtccaaagccgaagtggcctgcattgcagtgtatgaaacagacgtgtttgtcgtcggaactgaaagaggacgtgcttttgtcaataccagaaaggattttcaaaaagattttgtaaaatattgtgttgaagaagaagaaaaagctgcagagatgcataaaatgaaatctacaacccaggcaaatcggatgagtgtagatgctgtagaaattgaaacactcagaaaaacagttgaggactatttctgcttttgctatgggaaagctttaggcaaatccacagtggtacctgtaccatatgagaagatgctgcgagaccagtcggctgtggtagtgcaggggcttccggaaggtgttgcctttaaacaccccgagaactatgatcttgcaaccctgaaatggattttggagaacaaagcagggatttcattcatcattaagagaccttttttagagccaaagaagcatgtaggtggtcgtgtgatggtaacagatgctgacaggtcaatactatctccaggtggaagttgtggccccatcaaagtgaaaactgaacccacagaagattctggcatttccctggaaatggcagctgtgacagtaaaggaagaatcagaagatcctgattattatcaatataacattcaagcaggcccttctgaaactgatgatgttgatgaaaaacagcccctatcgaagcctttgcaaggaagccaccattcttcagagggcaatgaaggcacagaaatggaagtaccagcagaagatgatgattattctccaccgtctaagagaccaaaggccaatgagctaccgcagccaccagtcccggaacccgccaatgctgggaagcggaaagtgagggagttcaacttcgagaaatggaatgctcgcatcactgatctacgtaaacaagttgaagaattgtttgaaaggaaatatgctcaagccataaaagccaaaggtccggtgacgatcccgtaccctcttttccagtctcatgttgaagatctttatgtagaaggacttcctgaaggaattccttttagaaggccatctacttacggaattcctcgcctggagaggatattacttgcaaaggaaaggattcgttttgtgattaagaaacatgagcttctgaattcaacacgtgaagatttacagcttgataagccagcttcaggagtaaaggaagaatggtatgccagaatcactaaattaagaaagatggtggatcagcttttctgcaaaaaatttgcggaagccttggggagcactgaagccaaggctgtaccgtaccaaaaatttgaggcacacccgaatgatctgtacgtggaaggactgccagaaaacattcctttccgaagtccctcatggtatggaatcccaaggctggaaaaaatcattcaagtgggcaatcgaattaaatttgttattaaaagaccagaacttctgactcacagtaccactgaagttactcagccaagaacgaatacaccagtcaaagaagattggaatgtcagaattaccaagctacggaagcaagtggaagagatttttaatttgaaatttgctcaagctcttggactcaccgaggcagtaaaagtaccatatcctgtgtttgaatcaaacccggagttcttgtatgtggaaggcttgccagaggggattcccttccgaagccctacctggtttggaattccacgacttgaaaggatcgtccgcgggagtaataaaatcaagttcgttgttaaaaaacctgaactagttatttcctacttgcctcctgggatggctagtaaaataaacactaaagctttgcagtcccccaaaagaccacgaagtcctgggagtaattcaaaggttcctgaaattgaggtcaccgtggaaggccctaataacaacaatcctcaaacctcagctgttcgaaccccgacccagactaacggttctaacgttcccttcaagccacgagggagagagttttcctttgaggcctggaatgccaaaatcacggacctaaaacagaaagttgaaaatctcttcaatgagaaatgtggggaagctcttggccttaaacaagctgtgaaggtgccgttcgcgttatttgagtctttcccggaagacttttatgtggaaggcttacctgagggtgtgccattccgaagaccatcgacttttggcattccgaggctggagaagatactcagaaacaaagccaaaattaagttcatcattaaaaagcccgaaatgtttgagacggcgattaaggagagcacctcctctaagagccctcccagaaaaataaattcatcacccaatgttaatactactgcatcaggtgttgaagaccttaacatcattcaggtgacaattccagatgatgataatgaaagactctcgaaagttgaaaaagctagacagctaagagaacaagtgaatgacctctttagtcggaaatttggtgaagctattggtatgggttttcctgtgaaagttccctacaggaaaatcacaattaaccctggctgtgtggtagttgatggcatgcccccgggggtgtccttcaaagcccccagctacctggaaatcagctccatgagaaggatcttagactctgccgagtttatcaaattcacggtcattagaccatttccaggacttgtgattaataaccagctggttgatcagagtgagtcagaaggccccgtgatacaagaatcagctgaaccaagccagttggaagttccagccacagaagaaataaaagagactgatggaagctctcagatcaagcaagaaccagaccccacgtggtagtaatgaactagtccgtaacttgaaagtatttcgatttcttggctttatatatcttgtggaaaggacgaggcagcaggagcttgcgcgcttgt

SEQ ID NO: 955 - DNA, 3038 bp, Homo sapiens
  source 1..3038: mol_type = genomic DNA
accgccaccatggcccaagttgcaatgtccaccctccccgttgaagatgaggagtcctcggagagcaggatggtggtgacattcctcatgtcagctctcgagtccatgtgtaaagaactggccaagtccaaagccgaagtggcctgcattgcagtgtatgaaacagacgtgtttgtcgtcggaactgaaagaggacgtgcttttgtcaataccagaaaggattttcaaaaagattttgtaaaatattgtgttgaagaagaagaaaaagctgcagagatgcataaaatgaaatctacaacccaggcaaatcggatgagtgtagatgctgtagaaattgaaacactcagaaaaacagttgaggactatttctgcttttgctatgggaaagctttaggcaaatccacagtggtacctgtaccatatgagaagatgctgcgagaccagtcggctgtggtagtgcaggggcttccggaaggtgttgcctttaaacaccccgagaactatgatcttgcaaccctgaaatggattttggagaacaaagcagggatttcattcatcattaagagaccttttttagagccaaagaagcatgtaggtggtcgtgtgatggtaacagatgctgacaggtcaatactatctccaggtggaagttgtggccccatcaaagtgaaaactgaacccacagaagattctggcatttccctggaaatggcagctgtgacagtaaaggaagaatcagaagatcctgattattatcaatataacattcaaggaagccaccattcttcagagggcaatgaaggcacagaaatggaagtaccagcagaagattctactcaacatgtcccttcagaaacaagtgaggaccctgaagttgaggtgactattgaagatgatgattattctccaccgtctaagagaccaaaggccaatgagctaccgcagccaccagtcccggaacccgccaatgctgggaagcggaaagtgagggagttcaacttcgagaaatggaatgctcgcatcactgatctacgtaaacaagttgaagaattgtttgaaaggaaatatgctcaagccataaaagccaaaggtccggtgacgatcccgtaccctcttttccagtctcatgttgaagatctttatgtagaaggacttcctgaaggaattccttttagaaggccatctacttacggaattcctcgcctggagaggatattacttgcaaaggaaaggattcgttttgtgattaagaaacatgagcttctgaattcaacacgtgaagatttacagcttgataagccagcttcaggagtaaaggaagaatggtatgccagaatcactaaattaagaaagatggtggatcagcttttctgcaaaaaatttgcggaagccttggggagcactgaagccaaggctgtaccgtaccaaaaatttgaggcacacccgaatgatctgtacgtggaaggactgccagaaaacattcctttccgaagtccctcatggtatggaatcccaaggctggaaaaaatcattcaagtgggcaatcgaattaaatttgttattaaaagaccagaacttctgactcacagtaccactgaagttactcagccaagaacgaatacaccagtcaaagaagattggaatgtcagaattaccaagctacggaagcaagtggaagagatttttaatttgaaatttgctcaagctcttggactcaccgaggcagtaaaagtaccatatcctgtgtttgaatcaaacccggagttcttgtatgtggaaggcttgccagaggggattcccttccgaagccctacctggtttggaattccacgacttgaaaggatcgtccgcgggagtaataaaatcaagttcgttgttaaaaaacctgaactagttatttcctacttgcctcctgggatggctagtaaaataaacactaaagctttgcagtcccccaaaagaccacgaagtcctgggagtaattcaaaggttcctgaaattgaggtcaccgtggaaggccctaataacaacaatcctcaaacctcagctgttcgaaccccgacccagactaacggttctaacgttcccttcaagccacgagggagagagttttcctttgaggcctggaatgccaaaatcacggacctaaaacagaaagttgaaaatctcttcaatgagaaatgtggggaagctcttggccttaaacaagctgtgaaggtgccgttcgcgttatttgagtctttcccggaagacttttatgtggaaggcttacctgagggtgtgccattccgaagaccatcgacttttggcattccgaggctggagaagatactcagaaacaaagccaaaattaagttcatcattaaaaagcccgaaatgtttgagacggcgattaaggagagcacctcctctaagagccctcccagaaaaataaattcatcacccaatgttaatactactgcatcaggtgttgaagaccttaacatcattcaggtgacaattccagatgatgataatgaaagactctcgaaagttgaaaaagctagacagctaagagaacaagtgaatgacctctttagtcggaaatttggtgaagctattggtatgggttttcctgtgaaagttccctacaggaaaatcacaattaaccctggctgtgtggtagttgatggcatgcccccgggggtgtccttcaaagcccccagctacctggaaatcagctccatgagaaggatcttagactctgccgagtttatcaaattcacggtcattagaccatttccaggacttgtgattaataaccagctggttgatcagagtgagtcagaaggccccgtgatacaagaatcagctgaaccaagccagttggaagttccagccacagaagaaataaaagagactgatggaagctctcagatcaagcaagaaccagaccccacgtggtagtaatgaactagtccgtaacttgaaagtatttcgatttcttggctttatatatcttgtggaaaggacgagtttgcaggtttcctatatatcgg

SEQ ID NO: 956 - DNA, 2975 bp, Homo sapiens
  source 1..2975: mol_type = genomic DNA
accgccaccatggcccaagttgcaatgtccaccctccccgttgaagatgaggagtcctcggagagcaggatggtggtgacattcctcatgtcagctctcgagtccatgtgtaaagaactggccaagtccaaagccgaagtggcctgcattgcagtgtatgaaacagacgtgtttgtcgtcggaactgaaagaggacgtgcttttgtcaataccagaaaggattttcaaaaagattttgtaaaatattgtgttgaagaagaagaaaaagctgcagagatgcataaaatgaaatctacaacccaggcaaatcggatgagtgtagatgctgtagaaattgaaacactcagaaaaacagttgaggactatttctgcttttgctatgggaaagctttaggcaaatccacagtggtacctgtaccatatgagaagatgctgcgagaccagtcggctgtggtagtgcaggggcttccggaaggtgttgcctttaaacaccccgagaactatgatcttgcaaccctgaaatggattttggagaacaaagcagggatttcattcatcattaagagaccttttttagagccaaagaagcatgtaggtggtcgtgtgatggtaacagatgctgacaggtcaatactatctccaggtggaagttgtggccccatcaaagtgaaaactgaacccacagaagattctggcatttccctggaaatggcagctgtgacagtaaaggaagaatcagaagatcctgattattatcaatataacattcaaggaagccaccattcttcagagggcaatgaaggcacagaaatggaagtaccagcagaagatgatgattattctccaccgtctaagagaccaaaggccaatgagctaccgcagccaccagtcccggaacccgccaatgctgggaagcggaaagtgagggagttcaacttcgagaaatggaatgctcgcatcactgatctacgtaaacaagttgaagaattgtttgaaaggaaatatgctcaagccataaaagccaaaggtccggtgacgatcccgtaccctcttttccagtctcatgttgaagatctttatgtagaaggacttcctgaaggaattccttttagaaggccatctacttacggaattcctcgcctggagaggatattacttgcaaaggaaaggattcgttttgtgattaagaaacatgagcttctgaattcaacacgtgaagatttacagcttgataagccagcttcaggagtaaaggaagaatggtatgccagaatcactaaattaagaaagatggtggatcagcttttctgcaaaaaatttgcggaagccttggggagcactgaagccaaggctgtaccgtaccaaaaatttgaggcacacccgaatgatctgtacgtggaaggactgccagaaaacattcctttccgaagtccctcatggtatggaatcccaaggctggaaaaaatcattcaagtgggcaatcgaattaaatttgttattaaaagaccagaacttctgactcacagtaccactgaagttactcagccaagaacgaatacaccagtcaaagaagattggaatgtcagaattaccaagctacggaagcaagtggaagagatttttaatttgaaatttgctcaagctcttggactcaccgaggcagtaaaagtaccatatcctgtgtttgaatcaaacccggagttcttgtatgtggaaggcttgccagaggggattcccttccgaagccctacctggtttggaattccacgacttgaaaggatcgtccgcgggagtaataaaatcaagttcgttgttaaaaaacctgaactagttatttcctacttgcctcctgggatggctagtaaaataaacactaaagctttgcagtcccccaaaagaccacgaagtcctgggagtaattcaaaggttcctgaaattgaggtcaccgtggaaggccctaataacaacaatcctcaaacctcagctgttcgaaccccgacccagactaacggttctaacgttcccttcaagccacgagggagagagttttcctttgaggcctggaatgccaaaatcacggacctaaaacagaaagttgaaaatctcttcaatgagaaatgtggggaagctcttggccttaaacaagctgtgaaggtgccgttcgcgttatttgagtctttcccggaagacttttatgtggaaggcttacctgagggtgtgccattccgaagaccatcgacttttggcattccgaggctggagaagatactcagaaacaaagccaaaattaagttcatcattaaaaagcccgaaatgtttgagacggcgattaaggagagcacctcctctaagagccctcccagaaaaataaattcatcacccaatgttaatactactgcatcaggtgttgaagaccttaacatcattcaggtgacaattccagatgatgataatgaaagactctcgaaagttgaaaaagctagacagctaagagaacaagtgaatgacctctttagtcggaaatttggtgaagctattggtatgggttttcctgtgaaagttccctacaggaaaatcacaattaaccctggctgtgtggtagttgatggcatgcccccgggggtgtccttcaaagcccccagctacctggaaatcagctccatgagaaggatcttagactctgccgagtttatcaaattcacggtcattagaccatttccaggacttgtgattaataaccagctggttgatcagagtgagtcagaaggccccgtgatacaagaatcagctgaaccaagccagttggaagttccagccacagaagaaataaaagagactgatggaagctctcagatcaagcaagaaccagaccccacgtggtagtaatgaactagtccgtaacttgaaagtatttcgatttcttggctttatatatcttgtggaaaggacgatatcaagatctctcgggttcaagc

SEQ ID NO: 957 - DNA, 1193 bp, Homo sapiens
  source 1..1193: mol_type = genomic DNA
accgccaccatgtcctctcctaccacgagttccctggatacccccctgcctggaaatggcccccctcagcctggcgccccttcttcttcacccactgtaaaggaggagggtccggagccgtggcccgggggtccggaccctgatgtcccaggcactgatgaggccagctcagcctgcagcacagactggggcgtcctttctgaagaacagatccggaagaagaagattcggaaacagcagcaggagtcacagtcacagtcgcagtcacctgtggggccgcagggcagcagcagctcagcctctgggcctggggcttcccctggtggatctgaggcaggcagccagggctccggggaaggcgagggtgtccagctaacagcggctcaagaactaatgatccagcagttggtggcggcccaactgcagtgcaacaaacgctccttctccgaccagcccaaagtcacgccctggcccctgggcgcagacccccagtcccgagatgcccgccagcaacgctttgcccacttcacggagctggccatcatctcagtccaggagatcgtggacttcgctaagcaagtgcctggtttcctgcagctgggccgggaggaccagatcgccctcctgaaggcatccactatcgagatcatgctgctagagacagccaggcgctacaaccacgagacagagtgtatcaccttcttgaaggacttcacctacagcaaggacgacttccaccgtgcaggcctgcaggtggagttcatcaaccccatcttcgagttctcgcgggccatgcggcggctgggcctggacgacgctgagtacgccctgctcatcgccatcaacatcttctcggccgaccggcccaacgtgcaggagccgggccgcgtggaggcgttgcagcagccctacgtggaggcgctgctgtcctacacgcgcatcaagaggccgcaggaccagctgcgcttcccgcgcatgctcatgaagctggtgagcctgcgcacgctgagctctgtgcactcggagcaggtcttcgccttgcggctccaggacaagaagctgccgcctctgctgtcggagatctgggacgtccacgagtagtaatgaactagtccgtaacttgaaagtatttcgatttcttggctttatatatcttgtggaaaggacgattcatgagagaaacacctcccgcg

SEQ ID NO: 958 - DNA, 1463 bp, Homo sapiens
  source 1..1463: mol_type = genomic DNA
accgccaccatgcagcaaacaagctggaacccgctgggtggcacctgcaagcagccgcccggacgcacccactctgcggtggagctgtggaagccaggcgcacaggatgcaagcagccaggcccagggaggcagcagctgcatcctcagagaggaagccaggatgccccactctgctgggggtactgcaggggtggggctggaggctgcagagcccacagccctgctcaccagggcagagcccccttcagaacccacagagatccgtccacaaaagcggaaaaaggggccagcccccaaaatgctggggaacgagctatgcagcgtgtgtggggacaaggcctcgggcttccactacaatgttctgagctgcgagggctgcaagggattcttccgccgcagcgtcatcaagggagcgcactacatctgccacagtggcggccactgccccatggacacctacatgcgtcgcaagtgccaggagtgtcggcttcgcaaatgccgtcaggctggcatgcgggaggagtgtgtcctgtcagaagaacagatccgcctgaagaaactgaagcggcaagaggaggaacaggctcatgccacatccttgccccccagggcttcctcacccccccaaatcctgccccagctcagcccggaacaactgggcatgatcgagaagctcgtcgctgcccagcaacagtgtaaccggcgctccttttctgaccggcttcgagtcacgccttggcccatggcaccagatccccatagccgggaggcccgtcagcagcgctttgcccacttcactgagctggccatcgtctctgtgcaggagatagttgactttgctaaacagctacccggcttcctgcagctcagccgggaggaccagattgccctgctgaagacctctgcgatcgaggtgatgcttctggagacatctcggaggtacaaccctgggagtgagagtatcaccttcctcaaggatttcagttataaccgggaagactttgccaaagcagggctgcaagtggaattcatcaaccccatcttcgagttctccagggccatgaatgagctgcaactcaatgatgccgagtttgccttgctcattgctatcagcatcttctctgcagaccggcccaacgtgcaggaccagctccaggtagagaggctgcagcacacatatgtggaagccctgcatgcctacgtctccatccaccatccccatgaccgactgatgttcccacggatgctaatgaaactggtgagcctccggaccctgagcagcgtccactcagagcaagtgtttgcactgcgtctgcaggacaaaaagctcccaccgctgctctctgagatctgggatgtgcacgaatagtaatgaactagtccgtaacttgaaagtatttcgatttcttggctttatatatcttgtggaaaggacgagcattaaagtggctcctcaggccc

SEQ ID NO: 959 - DNA, 1445 bp, Homo sapiens
  source 1..1445: mol_type = genomic DNA
accgccaccatgtccttgtggctgggggcccctgtgcctgacattcctcctgactctgcggtggagctgtggaagccaggcgcacaggatgcaagcagccaggcccagggaggcagcagctgcatcctcagagaggaagccaggatgccccactctgctgggggtactgcaggggtggggctggaggctgcagagcccacagccctgctcaccagggcagagcccccttcagaacccacagagatccgtccacaaaagcggaaaaaggggccagcccccaaaatgctggggaacgagctatgcagcgtgtgtggggacaaggcctcgggcttccactacaatgttctgagctgcgagggctgcaagggattcttccgccgcagcgtcatcaagggagcgcactacatctgccacagtggcggccactgccccatggacacctacatgcgtcgcaagtgccaggagtgtcggcttcgcaaatgccgtcaggctggcatgcgggaggagtgtgtcctgtcagaagaacagatccgcctgaagaaactgaagcggcaagaggaggaacaggctcatgccacatccttgccccccagggcttcctcacccccccaaatcctgccccagctcagcccggaacaactgggcatgatcgagaagctcgtcgctgcccagcaacagtgtaaccggcgctccttttctgaccggcttcgagtcacgccttggcccatggcaccagatccccatagccgggaggcccgtcagcagcgctttgcccacttcactgagctggccatcgtctctgtgcaggagatagttgactttgctaaacagctacccggcttcctgcagctcagccgggaggaccagattgccctgctgaagacctctgcgatcgaggtgatgcttctggagacatctcggaggtacaaccctgggagtgagagtatcaccttcctcaaggatttcagttataaccgggaagactttgccaaagcagggctgcaagtggaattcatcaaccccatcttcgagttctccagggccatgaatgagctgcaactcaatgatgccgagtttgccttgctcattgctatcagcatcttctctgcagaccggcccaacgtgcaggaccagctccaggtagagaggctgcagcacacatatgtggaagccctgcatgcctacgtctccatccaccatccccatgaccgactgatgttcccacggatgctaatgaaactggtgagcctccggaccctgagcagcgtccactcagagcaagtgtttgcactgcgtctgcaggacaaaaagctcccaccgctgctctctgagatctgggatgtgcacgaatagtaatgaactagtccgtaacttgaaagtatttcgatttcttggctttatatatcttgtggaaaggacgacgtctcgcacgatgtcggttccag

SEQ ID NO: 960 - DNA, 1265 bp, Homo sapiens
  source 1..1265: mol_type = genomic DNA
accgccaccatgtccttgtggctgggggcccctgtgcctgacattcctcctgactctgcggtggagctgtggaagccaggcgcacaggatgcaagcagccaggcccagggaggcagcagctgcatcctcagagaggaagccaggatgccccactctgctgggggtactgcaggggtggggctggaggctgcagagcccacagccctgctcaccagggcagagcccccttcagaacccacagagatccgtccacaaaagcggaaaaaggggccagcccccaaaatgctggggaacgagctatgcagcgtgtgtggggacaaggcctcgggcttccactacaatgttctgagctgcgagggctgcaagggattcttccgccgcagcgtcatcaagggagcgcactacatctgccacagtggcggccactgccccatggacacctacatgcgtcgcaagtgccaggagtgtcggcttcgcaaatgccgtcaggctggcatgcgggaggagtgtgtcctgtcagaagaacagatccgcctgaagaaactgaagcggcaagaggaggaacaggctcatgccacatccttgccccccagggcttcctcacccccccaaatcctgccccagctcagcccggaacaactgggcatgatcgagaagctcgtcgctgcccagcaacagtgtaaccggcgctccttttctgaccggcttcgagtcacggtgatgcttctggagacatctcggaggtacaaccctgggagtgagagtatcaccttcctcaaggatttcagttataaccgggaagactttgccaaagcagggctgcaagtggaattcatcaaccccatcttcgagttctccagggccatgaatgagctgcaactcaatgatgccgagtttgccttgctcattgctatcagcatcttctctgcagaccggcccaacgtgcaggaccagctccaggtagagaggctgcagcacacatatgtggaagccctgcatgcctacgtctccatccaccatccccatgaccgactgatgttcccacggatgctaatgaaactggtgagcctccggaccctgagcagcgtccactcagagcaagtgtttgcactgcgtctgcaggacaaaaagctcccaccgctgctctctgagatctgggatgtgcacgaatagtaatgaactagtccgtaacttgaaagtatttcgatttcttggctttatatatcttgtggaaaggacgaatgggttccactaggccttgcgca

SEQ ID NO: 961 - DNA, 1130 bp, Homo sapiens
  source 1..1130: mol_type = genomic DNA
accgccaccatgccccactctgctgggggtactgcaggggtggggctggaggctgcagagcccacagccctgctcaccagggcagagcccccttcagaacccacagagatccgtccacaaaagcggaaaaaggggccagcccccaaaatgctggggaacgagctatgcagcgtgtgtggggacaaggcctcgggcttccactacaatgttctgagctgcgagggctgcaagggattcttccgccgcagcgtcatcaagggagcgcactacatctgccacagtggcggccactgccccatggacacctacatgcgtcgcaagtgccaggagtgtcggcttcgcaaatgccgtcaggctggcatgcgggaggagtgtgtcctgtcagaagaacagatccgcctgaagaaactgaagcggcaagaggaggaacaggctcatgccacatccttgccccccagggcttcctcacccccccaaatcctgccccagctcagcccggaacaactgggcatgatcgagaagctcgtcgctgcccagcaacagtgtaaccggcgctccttttctgaccggcttcgagtcacggtgatgcttctggagacatctcggaggtacaaccctgggagtgagagtatcaccttcctcaaggatttcagttataaccgggaagactttgccaaagcagggctgcaagtggaattcatcaaccccatcttcgagttctccagggccatgaatgagctgcaactcaatgatgccgagtttgccttgctcattgctatcagcatcttctctgcagaccggcccaacgtgcaggaccagctccaggtagagaggctgcagcacacatatgtggaagccctgcatgcctacgtctccatccaccatccccatgaccgactgatgttcccacggatgctaatgaaactggtgagcctccggaccctgagcagcgtccactcagagcaagtgtttgcactgcgtctgcaggacaaaaagctcccaccgctgctctctgagatctgggatgtgcacgaatagtaatgaactagtccgtaacttgaaagtatttcgatttcttggctttatatatcttgtggaaaggacgaacccattaccgttacaaagcagat

SEQ ID NO: 962 - DNA, 830 bp, Homo sapiens
  source 1..830: mol_type = genomic DNA
accgccaccatgagctcttatttcgtcaactcactgttctccaaatacaaaaccggggagtccctgcgccccaattattatgactgcggcttcgcccaggacctgggcggccgacccaccgtggtgtacggtcccagcagcggcggcagcttccagcacccgtcgcaaatccaggagttctaccacgggccgtcgtcgctgtccacggctccctaccagcagaacccgtgcgccgtggcgtgccacggggaccccggcaatttctacggctacgacccgctgcaacgccagagcctattcggtgcgcaggatccagacctggtgcagtacgcagactgcaagcttgccgccgccagcggcctgggcgaggaggccgagggctccgagcagagcccgtcgcccacacagctcttcccctggatgcgcccgcaagccgccggacgcaggcgaggccgacagacctacagccgctaccagaccctggagctggagaaggagttcctatttaatccctatctgactcgtaagcggcgaatcgaggtatcgcacgccctgggactgacagagagacaggtcaaaatctggttccagaaccggaggatgaagtggaaaaaagagaacaacaaagacaagttccccagcagcaaatgcgagcaggaggagctggagaaacagaagctggagcgggccccagaggcggcggacgagggcgacgcgcagaagggcgacaagaagtagtaatgaactagtccgtaacttgaaagtatttcgatttcttggctttatatatcttgtggaaaggacgaggagacgtagggatcgccctcagt

SEQ ID NO: 963 - DNA, 833 bp, Homo sapiens
  source 1..833: mol_type = genomic DNA
accgccaccatgagctcttatttcgtcaactcactgttctccaaatacaaaaccggggagtccctgcgccccaattattatgactgcggcttcgcccaggacctgggcggccgacccaccgtggtgtacggtcccagcagcggcggcagcttccagcacccgtcgcaaatccaggagttctaccacgggccgtcgtcgctgtccacggctccctaccagcagaacccgtgcgccgtggcgtgccacggggaccccggcaatttctacggctacgacccgctgcaacgccagagcctattcggtgcgcaggatccagacctggtgcagtacgcagactgcaagcttgccgccgccagcggcctgggcgaggaggccgagggctccgagcagagcccgtcgcccacacagctcttcccctggatgcgcccgcaagcagccgccggacgcaggcgaggccgacagacctacagccgctaccagaccctggagctggagaaggagttcctatttaatccctatctgactcgtaagcggcgaatcgaggtatcgcacgccctgggactgacagagagacaggtcaaaatctggttccagaaccggaggatgaagtggaaaaaagagaacaacaaagacaagttccccagcagcaaatgcgagcaggaggagctggagaaacagaagctggagcgggccccagaggcggcggacgagggcgacgcgcagaagggcgacaagaagtagtaatgaactagtccgtaacttgaaagtatttcgatttcttggctttatatatcttgtggaaaggacgaggattgtcgattacctgtacaatc

SEQ ID NO: 964 - DNA, 854 bp, Homo sapiens
  source 1..854: mol_type = genomic DNA
accgccaccatgtccatttctgggacgcttagcagctattatgtcgactcgatcataagtcacgagagtgaggacgcgcctccagccaagtttccttctggccagtacgcgagctcgcggcagccgggccacgcggagcacctggagttcccctcgtgcagcttccagcccaaagcgccggtgttcggcgcctcctgggcgccgctgagcccgcacgcgtccgggagcctgccgtccgtctaccacccttacatccagccccagggcgtcccgccggccgagagcaggtacctccgcacctggctggagccggcgccgcgcggcgaagcggccccggggcagggccaggcggcggtgaaggcggagccgctgctgggcgcgcctggggagctgctcaaacagggcacgcccgagtacagtttggaaacttcggcgggcagggaggccgtgctgtctaatcaaagacccggctacggggacaataaaatttgcgaaggaagcgaggacaaagagaggccggatcaaaccaacccctccgccaactggctgcacgctcgctcttcccggaaaaagcgctgtccctacaccaaataccagacgctggagctagagaaggagtttctgttcaatatgtacctcaccagggaccgtaggcacgaagtggccagactcctcaatctgagtgagagacaagtcaaaatctggtttcagaaccggcggatgaaaatgaagaaaatgaataaggagcagggcaaagagtagtaatgaactagtccgtaacttgaaagtatttcgatttcttggctttatatatcttgtggaaaggacgatcccatatcgcacctcaccaaccg

SEQ ID NO: 965 - DNA, 1079 bp, Homo sapiens
  source 1..1079: mol_type = genomic DNA
accgccaccatggtggccaccaacaccccccacagcaccctgagcgtcaactggagcctcctgctatcccctgagcccgatgggggcctgatggtgctccctaaggacagcattcagttttcttctgcccttgtttttaccaggctgcttgagtttgacagcaccaacgtgtccgatacggcagcaaagcctttgggaagaccatatcctccatactccttggccgatttctcttggaacaacatcactgattcattggatcctgccaccctgagtgccacatttcaaggccaccccatgaacgaccctaccaggacttttgccaatggcagcctggccttcagggtccaggccttttccaggtccagccgaccagcccaaccccctcgcctcctgcacacagcagacacctgtcagctagaggtggccctgattggagcctctccccggggaaaccgttccctgtttgggctggaggtagccacattgggccagggccctgactgcccctcaatgcaggagcagcactccatcgacgatgaatatgcaccggccgtcttccagttggaccagctactgtggggctccctcccatcaggctttgcacagtggcgaccagtggcttactcccagaagccggggggccgagaatcagccctgccctgccaagcttcccctcttcatcctgccttagcatactctcttccccagtcacccattgtccgagccttctttgggtcccagaataacttctgtgccttcaatctgacgttcggggcttccacaggccctggctattgggaccaacactacctcagctggtcgatgctcctgggtgtgggcttccctccagtggacggcttgtccccactagtcctgggcatcatggcagtggccctgggtgccccagggctcatgctgctagggggcggcttggttctgctgctgcaccacaagaagtactcagagtaccagtccataaattagtaatgaactagtccgtaacttgaaagtatttcgatttcttggctttatatatcttgtggaaaggacgacgtgtgtcacctcggcttcccacc

SEQ ID NO: 966 - DNA, 1097 bp, Homo sapiens
  source 1..1097: mol_type = genomic DNA
accgccaccatgcgcggctctgtggagtgcacctggggttgggggcactgtgcccccagccccctgctcctttggactctacttctgtttgcagccccatttggcctgctgggggagaagacccgccaggtgtctctggaggtcatccctaactggctgggccccctgcagaacctgcttcatatacgggcagtgggcaccaattccacactgcactatgtgtggagcagcctggggcctctggcagtggtaatggtggccaccaacaccccccacagcaccctgagcgtcaactggagcctcctgctatcccctgagcccgatgggggcctgatggtgctccctaaggacagcattcagttttcttctgcccttgtttttaccaggctgcttgagtttgacagcaccaacgtgtccgatacggcagcaaagcctttgggaagaccatatcctccatactccttggccgatttctcttggaacaacatcactgattcattggatcctgccaccctgagtgccacatttcaaggccaccccatgaacgaccctaccaggacttttgccaatggcagcctggccttcagggtccaggccttttccaggtccagccgaccagcccaaccccctcgcctcctgcacacagcagacacctgtcagctagaggtggccctgattggagcctctccccggggaaaccgttccctgtttgggctggaggtagccacattgggccagggccctgactgcccctcaatgcaggagcagcactccatcgacgatgaatatgcaccggccgtcttccaggtcgatgctcctgggtgtgggcttccctccagtggacggcttgtccccactagtcctgggcatcatggcagtggccctgggtgccccagggctcatgctgctagggggcggcttggttctgctgctgcaccacaagaagtactcagagtaccagtccataaattaaggcccgctctctggagggaaggacattactagtaatgaactagtccgtaacttgaaagtatttcgatttcttggctttatatatcttgtggaaaggacgaatagaatctagtgttatacctcac

SEQ ID NO: 967 - DNA, 1064 bp, Homo sapiens
  source 1..1064: mol_type = genomic DNA
accgccaccatgcgcggctctgtggagtgcacctggggttgggggcactgtgcccccagccccctgctcctttggactctacttctgtttgcagccccatttggcctgctgggggagaagacccgccagctgcttgagtttgacagcaccaacgtgtccgatacggcagcaaagcctttgggaagaccatatcctccatactccttggccgatttctcttggaacaacatcactgattcattggatcctgccaccctgagtgccacatttcaaggccaccccatgaacgaccctaccaggacttttgccaatggcagcctggccttcagggtccaggccttttccaggtccagccgaccagcccaaccccctcgcctcctgcacacagcagacacctgtcagctagaggtggccctgattggagcctctccccggggaaaccgttccctgtttgggctggaggtagccacattgggccagggccctgactgcccctcaatgcaggagcagcactccatcgacgatgaatatgcaccggccgtcttccagttggaccagctactgtggggctccctcccatcaggctttgcacagtggcgaccagtggcttactcccagaagccggggggccgagaatcagccctgccctgccaagcttcccctcttcatcctgccttagcatactctcttccccagtcacccattgtccgagccttctttgggtcccagaataacttctgtgccttcaatctgacgttcggggcttccacaggccctggctattgggaccaacactacctcagctggtcgatgctcctgggtgtgggcttccctccagtggacggcttgtccccactagtcctgggcatcatggcagtggccctgggtgccccagggctcatgctgctagggggcggcttggttctgctgctgcaccacaagaagtactcagagtaccagtccataaattagtaatgaactagtccgtaacttgaaagtatttcgatttcttggctttatatatcttgtggaaaggacgatagcctggcagtagcatcgcaacg

SEQ ID NO: 968 - DNA, 1172 bp, Homo sapiens
  source 1..1172: mol_type = genomic DNA
accgccaccatgaattttgaatttgagagggagattgggtttataaacagccagccgtcgctcgccgagtgtctgacttccttccccgctgtcttggagacatttcaaacttcatcaatcaaggagtcgacattaattcctcctcctcctcctttcgagcaaaccttccccagcctccagcccggcgcctccacccttcagagacccaggagccaaaagcgagccgaagatgggcctgctctgccgccgccaccgccgccgccactccccgctgcccccccggcccccgagttcccttggatgaaagagaagaaatccgccaagaaacccagccaatccgccacgtctccttctccggccgcctccgccgttccggcctccggggtcggatcgcctgcagatggcctgggactgccggaggctggtggcggcggggcgcgcaggctgcgcacggcttacaccaacacgcagctgctggaactggagaaggaattccactttaataagtacctgtgccggccacgccgcgtcgagatcgcggccttgctggacctcaccgaaaggcaggtcaaagtctggtttcagaaccggcgcatgaagcacaagcggcagacgcagcaccgagagccgccggatggggagcctgcctgcccgggagccctggaggacatctgcgaccctgccgaggaacccgcggccagcccgggcggcccctccgcctcgcgggcggcgtgggaagcctgctgtcacccgccggaggtggtgccgggggccttaagcgcggacccccggcctttagccgttcgcttagagggcgcaggcgcgtcgagtcccggctgcgcgctgcgcggggccggcgggctggagcccgggccattgccagaagacgtcttctcggggcgccaggattcacctttccttcccgacctcaacttcttcgcggccgactcctgtctccagctatccggaggcctctcccctagcctacagggttctctcgacagcccggtccctttttccgaggaagagctggattttttcaccagtacgctctgtgccatcgacctgcagtttccctagtaatgaactagtccgtaacttgaaagtatttcgatttcttggctttatatatcttgtggaaaggacgagtaagttgatccaacatattaact

SEQ ID NO: 969 - DNA, 1397 bp, Homo sapiens
  source 1..1397: mol_type = genomic DNA
accgccaccatgcagaaagccacctactacgacaacgccgcggctgctctcttcggaggctattcctcgtaccctggcagcaatggcttcggcttcgatgtccccccccaacccccatttcaggccgccacgcacctggagggcgactaccagcgctcagcttgctcgctgcagtccctgggcaacgctgccccacatgccaagagcaaggagctcaacggcagctgcatgaggccgggtctggcccccgagcccctgtcggccccgcctggctcacccccgcccagtgccgcacctaccagtgccactagcaacagcagtaatgggggcgggcccagcaaaagtggtcccccaaagtgcggtcccggcaccaactccaccctcaccaaacagatattcccctggatgaaagagtcgaggcaaacgtccaagctgaaaaacaactcccccggcacagcagagggctgtggtggcggcggcggtggcggcggcggcggaggcagtggtggcagcgggggcggtggcggcggcggcgggggaggggacaagagccccccggggtcggcggcgtccaagcgggcgcggacggcgtacacgagcgcgcagctggtggagctggagaaggagttccattttaaccgctacctgtgccggcctcgccgtgtagagatggccaacctgctgaacctcagcgagcggcagatcaagatctggttccagaaccggcgcatgaagtacaagaaggaccagaaggccaagggattggcctcgtcgtcggggggcccatctccagccggcagccccccgcagcccatgcagtccacggccggcttcatgaacgccttacactccatgacccccagctacgagagcccgtccccacccgccttcggtaaagcccaccagaatgcctacgcgctgccctccaactaccagccccctctcaaaggctgcggcgccccgcagaagtaccctccgaccccggcgcccgagtatgagccgcacgtcctccaagccaacgggggcgcctacgggacgcccaccatgcagggcagtccggtgtacgtgggcgggggcggctacgcggatccgctgccgccccctgccggcccctccctctatggcctcaaccacctttcccatcacccttccgggaacctggactacaacggggcgccccctatggcgcccagccagcaccacggaccctgcgaaccccaccccacctacacagacctctcctctcaccacgcgcctcctcctcagggtagaatccaagaagcgcccaaattaacacacctgtagtaatgaactagtccgtaacttgaaagtatttcgatttcttggctttatatatcttgtggaaaggacgacccgtcagcggatcgcccgtttaa

SEQ ID NO: 970 - DNA, 1178 bp, Homo sapiens
  source 1..1178: mol_type = genomic DNA
accgccaccatgaggccgggtctggcccccgagcccctgtcggccccgcctggctcacccccgcccagtgccgcacctaccagtgccactagcaacagcagtaatgggggcgggcccagcaaaagtggtcccccaaagtgcggtcccggcaccaactccaccctcaccaaacagatattcccctggatgaaagagtcgaggcaaacgtccaagctgaaaaacaactcccccggcacagcagagggctgtggtggcggcggcggtggcggcggcggcggaggcagtggtggcagcgggggcggtggcggcggcggcgggggaggggacaagagccccccggggtcggcggcgtccaagcgggcgcggacggcgtacacgagcgcgcagctggtggagctggagaaggagttccattttaaccgctacctgtgccggcctcgccgtgtagagatggccaacctgctgaacctcagcgagcggcagatcaagatctggttccagaaccggcgcatgaagtacaagaaggaccagaaggccaagggattggcctcgtcgtcggggggcccatctccagccggcagccccccgcagcccatgcagtccacggccggcttcatgaacgccttacactccatgacccccagctacgagagcccgtccccacccgccttcggtaaagcccaccagaatgcctacgcgctgccctccaactaccagccccctctcaaaggctgcggcgccccgcagaagtaccctccgaccccggcgcccgagtatgagccgcacgtcctccaagccaacgggggcgcctacgggacgcccaccatgcagggcagtccggtgtacgtgggcgggggcggctacgcggatccgctgccgccccctgccggcccctccctctatggcctcaaccacctttcccatcacccttccgggaacctggactacaacggggcgccccctatggcgcccagccagcaccacggaccctgcgaaccccaccccacctacacagacctctcctctcaccacgcgcctcctcctcagggtagaatccaagaagcgcccaaattaacacacctgtagtaatgaactagtccgtaacttgaaagtatttcgatttcttggctttatatatcttgtggaaaggacgatgccaactgtcctcggatcgtgat

SEQ ID NO: 971 - DNA, 1001 bp, Homo sapiens
  source 1..1001: mol_type = genomic DNA
accgccaccatgaaagagtcgaggcaaacgtccaagctgaaaaacaactcccccggcacagcagagggctgtggtggcggcggcggtggcggcggcggcggaggcagtggtggcagcgggggcggtggcggcggcggcgggggaggggacaagagccccccggggtcggcggcgtccaagcgggcgcggacggcgtacacgagcgcgcagctggtggagctggagaaggagttccattttaaccgctacctgtgccggcctcgccgtgtagagatggccaacctgctgaacctcagcgagcggcagatcaagatctggttccagaaccggcgcatgaagtacaagaaggaccagaaggccaagggattggcctcgtcgtcggggggcccatctccagccggcagccccccgcagcccatgcagtccacggccggcttcatgaacgccttacactccatgacccccagctacgagagcccgtccccacccgccttcggtaaagcccaccagaatgcctacgcgctgccctccaactaccagccccctctcaaaggctgcggcgccccgcagaagtaccctccgaccccggcgcccgagtatgagccgcacgtcctccaagccaacgggggcgcctacgggacgcccaccatgcagggcagtccggtgtacgtgggcgggggcggctacgcggatccgctgccgccccctgccggcccctccctctatggcctcaaccacctttcccatcacccttccgggaacctggactacaacggggcgccccctatggcgcccagccagcaccacggaccctgcgaaccccaccccacctacacagacctctcctctcaccacgcgcctcctcctcagggtagaatccaagaagcgcccaaattaacacacctgtagtaatgaactagtccgtaacttgaaagtatttcgatttcttggctttatatatcttgtggaaaggacgagaaccggctagctccgttggtttg

SEQ ID NO: 972 - DNA, 1007 bp, Homo sapiens
  source 1..1007: mol_type = genomic DNA
accgccaccatggactataataggatgaactccttcttagagtacccactctgtaaccggggacccagcgcctacagcgcccacagcgccccaacctcctttcccccaagctcggctcaggcggttgacagctatgcaagcgagggccgctacggtggggggctgtccagccctgcgtttcagcagaactccggctatcccgcccagcagccgccttcgaccctgggggtgcccttccccagctccgcgccctcggggtatgctcctgccgcctgcagccccagctacgggccttctcagtactaccctctgggtcaatcagaaggagacggaggctattttcatccctcgagctacggggcccagctagggggcttgtccgatggctacggagcaggtggagccggtccggggccatatcctccgcagcatcccccttatgggaacgagcagaccgcgagctttgcaccggcctatgctgatctcctctccgaggacaaggaaacaccctgcccttcagaacctaacacccccacggcccggaccttcgactggatgaaggttaagagaaacccacccaagacagcgaaggtgtcagagccaggcctgggctcgcccagtggcctccgcaccaacttcaccacaaggcagctgacagaactggaaaaggagttccatttcaacaagtacctgagccgggcccggagggtggagattgccgccaccctggagctcaatgaaacacaggtcaagatttggttccagaaccgacgaatgaagcagaagaagcgcgagcgagaggaaggtcgggtccccccagccccaccaggctgccccaaggaggcagctggagatgcctcagaccagtcgacatgcacctccccggaagcctcacccagctctgtcacctcctagtaatgaactagtccgtaacttgaaagtatttcgatttcttggctttatatatcttgtggaaaggacgaggtttcgatacgatgaacaacacg

SEQ ID NO: 973 - DNA, 755 bp, Homo sapiens
  source 1..755: mol_type = genomic DNA
accgccaccatgagttcattgtattatgcgaatactttattttctaaatatccagcctcaagttcggttttcgctaccggagccttcccagaacaaacttcttgtgcgtttgcttccaacccccagcgcccgggctatggagcgggttcgggcgcttccttcgccgcctcgatgcagggcttgtaccccggcggggggggcatggcgggccagagcgcggccggcgtctacgcggccggctatgggctcgagccgagttccttcaacatgcactgcgcgccctttgagcagaacctctccggggtgtgtcccggcgactccgccaaggcggcgggcgccaaggagcagagggactcggacttggcggccgagagtaacttccggatctacccctggatgcgaagctcaggaactgaccgcaaacgaggccgccagacctacacccgctaccagaccctggagctggagaaagaatttcactacaatcgctacctgacgcggcggcggcgcatcgagatcgcgcacacgctctgcctcacggaaagacagatcaagatttggtttcagaaccggcgcatgaagtggaaaaaggagaacaagaccgcgggcccggggaccaccggccaagacagggctgaagcagaggaggaagaggaagagtagtaatgaactagtccgtaacttgaaagtatttcgatttcttggctttatatatcttgtggaaaggacgagacagctctctgttggtcactaaa

SEQ ID NO: 974 - DNA, 857 bp, Homo sapiens
  source 1..857: mol_type = genomic DNA
accgccaccatggctatgagttcttttttgatcaactcaaactatgtcgaccccaagttccctccatgcgaggaatattcacagagcgattacctacccagcgaccactcgcccgggtactacgccggcggccagaggcgagagagcagcttccagccggaggcgggcttcgggcggcgcgcggcgtgcaccgtgcagcgctacgcggcctgccgggaccctgggcccccgccgcctccgccaccacccccgccgcccccgccaccgcccggtctgtcccctcgggctcctgcgccgccacccgccggggccctcctcccggagcccggccagcgctgcgaggcggtcagcagcagccccccgccgcctccctgcgcccagaaccccctgcaccccagcccgtcccactccgcgtgcaaagagcccgtcgtctacccctggatgcgcaaagttcacgtgagcacggtaaaccccaattacgccggcggggagcccaagcgctctcggaccgcctacacgcgccagcaggtcttggagctggagaaggaatttcactacaaccgctacctgacacggcgccggagggtggagatcgcccacgcgctctgcctctccgagcgccagatcaagatctggttccagaaccggcgcatgaagtggaaaaaagaccacaagttgcccaacaccaagatccgctcgggtggtgcggcaggctcagccggagggccccctggccggcccaatggaggcccccgcgcgctctagtaatgaactagtccgtaacttgaaagtatttcgatttcttggctttatatatcttgtggaaaggacgagcaatcccgtcgaattcacgcttt

SEQ ID NO: 975 - DNA, 854 bp, Homo sapiens
  source 1..854: mol_type = genomic DNA
accgccaccatgaccatggttgacacagagatgccattctggcccaccaactttgggatcagctccgtggatctctccgtaatggaagaccactcccactcctttgatatcaagcccttcactactgttgacttctccagcatttctactccacattacgaagacattccattcacaagaacagatccagtggttgcagattacaagtatgacctgaaacttcaagagtaccaaagtgcaatcaaagtggagcctgcatctccaccttattattctgagaagactcagctctacaataagcctcatgaagagccttccaactccctcatggcaattgaatgtcgtgtctgtggagataaagcttctggatttcactatggagttcatgcttgtgaaggatgcaagggtttcttccggagaacaatcagattgaagcttatctatgacagatgtgatcttaactgtcggatccacaaaaaaagtagaaataaatgtcagtactgtcggtttcagaaatgccttgcagtggggatgtctcataatgccatcaggtttgggcggatgccacaggccgagaaggagaagctgttggcggagatctccagtgatatcgaccagctgaatccagagtccgctgacctccgggccctggcaaaacatttgtatgactcatacataaagtccttcccgctgaccaaagcaaaggcgagggcgatcttgacaggaaagacaacagacaaatcaaccgcccaggtttgctagtaatgaactagtccgtaacttgaaagtatttcgatttcttggctttatatatcttgtggaaaggacgatattgcactagtggccgatgagga

SEQ ID NO: 976 - DNA, 4562 bp, Homo sapiens
  source 1..4562: mol_type = genomic DNA
accgccaccatggccgccaatgtgggatcgatgtttcaatattggaagcgatttgatctacggcgactccagaaggagcttaattccgtcgcttctgagctgtctgcacggcaggaggagagtgaacattctcataaacatttaattgaactccgccgggaatttaagaaaaatgtacctgaggaaatcagagagatggtggctcctgtattaaaaagcttccaagccgaggtggtggcccttagtaagagaagtcaggaggcggaggctgcttttctgagtgtttacaagcaattaattgaagcaccagaccccgtgcctgtgtttgaggcggcacgcagcctagacgacagactgcagccccccagctttgaccccagtgggcagccccggcgagacctccacacttcgtggaagaggaaccccgagctcctcagccccaaagagcagagagaggggacgtcgcctgccgggcccacgctgaccgagggaagccgcctcccaggcattcccgggaaagccctcctgacagaaaccttgctgcagagaaatgaggcggaaaaacaaaagggccttcaagaagtacagatcactttggcggccagactgggggaggcagaggagaaaatcaaagtcctacattcagcgctaaaggctacgcaggcagagctgctagagctgcggcggaagtacgacgaggaggcagcatccaaggcagatgaagtcggcctgatcatgaccaacctggagaaagctaatcagcgagctgaggctgcccagcgggaggtggaaagtctccgggaacagctggcctctgtcaacagctccatccgcctggcttgctgctctccccaggggcccagtggggataaggtgaacttcactctgtgctcgggccctcggctggaggccgcgctggcctccaaggacagggagatcctgcggctgctgaaggacgtgcagcacctccagagctcactgcaggagctggaggaggcatccgccaaccagatcgccgacctggagcggcagctcacggccaagtccgaggccatagaaaagctggaagagaagctccaggcccagtctgactatgaggaaattaaaacggagctgagcatcctgaaagccatgaagctggcctccagcacctgcagcctcccccagggcatggccaagcctgaagactcactgcttattgcaaaggaggccttcttccccacgcagaaattccttctggagaagcccagcctcctggccagccctgaggaagacccatcagaggacgattccatcaaggattcactgggcacggagcagtcctacccctcccctcagcagctcccacctccaccagggccagaagaccccctgtctcccagccccgggcagcccctgctgggccccagcttggggcctgacggcactcggactttctcgctgtcccccttccccagcctggcatcaggggagagactgatgatgcccccagccgccttcaagggagaggcgggcggcctgctggtgttccccccagccttctatggcgccaagccccccacagcccctgccaccccggcccctggccctgagccactgggcggtcctgagcccgcggatggtggtgggggcggagcggcggggcccggggcagaggaggagcagctggacacggcagagatcgccttccaggtgaaggagcagctgctgaaacacaacatcgggcagcgggtgtttgggcattacgtgctggggctgtcgcagggctcggtcagcgagatcctagcccggcccaagccctggcgcaagctcacggtgaagggcaaggagcccttcatcaagatgaagcagttcctgtcggatgagcagaatgtactggcgctcaggaccatccaagtgcggcagcgaggcagcatcaccccgagaatccgcacgcctgagacaggctcagacgacgccatcaagagcattctagagcaggccaagaaggagatcgagtcgcagaagggcggcgagcccaagacctcggtggccccgctgagcatcgccaacggcacgacccccgccagcacctcggaggacgccatcaagagcatcctggagcaggcacgccgtgagatgcaggcgcaacagcaggcgctgctggagatggaggtggcgcccaggggccgctcggtgcccccctcgcccccggagcggccatcactggccaccgcgagccagaacggggccccggccttggtgaagcaggaggagggcagcgggggccccgcgcaggcgccgctcccggtcctgtcccccgccgccttcgtgcagagcatcatccgcaaggtcaagtccgagatcggcgacgccggctacttcgaccaccactgggcctccgaccgcggcctgctcagccgcccctacgcctccgtgtcgccctcgctgtcctcctcctcctcctctggctactctggccagcccaacggccgcgcctggccccgcggggacgaggcccctgtgccccccgaggacgaggcggcggcaggggcggaggacgaaccccccaggacgggcgagctcaaggctgagggcgcgacggccgaggcgggcgcgcggctgccctactacccggcctacgtgccgcgcaccctgaagcccaccgtgccgccgctgacccccgagcagtacgagctgtacatgtaccgtgaggtagacacgctggagctcacccgccaggtcaaggagaagctggccaagaacggcatctgccagaggatcttcggggagaaggtgctgggcctgtcacagggcagcgtgagcgacatgctgtcccggccgaagccatggagcaagctgacgcagaaggggcgggagcccttcatccgcatgcagctgtggctctctgaccagctcggccaggcagtgggccagcagcctggtgcctcccaggccagtcccacagaaccaaggtcctcaccatccccaccccccagccccacagagcctgagaagagctcccaggagccgttgagcctgtccctggagagcagcaaggagaaccagcagccagagggccgctccagctcctcgttgagcgggaagatgtactcaggcagccaggccccagggggcatccaggagatcgtggccatgtcccccgagctggacacgtactccatcaccaagagggtgaaggaggtcctcacagacaacaatctagggcagcggctgtttggggaaagcatcctgggtctgacacagggctccgtgtctgacctgctgtcccggcccaaaccctggcacaagctgagcctgaaggggcgggagccttttgtccgcatgcagctgtggctcaatgacccccataacgtggagaagctgagggatatgaagaagctggagaagaaagcctacctgaaacgtcgctatggcctcatcagcaccggctcagacagtgagtccccggccacccgctcagagtgccccagcccctgcctgcagccccaggacctgagcctcctgcagatcaagaagccccgggtggtgctggcacccgaggagaaggaggcactgcggaaggcctatcagctggaaccctacccctcgcagcagaccatcgagctcctctccttccagctcaacctcaagaccaacaccgtcatcaactggttccacaactacaggtcccggatgcgccgggagatgttggtggaggggacccaggatgagccagaccttgatccaagcgggggtcctggaatcctaccgccaggccactcccacccagaccccaccccgcagagccctgactctgagactgaggaccagaagccaaccgtgaaggaactggagcttcaggagggccctgaggagaacagcacacccctgaccacccaggacaaggcccaagtgaggatcaagcaggaacagatggaggaggatgctgaggaagaggcaggcagccagccccaggactcaggggagctggacaaaggccaaggtccccccaaagaggagcatcccgaccctccgggtaatgatggactcccaaaagtggctcccgggcccctccttccaggtggatccaccccagactgtccctcacttcatccccaacaggagagtgaggccggggagcgacttcacccggaccctttaagttttaagtcagcctcagagtcctcacgctgcagcctggaggtgtcactgaactcgccctcggccgcctcctcaccaggcctcatgatgtctgtgtcacctgtcccctcctcctcagctcccatctccccatccccacctggcgccccccctgccaaagtgccgagtgccagccccactgctgacatggctggagccttgcaccccagtgccaaggtgaaccccaacttgcagcggcggcatgagaagatggccaatctgaacaacatcatttaccgagtagagcgggctgccaatcgggaggaggccctggagtgggagttctagtaatgaactagtccgtaacttgaaagtatttcgatttcttggctttatatatcttgtggaaaggacgactaggactagagaggtcgcggaaa

SEQ ID NO: 977 - DNA, 1487 bp, Homo sapiens
  source 1..1487: mol_type = genomic DNA
accgccaccatggaagaatctcacttcaattctaacccgtacttctggccttctatccccacagtctcaggtcagatcgagaacacaatgttcatcaacaagatgaaggatcagctgttgccagagaagggctgtggtctggccccacctcactaccccaccttgctgacagtgcctgcctcagtgtccctgccctcaggcatcagtatggacacagagtccaagtcagaccagctgaccccacacagccaagcgtccgttacccagaatatcacggtggtccctgtgccgtctacaggactgatgactgctgccctgcaggttgtccctgacctctccaagaaggtagcatcgaccctaaccgaggaaggaggcggaggtggtggtggaggtggcagtgtggctcctaagccaccccggggccggaagaagaagcggatgctggaatcagggctgcccgagatgaatgacccttatgtcctctcccctgaggatgatgatgaccatcagaaagacggcaagacctacaggtgccggatgtgctcactgacattctactccaagtcggagatgcagatccactccaagtcacacaccgagaccaagccccacaagtgcccacattgctccaagaccttcgccaacagctcctacctggcccagcacatccgtatacactcaggggctaagccctacagttgtaacttctgtgagaaatccttccgccagctctcccaccttcagcagcacacccgaatccacactggtgatagaccatacaaatgtgcacacccaggctgtgagaaagccttcacacaactctccaatctgcagtcccacagacggcaacacaacaaagataaacccttcaagtgccacaactgtcatcgggcgtacacggatgcagcctcactagaggtgcacctgtctacgcacacagtgaagcatgccaaggtgtacacctgcactatctgcagtcgggcatacacatcagaaacataccttatgaaacatatgcgcaaacacaacccgcctgatcttcagcaacaggtgcaggcagcagcagcagcggcagcagtggcccaggcccaggctcaagctcaagcccaggctcaggctcaggctcaagcccaggcccaggcccaggcctcccaggcatcacagcagcagcagcagcagcagcagcagcagcagcagcagcagcaacagccaccaccacacttccagtctcctggggcagccccccagggtgggggtggtggggacagcaatcccaaccctccaccccagtgttcctttgacctgaccccgtataagacggcggagcatcataaggacatctgcctcactgtcaccaccagcaccatccaggtggagcacctggccagctcttagtaatgaactagtccgtaacttgaaagtatttcgatttcttggctttatatatcttgtggaaaggacgaagacgtaactcactgagatcattc

SEQ ID NO: 978 - DNA, 1835 bp, Homo sapiens
  source 1..1835: mol_type = genomic DNA
accgccaccatggaagaatctcacttcaattctaacccgtacttctggccttctatccccacagtctcaggtcagatcgagaacacaatgttcatcaacaagatgaaggatcagctgttgccagagaagggctgtggtctggccccacctcactaccccaccttgctgacagtgcctgcctcagtgtccctgccctcaggcatcagtatggacacagagtccaagtcagaccagctgaccccacacagccaagcgtccgttacccagaatatcacggtggtccctgtgccgtctacaggactgatgactgctggagtctcctgttctcagaggtggagaagagaagggagtcaatcaaggggtccgggtttggtaatcacgtccccctcaggctctcttgtgaccacagcatcatcagctcagaccttccccatttcggctcccatgattgtctcagctcttccccctggctcacaagccctgcaggttgtccctgacctctccaagaaggtagcatcgaccctaaccgaggaaggaggcggaggtggtggtggaggtggcagtgtggctcctaagccaccccggggccggaagaagaagcggatgctggaatcagggctgcccgagatgaatgacccttatgtcctctcccctgaggatgatgatgaccatcagaaagacggcaagacctacaggtgccggatgtgctcactgacattctactccaagtcggagatgcagatccactccaagtcacacaccgagaccaagccccacaagtgcccacattgctccaagaccttcgccaacagctcctacctggcccagcacatccgtatacactcaggggctaagccctacagttgtaacttctgtgagaaatccttccgccagctctcccaccttcagcagcacacccggatccactccaagatgcacacggagaccatcaagccccacaagtgcccgcactgctccaagaccttcgccaacacctcctacctggcccagcacctccgtatccactcgggggccaagccctacaactgttcctactgccagaaggccttccgccagctctcccacctccagcagcacacacgaatccacactggtgatagaccatacaaatgtgcacacccaggctgtgagaaagccttcacacaactctccaatctgcagtcccacagacggcaacacaacaaagataaacccttcaagtgccacaactgtcatcgggcgtacacggatgcagcctcactagaggtgcacctgtctacgcacacagtgaagcatgccaaggtgtacacctgcactatctgcagtcgggcatacacatcagaaacataccttatgaaacatatgcgcaaacacaacccgcctgatcttcagcaacaggtgcaggcagcagcagcagcggcagcagtggcccaggcccaggctcaagctcaagcccaggctcaggctcaggctcaagcccaggcccaggcccaggcctcccaggcatcacagcagcagcagcagcagcagcagcagcagcagcagcagcagcaacagccaccaccacacttccagtctcctggggcagccccccagggtgggggtggtggggacagcaatcccaaccctccaccccagtgttcctttgacctgaccccgtataagacggcggagcatcataaggacatctgcctcactgtcaccaccagcaccatccaggtggagcacctggccagctcttagtaatgaactagtccgtaacttgaaagtatttcgatttcttggctttatatatcttgtggaaaggacgagtctttccagagacagcagctacc

SEQ ID NO: 979 - DNA, 1652 bp, Homo sapiens
  source 1..1652: mol_type = genomic DNA
accgccaccatggaagaatctcacttcaattctaacccgtacttctggccttctatccccacagtctcaggtcagatcgagaacacaatgttcatcaacaagatgaaggatcagctgttgccagagaagggctgtggtctggccccacctcactaccccaccttgctgacagtgcctgcctcagtgtccctgccctcaggcatcagtatggacacagagtccaagtcagaccagctgaccccacacagccaagcgtccgttacccagaatatcacggtggtccctgtgccgtctacaggactgatgactgctggagtctcctgttctcagaggtggagaagagaagggagtcaatcaaggggtccgggtttggtaatcacgtccccctcaggctctcttgtgaccacagcatcatcagctcagaccttccccatttcggctcccatgattgtctcagctcttccccctggctcacaagccctgcaggttgtccctgacctctccaagaaggtagcatcgaccctaaccgaggaaggaggcggaggtggtggtggaggtggcagtgtggctcctaagccaccccggggccggaagaagaagcggatgctggaatcagggctgcccgagatgaatgacccttatgtcctctcccctgaggatgatgatgaccatcagaaagacggcaagacctacaggtgccggatgtgctcactgacattctactccaagtcggagatgcagatccactccaagtcacacaccgagaccaagccccacaagtgcccacattgctccaagaccttcgccaacagctcctacctggcccagcacatccgtatacactcaggggctaagccctacagttgtaacttctgtgagaaatccttccgccagctctcccaccttcagcagcacacccgaatccacactggtgatagaccatacaaatgtgcacacccaggctgtgagaaagccttcacacaactctccaatctgcagtcccacagacggcaacacaacaaagataaacccttcaagtgccacaactgtcatcgggcgtacacggatgcagcctcactagaggtgcacctgtctacgcacacagtgaagcatgccaaggtgtacacctgcactatctgcagtcgggcatacacatcagaaacataccttatgaaacatatgcgcaaacacaacccgcctgatcttcagcaacaggtgcaggcagcagcagcagcggcagcagtggcccaggcccaggctcaagctcaagcccaggctcaggctcaggctcaagcccaggcccaggcccaggcctcccaggcatcacagcagcagcagcagcagcagcagcagcagcagcagcagcagcaacagccaccaccacacttccagtctcctggggcagccccccagggtgggggtggtggggacagcaatcccaaccctccaccccagtgttcctttgacctgaccccgtataagacggcggagcatcataaggacatctgcctcactgtcaccaccagcaccatccaggtggagcacctggccagctcttagtaatgaactagtccgtaacttgaaagtatttcgatttcttggctttatatatcttgtggaaaggacgaagttcgtgaagagctgggtgtgcg

SEQ ID NO: 980 - DNA, 779 bp, Homo sapiens
  source 1..779: mol_type = genomic DNA
accgccaccatggctgcggggatgtatttggaacattatctggacaacctgaaggctgaaattgacaagttggccactgagtatatgagtagtgcccgcagcctgagctccgaggaaaaattggcccttctcaaacagatccaggaagcctatggcaagtgcaaggaatttggtgacgacaaggtgcagcttgccatgcagacctatgagatggtggacaaacacattcggcggctggacacagacctggcccgttttgaggctgatctcaaggagaaacagattgagtcaagtgactatgacagctcttccagcaaaggcaaaaagaaaggccggactcaaaaggagaagaaagctgctcgtgctcgttccaaagggaaaaactcggatgaagaagcccccaagactgcccagaagaagttaaagctcgtgcgcacaagtcctgagtatgggatgccctcagtgacctttggcagtgtccacccctctgatgtgttggatatgcctgtggatcccaacgaacccacctattgcctttgtcaccaggtctcctatggagagatgattggctgtgacaaccctgattgttccattgagtggttccattttgcctgtgtggggctgacaaccaagcctcgggggaaatggttttgcccacgctgctcccaagaacggaagaagaaatagtaatgaactagtccgtaacttgaaagtatttcgatttcttggctttatatatcttgtggaaaggacgaatgcacagcgttaggatgctttgt

SEQ ID NO: 981 - DNA, 851 bp, Homo sapiens
  source 1..851: mol_type = genomic DNA
accgccaccatggctgcggggatgtatttggaacattatctggacagtattgaaaaccttccctttgaattacagagaaactttcagctcatgagggacctagaccaaagaacagaggacctgaaggctgaaattgacaagttggccactgagtatatgagtagtgcccgcagcctgagctccgaggaaaaattggcccttctcaaacagatccaggaagcctatggcaagtgcaaggaatttggtgacgacaaggtgcagcttgccatgcagacctatgagatggtggacaaacacattcggcggctggacacagacctggcccgttttgaggctgatctcaaggagaaacagattgagtcaagtgactatgacagctcttccagcaaaggcaaaaagaaaggccggactcaaaaggagaagaaagctgctcgtgctcgttccaaagggaaaaactcggatgaagaagcccccaagactgcccagaagaagttaaagctcgtgcgcacaagtcctgagtatgggatgccctcagtgacctttggcagtgtccacccctctgatgtgttggatatgcctgtggatcccaacgaacccacctattgcctttgtcaccaggtctcctatggagagatgattggctgtgacaaccctgattgttccattgagtggttccattttgcctgtgtggggctgacaaccaagcctcgggggaaatggttttgcccacgctgctcccaagaacggaagaagaaatagtaatgaactagtccgtaacttgaaagtatttcgatttcttggctttatatatcttgtggaaaggacgacagggtcacggactacgagtcatc

SEQ ID NO: 982 - DNA, 839 bp, Homo sapiens
  source 1..839: mol_type = genomic DNA
accgccaccatggctgcggggatgtatttggaacattatctggacagtattgaaaaccttccctttgaattacagagaaactttcagctcatgagggacctagaccaaagaacagaggacctgaaggctgaaattgacaagttggccactgagtatatgagtagtgcccgcagcctgagctccgaggaaaaattggcccttctcaaacagatccaggaagcctatggcaagtgcaaggaatttggtgacgacaaggtgcagcttgccatgcagacctatgagatggtggacaaacacattcggcggctggacacagacctggcccgttttgaggctgatctcaaggagaaacagattgagtcaagtgactatgacagctcttccagcaaaggccggactcaaaaggagaagaaagctgctcgtgctcgttccaaagggaaaaactcggatgaagaagcccccaagactgcccagaagaagttaaagctcgtgcgcacaagtcctgagtatgggatgccctcagtgacctttggcagtgtccacccctctgatgtgttggatatgcctgtggatcccaacgaacccacctattgcctttgtcaccaggtctcctatggagagatgattggctgtgacaaccctgattgttccattgagtggttccattttgcctgtgtggggctgacaaccaagcctcgggggaaatggttttgcccacgctgctcccaagaacggaagaagaaatagtaatgaactagtccgtaacttgaaagtatttcgatttcttggctttatatatcttgtggaaaggacgaaacaaattatgcgcttccaccagg

SEQ ID NO: 983 - DNA, 848 bp, Homo sapiens
  source 1..848: mol_type = genomic DNA
accgccaccatggctgcggggatgtatttggaacattatctggacagtattgaaaaccttccctttgaattacagagaaactttcagctcatgagggacctagaccaaagaacagaggacctgaaggctgaaattgacaagttggccactgagtatatgagtagtgcccgcagcctgagctccgaggaaaaattggcccttctcaaacagatccaggaagcctatggcaagtgcaaggaatttggtgacgacaaggtgcagcttgccatgcagacctatgagatggtggacaaacacattcggcggctggacacagacctggcccgttttgaggctgatctcaaggagaaacagattgagtcaagtgactatgacagctcttccagcaaaggcaaaaagagccggactcaaaaggagaagaaagctgctcgtgctcgttccaaagggaaaaactcggatgaagaagcccccaagactgcccagaagaagttaaagctcgtgcgcacaagtcctgagtatgggatgccctcagtgacctttggcagtgtccacccctctgatgtgttggatatgcctgtggatcccaacgaacccacctattgcctttgtcaccaggtctcctatggagagatgattggctgtgacaaccctgattgttccattgagtggttccattttgcctgtgtggggctgacaaccaagcctcgggggaaatggttttgcccacgctgctcccaagaacggaagaagaaatagtaatgaactagtccgtaacttgaaagtatttcgatttcttggctttatatatcttgtggaaaggacgaaataattatatgaatcgctgaatg

SEQ ID NO: 984 - DNA, 641 bp, Homo sapiens
  source 1..641: mol_type = genomic DNA
accgccaccatggctgcggggatgtatttggaacattatctggacagtattgaaaaccttccctttgaattacagagaaactttcagctcatgagggacctagaccaaagaacagaggacctgaaggctgaaattgacaagttggccactgagtatatgagtagtgcccgcagcctgagctccgaggaaaaattggcccttctcaaacagatccaggaagcctatggcaagtgcaaggaatttggtgacgacaaggtgcagcttgccatgcagacctatgagatggtggacaaacacattcggcggctggacacagacctggcccgttttgaggctgatctcaaggagaaacagattgagtcaagtgactatgacagctcttccagcaaaggcaaaaagaaaggccggactcaaaaggagaagaaagctgctcgtgctcgttccaaagggaaaaactcggatgaagaagcccccaagactgcccagaagaagttaaagctcgtgcgcactgttccattgagtggttccattttgcctgtgtggggctagtaatgaactagtccgtaacttgaaagtatttcgatttcttggctttatatatcttgtggaaaggacgaggttagttactttgatttcgagct

SEQ ID NO: 985 - DNA, 842 bp, Homo sapiens
  source 1..842: mol_type = genomic DNA
accgccaccatggctgcggggatgtatttggaacattatctggacagtattgaaaaccttccctttgaattacagagaaactttcagctcatgagggacctagaccaaagaacagaggacctgaaggctgaaattgacaagttggccactgagtatatgagtagtgcccgcagcctgagctccgaggaaaaattggcccttctcaaacagatccaggaagcctatggcaagtgcaaggaatttggtgacgacaaggtgcagcttgccatgcagacctatgagatggtggacaaacacattcggcggctggacacagacctggcccgttttgaggctgatctcaaggagaaacagattgagtcaagtgactatgacagctcttccagcaaagaaggccggactcaaaaggagaagaaagctgctcgtgctcgttccaaagggaaaaactcggatgaagaagcccccaagactgcccagaagaagttaaagctcgtgcgcacaagtcctgagtatgggatgccctcagtgacctttggcagtgtccacccctctgatgtgttggatatgcctgtggatcccaacgaacccacctattgcctttgtcaccaggtctcctatggagagatgattggctgtgacaaccctgattgttccattgagtggttccattttgcctgtgtggggctgacaaccaagcctcgggggaaatggttttgcccacgctgctcccaagaacggaagaagaaatagtaatgaactagtccgtaacttgaaagtatttcgatttcttggctttatatatcttgtggaaaggacgataaaggtcgatctttagttagtgg

SEQ ID NO: 986 - DNA, 1529 bp, Homo sapiens
  source 1..1529: mol_type = genomic DNA
accgccaccatggctgagggatcagtgatgttcagtgatgtgtccatagacttctctcaggaggagtgggactgcctggaccctgttcagagggacttatacagagatgtgatgttggagaactacggcaatctggtttcaatgggactttacactcctaagcctcaagtgatctccttattggaacaagggaaagagccctggatggttggcagagagcttacaagaggcctgtgttcagatctggaatcgatgtgtgaaaccaagttattatctctaaagaaggaagtttatgaaatagaattatgccagagggagataatgggacttacaaagcatggccttgagtactccagttttggagatgttttggaatatagaagccaccttgcaaaacaactgggatatccaaatgggcattttagtcaagaaatattcactcctgaatacatgcccacatttattcaacagacattccttactctccatcaaataattaataatgaagacagaccctatgaatgtaagaaatgtggaaaggcctttagtcagaactcacaatttattcaacatcagagaattcatattggtgaaaaatcttatgaatgtaaagagtgtgggaaattctttagttgtggttcacatgttactcggcatctgaaaattcatactggcgaaaaaccctttgaatgtaaggaatgtggaaaggccttcagttgtagctcatacctttctcaacatcagagaatccataccggtaagaaaccctatgaatgtaaggaatgtgggaaggcctttagttattgctcaaatcttattgaccatcagcgaattcacactggtgaaaaaccttatgaatgtaaagtatgtgggaaagcctttactaagagctcacaactttttcagcatgcacgaattcatacaggtgagaaaccctatgaatgtaaggaatgtggcaaagcctttacccagagctcaaagcttgttcaacatcagagaattcatactggtgagaaaccctatgagtgcaaggaatgtggcaaagcctttagtagtggctcagcacttactaatcatcagagaattcacactggtgagaaaccctatgattgtaaggaatgtggaaaggcttttactcagagctcacagcttcgtcaacatcagagaattcacgctggtgagaaaccctttgaatgtcttgaatgtgggaaggcctttactcagaactcacaacttttccagcatcagagaattcatacagatgaaaaaccatatgaatgtaatgaatgtggaaaggcctttaataaatgctcaaaccttactcgacatctgagaattcacactggtgaaaagccctataactgtaaggaatgtgggaaggcttttagtagtggctcggatctcattcgtcatcagggaattcatactaataaatagtaatgaactagtccgtaacttgaaagtatttcgatttcttggctttatatatcttgtggaaaggacgaggtggaataaatgagggtcttgtt

SEQ ID NO: 987 - DNA, 809 bp, Homo sapiens
  source 1..809: mol_type = genomic DNA
accgccaccatggagatcctgaaggagctagacgagtgctacgagcgcttcagtcgcgagacagacggggcgcagaagcggcggatgctgcactgtgtgcagcgcgcgctgatccgcagccaggagctgggcgacgagaagatccagatcgtgagccagatggtggagctggtggagaaccgcacgcggcaggtggacagccacgtggagctgttcgaggcgcagcaggagctgggcgacacagcgggcaacagcggcaaggctggcgcggacaggcccaaaggcgaggcggcagcgcaggctgacaagcccaacagcaagcgctcacggcggcagcgcaacaacgagaaccgtgagaacgcgtccagcaaccacgaccacgacgacggcgcctcgggcacacccaaggagaagaaggccaagacctccaagaagaagaagcgctccaaggccaaggcggagcgagaggcgtcccctgccgacctccccatcgaccccaacgaacccacgtactgtctgtgcaaccaggtctcctatggggagatgatcggctgcgacaacgacgagtgccccatcgagtggttccacttctcgtgcgtggggctcaatcataaacccaagggcaagtggtactgtcccaagtgccggggggagaacgagaagaccatggacaaagccctggagaaatccaaaaaagagagggcttacaacaggtagtaatgaactagtccgtaacttgaaagtatttcgatttcttggctttatatatcttgtggaaaggacgatgaaccaaacgtagaagccatgtg

SEQ ID NO: 988 - DNA, 1370 bp, Homo sapiens
  source 1..1370: mol_type = genomic DNA
accgccaccatgtccttcgtggaatgtccttatcattcccctgcggaacgattggtcgctgaggcggatgaaggcgggcctagcgcaataactggtatgggtctgtgtttccgctgtcttcttttttctttttcggggaggagcggggtggagggtggacgagttgatttgaacgtcttcgggtcgctcggcctccagccttggattggttcttctcgctgctggggcgggccgtgctcttccgccctgcggtgtggttggttctcctcctggcctccgccctccaaatcggcgattcccataggcggcggctctcggggtgcggggcgagtctcccgctggcctcctccccattggctggaggcctggcgggtgtcgccccggcccctctccccgctcagcccggccactttcgggcgcggatttatagcagtagcagtgatcccgggcctgtgggctcggggccggggctgcagttcggaccgcctcccgcgacccgcggggccggctcggagacagtttcaggccgcatctctgctgacccgagggtggggccgcgcgtggccgtggaaacagatcctgaaggagctagacgagtgctacgagcgcttcagtcgcgagacagacggggcgcagaagcggcggatgctgcactgtgtgcagcgcgcgctgatccgcagccaggagctgggcgacgagaagatccagatcgtgagccagatggtggagctggtggagaaccgcacgcggcaggtggacagccacgtggagctgttcgaggcgcagcaggagctgggcgacacagcgggcaacagcggcaaggctggcgcggacaggcccaaaggcgaggcggcagcgcaggctgacaagcccaacagcaagcgctcacggcggcagcgcaacaacgagaaccgtgagaacgcgtccagcaaccacgaccacgacgacggcgcctcgggcacacccaaggagaagaaggccaagacctccaagaagaagaagcgctccaaggccaaggcggagcgagaggcgtcccctgccgacctccccatcgaccccaacgaacccacgtactgtctgtgcaaccaggtctcctatggggagatgatcggctgcgacaacgacgagtgccccatcgagtggttccacttctcgtgcgtggggctcaatcataaacccaagggcaagtggtactgtcccaagtgccggggggagaacgagaagaccatggacaaagccctggagaaatccaaaaaagagagggcttacaacaggtagtaatgaactagtccgtaacttgaaagtatttcgatttcttggctttatatatcttgtggaaaggacgagaactacagcataccaaatccctt

SEQ ID NO: 989 - DNA, 734 bp, Homo sapiens
  source 1..734: mol_type = genomic DNA
accgccaccatgctgcactgtgtgcagcgcgcgctgatccgcagccaggagctgggcgacgagaagatccagatcgtgagccagatggtggagctggtggagaaccgcacgcggcaggtggacagccacgtggagctgttcgaggcgcagcaggagctgggcgacacagcgggcaacagcggcaaggctggcgcggacaggcccaaaggcgaggcggcagcgcaggctgacaagcccaacagcaagcgctcacggcggcagcgcaacaacgagaaccgtgagaacgcgtccagcaaccacgaccacgacgacggcgcctcgggcacacccaaggagaagaaggccaagacctccaagaagaagaagcgctccaaggccaaggcggagcgagaggcgtcccctgccgacctccccatcgaccccaacgaacccacgtactgtctgtgcaaccaggtctcctatggggagatgatcggctgcgacaacgacgagtgccccatcgagtggttccacttctcgtgcgtggggctcaatcataaacccaagggcaagtggtactgtcccaagtgccggggggagaacgagaagaccatggacaaagccctggagaaatccaaaaaagagagggcttacaacaggtagtaatgaactagtccgtaacttgaaagtatttcgatttcttggctttatatatcttgtggaaaggacgagagaagataggatatttaaccggt

SEQ ID NO: 990 - DNA, 1751 bp, Homo sapiens
  source 1..1751: mol_type = genomic DNA
accgccaccatgtctcagggatcagtgtcattcaaggatgtgactgtggacttcacccaggaggagtggcagcaactagaccctgctcagaaggcgctttacagggatgtgatgttggaaaactattgccacttcgtatctgtggggtttcacatggctaagcctgatatgatccgcaagttggaacaaggagaagagctatggacacagagaatttttccaagttacagctacctagaagaagatgggaaaactgaagatgtcttagtgaagttcaaagaataccaagacaggcattctagacccctcatattcatcaaccacaaaaaactaattaaggagagaagtaatatttatggtaaaacatttactctaggcaagaaccgtatttcaaaaacaatactatgtgaatataaacctgatggaaaagttttgaaaaatatttcagaactagtcattagaaatataagccccataaaagagaagtttggtgacagtactggatgggagaaatcactcctcaataccaagcatgagaaaattcatcctgcagtgaatctccataaacaaacagaaagagttctcagtggtaaacaggagcttattcagcatcagaaggttcaagctccagagcaaccatttgaccataatgaatgtgaaaaatccttcctgatgaaaggaatgctatttacacatactagagctcacagaggagaaagaacctttgaatacaataaagatggaattgccttcatagaaaagtcaagcctcagtgtccatccaagtaatcttatggaaaagaagccctctgcctacaacaaatatgggaaattcctctgcagaaagcctgtttttattatgcctcagagacctcaaacagaagagaaaccctttcactgtccttactgtgggaataactttagaaggaagtcatacctcattgaacatcagcgaattcacacaggtgaaaaaccttatgtttgcaatcaatgtggaaaggccttccgtcagaagacagccctcacccttcatgagaaaacacatatagaggggaaaccctttatttgtatcgattgtgggaagtccttccgccagaaggccaccctcactagacatcacaaaacacatacgggggagaaagcctatgaatgtcctcagtgtggaagtgcctttaggaagaagtcatacctcattgatcaccagagaactcacacaggagagaaaccgtatcagtgtaatgagtgtgggaaggcatttatccagaagacaaccctcactgttcatcagagaactcacacaggagagaaaccctatatttgcaatgaatgtgggaagtccttctgccaaaagacaaccctcactctccaccagagaattcacacgggggaaaaaccctatatttgtaatgaatgtgggaagtccttccgccagaaggcaatcctcactgttcatcacagaatacatacaggagaaaaatccaatgggtgtcctcagtgtgggaaagccttcagtaggaaatcaaacctcattcgccatcagaaaactcacacaggcgagaaaccatatgaatgtaaacagtgtgggaagttcttcagttgtaagtcaaacctcattgtccatcagaaaactcacaaggtagaaaccacgggaattcagtagtaatgaactagtccgtaacttgaaagtatttcgatttcttggctttatatatcttgtggaaaggacgatcgtaaatgtgatgaggtagcatc

SEQ ID NO: 991 - DNA, 1754 bp, Homo sapiens
  source 1..1754: mol_type = genomic DNA
accgccaccatgcccttacagggatcagtgtcattcaaggatgtgactgtggacttcacccaggaggagtggcagcaactagaccctgctcagaaggcgctttacagggatgtgatgttggaaaactattgccacttcgtatctgtggggtttcacatggctaagcctgatatgatccgcaagttggaacaaggagaagagctatggacacagagaatttttccaagttacagctacctagaagaagatgggaaaactgaagatgtcttagtgaagttcaaagaataccaagacaggcattctagacccctcatattcatcaaccacaaaaaactaattaaggagagaagtaatatttatggtaaaacatttactctaggcaagaaccgtatttcaaaaacaatactatgtgaatataaacctgatggaaaagttttgaaaaatatttcagaactagtcattagaaatataagccccataaaagagaagtttggtgacagtactggatgggagaaatcactcctcaataccaagcatgagaaaattcatcctgcagtgaatctccataaacaaacagaaagagttctcagtggtaaacaggagcttattcagcatcagaaggttcaagctccagagcaaccatttgaccataatgaatgtgaaaaatccttcctgatgaaaggaatgctatttacacatactagagctcacagaggagaaagaacctttgaatacaataaagatggaattgccttcatagaaaagtcaagcctcagtgtccatccaagtaatcttatggaaaagaagccctctgcctacaacaaatatgggaaattcctctgcagaaagcctgtttttattatgcctcagagacctcaaacagaagagaaaccctttcactgtccttactgtgggaataactttagaaggaagtcatacctcattgaacatcagcgaattcacacaggtgaaaaaccttatgtttgcaatcaatgtggaaaggccttccgtcagaagacagccctcacccttcatgagaaaacacatatagaggggaaaccctttatttgtatcgattgtgggaagtccttccgccagaaggccaccctcactagacatcacaaaacacatacgggggagaaagcctatgaatgtcctcagtgtggaagtgcctttaggaagaagtcatacctcattgatcaccagagaactcacacaggagagaaaccgtatcagtgtaatgagtgtgggaaggcatttatccagaagacaaccctcactgttcatcagagaactcacacaggagagaaaccctatatttgcaatgaatgtgggaagtccttctgccaaaagacaaccctcactctccaccagagaattcacacgggggaaaaaccctatatttgtaatgaatgtgggaagtccttccgccagaaggcaatcctcactgttcatcacagaatacatacaggagaaaaatccaatgggtgtcctcagtgtgggaaagccttcagtaggaaatcaaacctcattcgccatcagaaaactcacacaggcgagaaaccatatgaatgtaaacagtgtgggaagttcttcagttgtaagtcaaacctcattgtccatcagaaaactcacaaggtagaaaccacgggaattcagtagtaatgaactagtccgtaacttgaaagtatttcgatttcttggctttatatatcttgtggaaaggacgatcacgattcgtcttctctacacta

SEQ ID NO: 992 - DNA, 1088 bp, Homo sapiens
  source 1..1088: mol_type = genomic DNA
accgccaccatggacgcggtgttgctggagcacttccccgggggcctagacgcctttccttcttcgtacttcgacgaggacgacttcttcaccgaccagtcttcacgggaccccctggaggacggcgatgagctgctggcggacgagcaggccgaggtggagttccttagccaccagctccacgagtactgctaccgcgacggggcgtgcctgctgctgcagcccgcgcccccggccgccccgctagcgctcgccccgccgtcctcggggggcctcggtgagccagacgacggcggcggcggcggctactgctgcgagacgggggcgcccccaggcggcttcccctactcgcccggctcgccgccctcgtgcctggcctacccgtgcgccggggcggcagtactgtctcccggggcgcggctgcgcggcctgagcggagcggcggctgcggcggcgcggcgccggcggcgggtgcgctccgaggcggagctgcagcagctgcggcaggcggccaacgtgcgcgagcggcggcgcatgcagtccatcaacgacgccttcgaggggctgcgctcgcacatccccacgctgccctacgagaagcgcctctccaaggtggacacgctgcgcctggccatcggctacatcaacttcctcagcgagctcgtgcaggccgacctgcccttgcgcggcggtggcgcgggcggctgcggggggccgggcggcggcgggcgcctgggcggggacagcccgggcagccaggcccagaaggtcatcatctgccatcggggcacccggtccccctcccccagcgaccctgattatggcctccctcccctagcaggacactctctctcatggactgatgaaaaacaactcaaggaacaaaatattatccgaacagccaaagtctggaccccagaggaccccagaaaactcaacagcaaatcttccttcaacaacatagaaaacgaaccaccatttgagtttgtgtcctagtaatgaactagtccgtaacttgaaagtatttcgatttcttggctttatatatcttgtggaaaggacgacgtgtccacctgtcactggtatct

SEQ ID NO: 993 - DNA, 1061 bp, Homo sapiens
  source 1..1061: mol_type = genomic DNA
accgccaccatgggcagcgccagcccgggtctgagcagcgtatcccccagccacctcctgctgccccccgacacggtgtcgcggacaggcttggagaaggcggcagcgggggcagtgggtctcgagagacgggactggagtcccagtccacccgccacgcccgagcagggcctgtccgccttctacctctcctactttgacatgctgtaccctgaggacagcagctgggcagccaaggcccctggggccagcagtcgggaggagccacctgaggagcctgagcagtgcccggtcattgacagccaagccccagcgggcagcctggacttggtgcccggcgggctgaccttggaggagcactcgctggagcaggtgcagtccatggtggtgggcgaagtgctcaaggacatcgagacggcctgcaagctgctcaacatcaccgcagatcccatggactggagccccagcaatgtgcagaagtggctcctgtggacagagcaccaataccggctgccccccatgggcaaggccttccaggagctggcgggcaaggagctgtgcgccatgtcggaggagcagttccgccagcgctcgcccctgggtggggatgtgctgcacgcccacctggacatctggaagtcagcctcgaccagtgaggagagctggaccgacagcgaggtggactcatcatgctccgggcagcccatccacctgtggcagttcctcaaggagttgctactcaagccccacagctatggccgcttcattaggtggctcaacaaggagaagggcatcttcaaaattgaggactcagcccaggtggcccggctgtggggcatccgcaagaaccgtcccgccatgaactacgacaagctgagccgctccatccgccagtattacaagaagggcatcatccggaagccagacatctcccagcgcctcgtctaccagttcgtgcaccccatctagtaatgaactagtccgtaacttgaaagtatttcgatttcttggctttatatatcttgtggaaaggacgaaggtttacgtcgcctgtccaggcg

SEQ ID NO: 994 - DNA, 1766 bp, Homo sapiens
  source 1..1766: mol_type = genomic DNA
accgccaccatgacggctccttgctcccagccggcgcagcttcctggacgccgccagctcgggctggtgccgttcccgccgccgccgccgcggacgccgctgctgtggctgctgctgctgctgctggccgccgtggcgccggcgcgcggctgggagagcggagacctggagttgtttgacttagtggaggaggtgcagctcaacttctaccagttcctcggggtgcagcaggatgcatcatctgcagacatcagaaaagcatatcgtaagctttcactaactttacatccagacaagaataaagatgaaaatgcagaaactcagtttagacaattggtggccatttatgaagttttaaaggatgatgaacgaaggcagaggtatgatgatattctgatcaatggacttccagattggcgacagcctgtattctactacaggcgggtgagaaaaatgagcaatgctgagctggcattactcttgttcattattctcacagtgggtcattatgctgtggtttggtcaatctacctggaaaaacaactggatgaactactaagtagaaaaaagagagaaaagaaaaaaaagactggcagcaagagtgtggatgtatcaaaactcggtgcttcagaaaaaaatgaaagattgctgatgaaaccacagtggcatgatttgcttccatgcaaactggggatttggttttgccttacactaaaagcattacctcacctcatccaggatgctgggcagttttatgctaaatataaagaaacaagattgaaggaaaaggaagatgcactgactagaactgaacttgaaacacttcaaaaacagaagaaagttaaaaaaccaaaacctgaatttcctgtatacacacctttagaaactacatatattcagtcttatgatcatggaacttccatagaagaaattgaggaacaaatggatgattggttggaaaacaggaaccgaacacagaaaaaacaggcacctgaatggacagaagaggacctcagccaactgacaagaagtatggttaagttcccaggagggactccaggtcgatgggaaaagattgcccacgaattgggtcgatctgtgacagatgtgacaaccaaagccaagcaactgaaggattcagtgacctgctccccaggaatggttagactctccgaactcaaatcgacagttcagaattccaggcccatcaaaacggccaccaccttgcccgatgacatgatcacccagcgagaggacgcagagggggtggcagcggaggaggagcaggagggagactccggtgagcaggagaccggggccactgatgcccggcctcggaggcggaagccagccaggctgctggaggctacagcgaagccggagccagaggagaagtccagagccaagcggcagaaggactttgacatagcagaacaaaacgagtccagcgacgaggagagcctgagaaaagagagagctcggtctgcagaggagccgtggactcaaaatcaacagaaacttctggaactggcgttgcagcagtacccaaggggatcctctgaccgctgggacaaaatagccagatgtgtcccgtccaagagcaaggaagactgtatcgctaggtacaagttgctggttgaactggtccaaaagaaaaaacaagctaaaagctagtaatgaactagtccgtaacttgaaagtatttcgatttcttggctttatatatcttgtggaaaggacgactgccgaggacaaattacgatggc

SEQ ID NO: 995 - DNA, 1967 bp, Homo sapiens
  source 1..1967: mol_type = genomic DNA
accgccaccatgctgcttctgccaagcgccgcggacggccggggcaccgccatcacccacgctctgacctctgcctctacactctgtcaagttgaacctgtgggaagatggtttgaagcttttgttaagaggagaaacagaaatgcttctgcctcttttcaggaactggaggataagaaagagttatccgaggaatcagaagatgaagaattgcagttggaagagtttcccatgctgaaaacacttgatcccaaagactggaagaaccaagatcattatgcagttcttggacttggccatgtgagatacaaggctacacagagacagatcaaagcagctcataaagcaatggttttaaaacatcacccagacaaacggaaagcagctggtgaaccaataaaagaaggagataatgactacttcacttgcataactaaagcttatgaaatgttatctgatccagtgaaaagacgagcatttaacagtgtagatcctacttttgataactcagttccttctaaaagtgaagcaaaggataatttcttcgaagtgtttaccccagtgtttgaaaggaattccagatggtcaaataaaaaaaatgttcctaaacttggtgatatgaattcatcatttgaagatgtagatatattttattctttctggtataattttgattcttggagagaattttcttatttagatgaagaagaaaaagaaaaagcagaatgtcgtgatgagaggagatggattgaaaagcagaacagagcaacaagagcacaaagaaaaaaagaagaaatgaacagaataagaacattagttgacaatgcatacagctgtgatccaaggataaaaaagttcaaggaagaagaaaaagccaagaaagaagcagaaaagaaagcaaaagcagaagctaaacggaaggagcaagaagctaaagaaaaacaaagacaagctgaattagaagctgctcggttagctaaggagaaagaagaggaggaagtcagacagcaagcattgctggcaaagaaggaaaaagatatccagaaaaaagccattaagaaggaaaggcaaaaacttcgaaactcatgcaagacctggaatcatttttctgataatgaggcagagcgggttaaaatgatggaagaagtggaaaaactttgtgatcggcttgaactggcaagcttacagtgcttgaatgaaacactcacatcatgcacaaaagaagtaggaaaggctgctttggaaaaacagatagaagaaataaatgagcaaatcagaaaagagaaagaggaagctgaggctcgtatgcgacaagcatctaagaacacagagaaatcaactggtggaggtggaaatggaagtaaaaattggtcagaagatgatctacaattactaattaaagctgtgaatctgttccctgctggaacaaattcaagatgggaagttattgctaattacatgaacatacattcttcctctggagtcaaaagaactgccaaagatgttattggcaaagcaaagagtctccaaaaacttgaccctcatcaaaaagatgacataaataaaaaggcatttgataagttcaaaaaagaacatggagtggtacctcaagcagacaacgcaacgccttcagaacgatttgaaggtccatatacagacttcaccccttggacaacagaagaacagaagcttttggaacaagctttgaaaacatacccagtaaatacacctgaaagatgggaaaaaatagcagaagcggtgcctggcaggacaaagaaggactgcatgaaacgatacaaggaacttgtcgagatggtaaaagcaaagaaagctgctcaagaacaagtgctgaatgcaagtagagccaagaaatagtaatgaactagtccgtaacttgaaagtatttcgatttcttggctttatatatcttgtggaaaggacgattgcgattgacagcatcaatgaca

SEQ ID NO: 996 - DNA, 1808 bp, Homo sapiens
  source 1..1808: mol_type = genomic DNA
accgccaccatgctgcttctgccaagcgccgcggacggccggggcaccgccatcacccacgctctgacctctgcctctacactctgtcaagttgaacctgtgggaagatggtttgaagcttttgttaagaggagaaacagaaatgcttctgcctcttttcaggaactggaggataagaaagagttatccgaggaatcagaagatgaagaattgcagttggaagagtttcccatgctgaaaacacttgatcccaaagactggaagaaccaagatcattatgcagttcttggacttggccatgtgagatacaaggctacacagagacagatcaaagcagctcataaagcaatggttttaaaacatcacccagacaaacggaaagcagctggtgaaccaataaaagaaggagataatgactacttcacttgcataactaaagcttatgaaatgttatctgatccagtgaaaagacgagcatttaacagtgtagatcctacttttgataactcagttccttctaaaagtgaagcaaaggataatttcttcgaagtgtttaccccagtgtttgaaaggaattccagatggtcaaataaaaaaaatgttcctaaacttggtgatatgaattcatcatttgaagatgtagatatattttattctttctggtataattttgattcttggagagaattttcttatttagatgaagaagaaaaagaaaaagcagaatgtcgtgatgagaggagatggattgaaaagcagaacagagcaacaagagcacaaagaaaaaaagaagaaatgaacagaataagaacattagttgacaatgcatacagctgtgatccaaggataaaaaagttcaaggaagaagaaaaagccaagaaagaagcagaaaagaaagcaaaagcagaagctaaacggaaggagcaagaagctaaagaaaaacaaagacaagctgaattagaagctgctcggttagctaaggagaaagaagaggaggaagtcagacagcaagcattgctggcaaagaaggaaaaagatatccagaaaaaagccattaagaaggaaaggcaaaaacttcgaaactcatgcaagatagaagaaataaatgagcaaatcagaaaagagaaagaggaagctgaggctcgtatgcgacaagcatctaagaacacagagaaatcaactggtggaggtggaaatggaagtaaaaattggtcagaagatgatctacaattactaattaaagctgtgaatctgttccctgctggaacaaattcaagatgggaagttattgctaattacatgaacatacattcttcctctggagtcaaaagaactgccaaagatgttattggcaaagcaaagagtctccaaaaacttgaccctcatcaaaaagatgacataaataaaaaggcatttgataagttcaaaaaagaacatggagtggtacctcaagcagacaacgcaacgccttcagaacgatttgaaggtccatatacagacttcaccccttggacaacagaagaacagaagcttttggaacaagctttgaaaacatacccagtaaatacacctgaaagatgggaaaaaatagcagaagcggtgcctggcaggacaaagaaggactgcatgaaacgatacaaggaacttgtcgagatggtaaaagcaaagaaagctgctcaagaacaagtgctgaatgcaagtagagccaagaaatagtaatgaactagtccgtaacttgaaagtatttcgatttcttggctttatatatcttgtggaaaggacgacaagttctcgcatgttaactccgt

SEQ ID NO: 997 - DNA, 2345 bp, Homo sapiens
  source 1..2345: mol_type = genomic DNA
accgccaccatgggtcgctccaattctagatcacattcttcaaggtcaaagtctagatcacagtctagttctcgatcaagatcaagatctcattctagaaagaagcgatacagttctaggtctcgttccagaacatattcaaggtctcgtagtagagatcgtatgtattctagagattatcgtcgcgattacagaaataatagaggaatgagacgaccttatgggtacagaggaaggggtagagggtattatcaaggaggaggaggtagatatcatcgaggtggttatagacctgtctggaatagaaggcactctaggagtcctagacgaggtcgttcacgttccaggagtccaaaaagaagatccgtttcttctcaaagatccagaagcagatctcgccggtcatatagatcttctaggtctccaagatcatcctcttctcgttcttcatccccatatagcaaatctcctgtttctaaaagacgagggtctcaggaaaaacaaaccaaaaaagctgaaggggaaccccaagaagagagtccgttgaaaagtaaatcacaggaggaaccgaaagatacatttgaacatgacccatctgagtctatcgatgaatttaataagtcatcagccacatccggtgatatttggcctggcctttcagcttatgataatagtcctagatcaccccatagtccttcacctattgctacaccacctagtcagagttcatcttgctctgatgctcccatgctcagtacagttcactctgcaaaaaatactccttctcagcattcacattccattcagcatagtcctgaaaggtctgggtctggttctgttggaaatggatctagtcgatacagtccttctcagaatagtccaattcatcacatcccttcacgaagaagtcctgcaaagacaatcgcaccacagaatgctccaagagatgagtctaggggccgttcctcgttttatcctgatggtggagatcaggaaactgcaaagactgggaagttcttaaaaagtccccctctacacaagaatctggatgcacgagaaaagtctaccttcagagaggaaagcccacttaggatcaaaatgatagcgagtgattctcaccgtcctgaagtcaaactcaaaatggcacctgttcctcttgatgattctaacagacctgcttccttgactaaagacaggctgcttgctagtacacttgtccattctgtcaagaaggagcaagaattccgatccatctttgaccacattaagttgccacaggccagcaaaagcacttcagagtcatttattcaacacattgtgtccttggttcatcatgttaaagagcaatacttcaagtcagctgcaatgaccctaaacgagcggttcacttcgtatcagaaagccactgaagaacatagtactcggcaaaagagccctgaaatacacaggagaattgacatctcaccaagtaccctgaggaagcatacccgtttagcaggggaagagagagtttttaaagaagaaaatcaaaagggagataaaaaattaaggtgtgactctgctgaccttcggcatgacattgatcgccgtagaaaagaaagaagtaaagaacggggagattccaagggctccagggaatccagtggatcaagaaagcaggaaaaaactccaaaagattacaaggaatacaaatcttacaaagatgacagtaaacataaaagagagcaagatcattctcgatcttcatcctcttcagcatcaccttcttctcccagttctcgagaagaaaaggagagtaagaaggaaagagaagaagaatttaaaactcaccatgaaatgaaagaatactcaggctttgcaggagttagccgaccacgaggaaccttttttcgaattagaggcagaggaagagccagaggagtttttgctgggacaaatactggtccaaacaactcaaatactacttttcaaaagagaccgaaggaagaggaatgggatccagaatataccccaaagagcaagaagtacttcttgcatgacgacagagatgatggtgtggattattgggccaaaagaggaagaggtcgtggtacttttcaacgtggcagagggcgctttaacttcaaaaaatcaggtagcagtcctaaatggactcatgacaaataccaaggggatgggattgttgaagatgaagaagagaccatggaaaataatgaagaaaagaaggacagacgcaaggaagaaaaggaatagtaatgaactagtccgtaacttgaaagtatttcgatttcttggctttatatatcttgtggaaaggacgatcgatttaggtgtgactagcagat

SEQ ID NO: 998 - DNA, 2711 bp, Homo sapiens
  source 1..2711: mol_type = genomic DNA
accgccaccatgggtcgctccaattctagatcacattcttcaaggtcaaagtctagatcacagtctagttctcgatcaagatcaagatctcattctagaaagaagcgatacaggtctcgttccagaacatattcaaggtctcgtagtagagatcgtatgtattctagagattatcgtcgcgattacagaaataatagaggaatgagacgaccttatgggtacagaggaaggggtagagggtattatcaaggaggaggaggtagatatcatcgaggtggttatagacctgtctggaatagaaggcactctaggagtcctagacgaggtcgttcacgttccaggagtccaaaaagaagatccgtttcttctcaaagatccagaagcagatctcgccggtcatatagatcttctaggtctccaagatcatcctcttctcgttcttcatccccatatagcaaatctcctgtttctaaaagacgagggtctcaggaaaaacaaaccaaaaaagctgaaggggaaccccaagaagagagtccgttgaaaagtaaatcacaggaggaaccgaaagatacatttgaacatgacccatctgagtctatcgatgaatttaataagtcatcagccacatccggtgatatttggcctggcctttcagcttatgataatagtcctagatcaccccatagtccttcacctattgctacaccacctagtcagagttcatcttgctctgatgctcccatgctcagtacagttcactctgcaaaaaatactccttctcagcattcacattccattcagcatagtcctgaaaggtctgggtctggttctgttggaaatggatctagtcgatacagtccttctcagaatagtccaattcatcacatcccttcacgaagaagtcctgcaaagacaatcgcaccacagaatgctccaagagatgagtctaggggccgttcctcgttttatcctgatggtggagatcaggaaactgcaaagactgggaagttcttaaaaaggttcacagatgaagagtctagagtattcctgcttgataggggtaataccagggataaagaggcttcaaaagagaaaggatcagagaaagggagggcagagggagaatgggaagatcaggaagctctagattacttcagtgataaagagtctggaaaacaaaagtttaatgattcagaaggggatgacacagaggagacagaggattatagacagttcaggaagtcagtcctcgcagatcagggtaaaagttttgctactgcatctcaccggaatactgaggaggaaggactcaagtacaagtccaaagtttcactgaaaggcaatagagaaagtgatggatttagagaagaaaaaaattataaacttaaagagactggatatgtagtggaaaggcctagcactacaaaagataagcacaaagaagaagacaaaaattctgaaagaataacagtaaagaaagaaactcagtcacctgagcaggtaaagtctgaaaagctcaaagacctctttgattacagtccccctctacacaagaatctggatgcacgagaaaagtctaccttcagagaggaaagcccacttaggatcaaaatgatagcgagtgattctcaccgtcctgaagtcaaactcaaaatggcacctgttcctcttgatgattctaacagacctgcttccttgactaaagacaggctgcttgctagtacacttgtccattctgtcaagaaggagcaagaattccgatccatctttgaccacattaagttgccacaggccagcaaaagcacttcagagtcatttattcaacacattgtgtccttggttcatcatgttaaagagcaatacttcaagtcagctgcaatgaccctaaacgagcggttcacttcgtatcagaaagccactgaagaacatagtactcggcaaaagagccctgaaatacacaggagaattgacatctcaccaagtaccctgaggaagcatacccgtttagcaggggaagagagagtttttaaagaagaaaatcaaaagggagataaaaaattaaggtgtgactctgctgaccttcggcatgacattgatcgccgtagaaaagaaagaagtaaagaacggggagattccaagggctccagggaatccagtggatcaagaaagcaggaaaaaactccaaaagattacaaggaatacaaatcttacaaagatgacagtaaacataaaagagagcaagatcattctcgatcttcatcctcttcagcatcaccttcttctcccagttctcgagaagaaaaggagagtaagaaggaaagagaagaagaatttaaaactcaccatgaaatgaaagaatactcaggctttgcaggagttagccgaccacgaggaacctttcatgacgacagagatgatggtgtggattattgggccaaaagaggaagaggtcgtggtacttttcaacgtggcagagggcgctttaacttcaaaaaatcaggtagcagtcctaaatggactcatgacaaataccaaggggatgggattgttgaagatgaagaagagaccatggaaaataatgaagaaaagaaggacagacgcaaggaagaaaaggaatagtaatgaactagtccgtaacttgaaagtatttcgatttcttggctttatatatcttgtggaaaggacgaatcatagcgacaggatctggttag

SEQ ID NO: 999 - DNA, 2858 bp, Homo sapiens
  source 1..2858: mol_type = genomic DNA
accgccaccatgggtcgctccaattctagatcacattcttcaaggtcaaagtctagatcacagtctagttctcgatcaagatcaagatctcattctagaaagaagcgatacaggtctcgttccagaacatattcaaggtctcgtagtagagatcgtatgtattctagagattatcgtcgcgattacagaaataatagaggaatgagacgaccttatgggtacagaggaaggggtagagggtattatcaaggaggaggaggtagatatcatcgaggtggttatagacctgtctggaatagaaggcactctaggagtcctagacgaggtcgttcacgttccaggagtccaaaaagaagatccgtttcttctcaaagatccagaagcagatctcgccggtcatatagatcttctaggtctccaagatcatcctcttctcgttcttcatccccatatagcaaatctcctgtttctaaaagacgagggtctcaggaaaaacaaaccaaaaaagctgaaggggaaccccaagaagagagtccgttgaaaagtaaatcacaggaggaaccgaaagatacatttgaacatgacccatctgagtctatcgatgaatttaataagtcatcagccacatccggtgatatttggcctggcctttcagcttatgataatagtcctagatcaccccatagtccttcacctattgctacaccacctagtcagagttcatcttgctctgatgctcccatgctcagtacagttcactctgcaaaaaatactccttctcagcattcacattccattcagcatagtcctgaaaggtctgggtctggttctgttggaaatggatctagtcgatacagtccttctcagaatagtccaattcatcacatcccttcacgaagaagtcctgcaaagacaatcgcaccacagaatgctccaagagatgagtctaggggccgttcctcgttttatcctgatggtggagatcaggaaactgcaaagactgggaagttcttaaaaaggttcacagatgaagagtctagagtattcctgcttgataggggtaataccagggataaagaggcttcaaaagagaaaggatcagagaaagggagggcagagggagaatgggaagatcaggaagctctagattacttcagtgataaagagtctggaaaacaaaagtttaatgattcagaaggggatgacacagaggagacagaggattatagacagttcaggaagtcagtcctcgcagatcagggtaaaagttttgctactgcatctcaccggaatactgaggaggaaggactcaagtacaagtccaaagtttcactgaaaggcaatagagaaagtgatggatttagagaagaaaaaaattataaacttaaagagactggatatgtagtggaaaggcctagcactacaaaagataagcacaaagaagaagacaaaaattctgaaagaataacagtaaagaaagaaactcagtcacctgagcaggtaaagtctgaaaagctcaaagacctctttgattacagtccccctctacacaagaatctggatgcacgagaaaagtctaccttcagagaggaaagcccacttaggatcaaaatgatagcgagtgattctcaccgtcctgaagtcaaactcaaaatggcacctgttcctcttgatgattctaacagacctgcttccttgactaaagacaggctgcttgctagtacacttgtccattctgtcaagaaggagcaagaattccgatccatctttgaccacattaagttgccacaggccagcaaaagcacttcagagtcatttattcaacacattgtgtccttggttcatcatgttaaagagcaatacttcaagtcagctgcaatgaccctaaacgagcggttcacttcgtatcagaaagccactgaagaacatagtactcggcaaaagagccctgaaatacacaggagaattgacatctcaccaagtaccctgaggaagcatacccgtttagcaggggaagagagagtttttaaagaagaaaatcaaaagggagataaaaaattaaggtgtgactctgctgaccttcggcatgacattgatcgccgtagaaaagaaagaagtaaagaacggggagattccaagggctccagggaatccagtggatcaagaaagcaggaaaaaactccaaaagattacaaggaatacaaatcttacaaagatgacagtaaacataaaagagagcaagatcattctcgatcttcatcctcttcagcatcaccttcttctcccagttctcgagaagaaaaggagagtaagaaggaaagagaagaagaatttaaaactcaccatgaaatgaaagaatactcaggctttgcaggagttagccgaccacgaggaaccttttttcgaattagaggcagaggaagagccagaggagtttttgctgggacaaatactggtccaaacaactcaaatactacttttcaaaagagaccgaaggaagaggaatgggatccagaatataccccaaagagcaagaagtacttcttgcatgacgacagagatgatggtgtggattattgggccaaaagaggaagaggtcgtggtacttttcaacgtggcagagggcgctttaacttcaaaaaatcaggtagcagtcctaaatggactcatgacaaataccaaggggatgggattgttgaagatgaagaagagaccatggaaaataatgaagaaaagaaggacagacgcaaggaagaaaaggaatagtaatgaactagtccgtaacttgaaagtatttcgatttcttggctttatatatcttgtggaaaggacgatttaccgacggatgattgaagtta

SEQ ID NO: 1000 - DNA, 2864 bp, Homo sapiens
  source 1..2864: mol_type = genomic DNA
accgccaccatgggtcgctccaattctagatcacattcttcaaggtcaaagtctagatcacagtctagttctcgatcaagatcaagatctcattctagaaagaagcgatacagttctaggtctcgttccagaacatattcaaggtctcgtagtagagatcgtatgtattctagagattatcgtcgcgattacagaaataatagaggaatgagacgaccttatgggtacagaggaaggggtagagggtattatcaaggaggaggaggtagatatcatcgaggtggttatagacctgtctggaatagaaggcactctaggagtcctagacgaggtcgttcacgttccaggagtccaaaaagaagatccgtttcttctcaaagatccagaagcagatctcgccggtcatatagatcttctaggtctccaagatcatcctcttctcgttcttcatccccatatagcaaatctcctgtttctaaaagacgagggtctcaggaaaaacaaaccaaaaaagctgaaggggaaccccaagaagagagtccgttgaaaagtaaatcacaggaggaaccgaaagatacatttgaacatgacccatctgagtctatcgatgaatttaataagtcatcagccacatccggtgatatttggcctggcctttcagcttatgataatagtcctagatcaccccatagtccttcacctattgctacaccacctagtcagagttcatcttgctctgatgctcccatgctcagtacagttcactctgcaaaaaatactccttctcagcattcacattccattcagcatagtcctgaaaggtctgggtctggttctgttggaaatggatctagtcgatacagtccttctcagaatagtccaattcatcacatcccttcacgaagaagtcctgcaaagacaatcgcaccacagaatgctccaagagatgagtctaggggccgttcctcgttttatcctgatggtggagatcaggaaactgcaaagactgggaagttcttaaaaaggttcacagatgaagagtctagagtattcctgcttgataggggtaataccagggataaagaggcttcaaaagagaaaggatcagagaaagggagggcagagggagaatgggaagatcaggaagctctagattacttcagtgataaagagtctggaaaacaaaagtttaatgattcagaaggggatgacacagaggagacagaggattatagacagttcaggaagtcagtcctcgcagatcagggtaaaagttttgctactgcatctcaccggaatactgaggaggaaggactcaagtacaagtccaaagtttcactgaaaggcaatagagaaagtgatggatttagagaagaaaaaaattataaacttaaagagactggatatgtagtggaaaggcctagcactacaaaagataagcacaaagaagaagacaaaaattctgaaagaataacagtaaagaaagaaactcagtcacctgagcaggtaaagtctgaaaagctcaaagacctctttgattacagtccccctctacacaagaatctggatgcacgagaaaagtctaccttcagagaggaaagcccacttaggatcaaaatgatagcgagtgattctcaccgtcctgaagtcaaactcaaaatggcacctgttcctcttgatgattctaacagacctgcttccttgactaaagacaggctgcttgctagtacacttgtccattctgtcaagaaggagcaagaattccgatccatctttgaccacattaagttgccacaggccagcaaaagcacttcagagtcatttattcaacacattgtgtccttggttcatcatgttaaagagcaatacttcaagtcagctgcaatgaccctaaacgagcggttcacttcgtatcagaaagccactgaagaacatagtactcggcaaaagagccctgaaatacacaggagaattgacatctcaccaagtaccctgaggaagcatacccgtttagcaggggaagagagagtttttaaagaagaaaatcaaaagggagataaaaaattaaggtgtgactctgctgaccttcggcatgacattgatcgccgtagaaaagaaagaagtaaagaacggggagattccaagggctccagggaatccagtggatcaagaaagcaggaaaaaactccaaaagattacaaggaatacaaatcttacaaagatgacagtaaacataaaagagagcaagatcattctcgatcttcatcctcttcagcatcaccttcttctcccagttctcgagaagaaaaggagagtaagaaggaaagagaagaagaatttaaaactcaccatgaaatgaaagaatactcaggctttgcaggagttagccgaccacgaggaaccttttttcgaattagaggcagaggaagagccagaggagtttttgctgggacaaatactggtccaaacaactcaaatactacttttcaaaagagaccgaaggaagaggaatgggatccagaatataccccaaagagcaagaagtacttcttgcatgacgacagagatgatggtgtggattattgggccaaaagaggaagaggtcgtggtacttttcaacgtggcagagggcgctttaacttcaaaaaatcaggtagcagtcctaaatggactcatgacaaataccaaggggatgggattgttgaagatgaagaagagaccatggaaaataatgaagaaaagaaggacagacgcaaggaagaaaaggaatagtaatgaactagtccgtaacttgaaagtatttcgatttcttggctttatatatcttgtggaaaggacgaatacgtctcagttcgacactaaat

SEQ ID NO: 1001 - DNA, 2717 bp, Homo sapiens
  source 1..2717: mol_type = genomic DNA
accgccaccatgggtcgctccaattctagatcacattcttcaaggtcaaagtctagatcacagtctagttctcgatcaagatcaagatctcattctagaaagaagcgatacagttctaggtctcgttccagaacatattcaaggtctcgtagtagagatcgtatgtattctagagattatcgtcgcgattacagaaataatagaggaatgagacgaccttatgggtacagaggaaggggtagagggtattatcaaggaggaggaggtagatatcatcgaggtggttatagacctgtctggaatagaaggcactctaggagtcctagacgaggtcgttcacgttccaggagtccaaaaagaagatccgtttcttctcaaagatccagaagcagatctcgccggtcatatagatcttctaggtctccaagatcatcctcttctcgttcttcatccccatatagcaaatctcctgtttctaaaagacgagggtctcaggaaaaacaaaccaaaaaagctgaaggggaaccccaagaagagagtccgttgaaaagtaaatcacaggaggaaccgaaagatacatttgaacatgacccatctgagtctatcgatgaatttaataagtcatcagccacatccggtgatatttggcctggcctttcagcttatgataatagtcctagatcaccccatagtccttcacctattgctacaccacctagtcagagttcatcttgctctgatgctcccatgctcagtacagttcactctgcaaaaaatactccttctcagcattcacattccattcagcatagtcctgaaaggtctgggtctggttctgttggaaatggatctagtcgatacagtccttctcagaatagtccaattcatcacatcccttcacgaagaagtcctgcaaagacaatcgcaccacagaatgctccaagagatgagtctaggggccgttcctcgttttatcctgatggtggagatcaggaaactgcaaagactgggaagttcttaaaaaggttcacagatgaagagtctagagtattcctgcttgataggggtaataccagggataaagaggcttcaaaagagaaaggatcagagaaagggagggcagagggagaatgggaagatcaggaagctctagattacttcagtgataaagagtctggaaaacaaaagtttaatgattcagaaggggatgacacagaggagacagaggattatagacagttcaggaagtcagtcctcgcagatcagggtaaaagttttgctactgcatctcaccggaatactgaggaggaaggactcaagtacaagtccaaagtttcactgaaaggcaatagagaaagtgatggatttagagaagaaaaaaattataaacttaaagagactggatatgtagtggaaaggcctagcactacaaaagataagcacaaagaagaagacaaaaattctgaaagaataacagtaaagaaagaaactcagtcacctgagcaggtaaagtctgaaaagctcaaagacctctttgattacagtccccctctacacaagaatctggatgcacgagaaaagtctaccttcagagaggaaagcccacttaggatcaaaatgatagcgagtgattctcaccgtcctgaagtcaaactcaaaatggcacctgttcctcttgatgattctaacagacctgcttccttgactaaagacaggctgcttgctagtacacttgtccattctgtcaagaaggagcaagaattccgatccatctttgaccacattaagttgccacaggccagcaaaagcacttcagagtcatttattcaacacattgtgtccttggttcatcatgttaaagagcaatacttcaagtcagctgcaatgaccctaaacgagcggttcacttcgtatcagaaagccactgaagaacatagtactcggcaaaagagccctgaaatacacaggagaattgacatctcaccaagtaccctgaggaagcatacccgtttagcaggggaagagagagtttttaaagaagaaaatcaaaagggagataaaaaattaaggtgtgactctgctgaccttcggcatgacattgatcgccgtagaaaagaaagaagtaaagaacggggagattccaagggctccagggaatccagtggatcaagaaagcaggaaaaaactccaaaagattacaaggaatacaaatcttacaaagatgacagtaaacataaaagagagcaagatcattctcgatcttcatcctcttcagcatcaccttcttctcccagttctcgagaagaaaaggagagtaagaaggaaagagaagaagaatttaaaactcaccatgaaatgaaagaatactcaggctttgcaggagttagccgaccacgaggaacctttcatgacgacagagatgatggtgtggattattgggccaaaagaggaagaggtcgtggtacttttcaacgtggcagagggcgctttaacttcaaaaaatcaggtagcagtcctaaatggactcatgacaaataccaaggggatgggattgttgaagatgaagaagagaccatggaaaataatgaagaaaagaaggacagacgcaaggaagaaaaggaatagtaatgaactagtccgtaacttgaaagtatttcgatttcttggctttatatatcttgtggaaaggacgacccttgctccctgaggtacaagcc

SEQ ID NO: 1002 - DNA, 5135 bp, Homo sapiens
  source 1..5135: mol_type = genomic DNA
accgccaccatggaggttccagaacccacctgccctgcccctcctgcgagggaccagccagctcccactcctggccctccaggggccccaggtggccaggcctcacctcacctgaccctgggccctgtccttctgccgccagagcagggcctggccccccccactgtgttcctgaaggccctgcccatcccactgtaccacacggtgcctcccgggggcctccagccccgcgccccgctagtgacgggcagcctagatgggggcaacgtgcccttcatactcagccctgtgctgcagcctgaagggcctggccccacccaggtggggaagccggcggcccctacgctgacggtgaacatcgtgggcactctgcctgtcctgtcgccgggcctgggccccacgctgggcagcccaggcaaggtgcggaatgcgggcaagtacctgtgtccgcactgtggtcgcgactgcctgaagcccagtgttctagagaagcacatccggtcccacacgggtgagaggcccttcccgtgtgccacctgcggcatcgcctttaagacccagagcaatctctacaagcacaggcggacgcagacgcacctcaacaactcccggctgtcctcagagtccgagggcgccgggggcggcctcctggaggaaggggacaaggccggagagccccccagaccagagggcaggggcgagagcaggtgccaggggatgcacgaaggcgcctcggagagacccctttctccgggtgcccacgtgcccctacttgccaagaacctggatgtgaggaccgaagctgctccctgtccagggtccgcatttgccgacagagaggctccttgggactctgcccccatggcgtcacctgggctcccagcggccagcacacaaccctggcgtaagttgccagagcagaagtcgccgaccgccgggaagccgtgcgccctgcagcggcagcaggcgacggcagcggagaagccctgggatgccaaggcccccgagggccggctgcggaagtgtgagagcaccgactcggggtacctgtcgcgctccgacagcgcggagcagccgcatgcgccctgcagccccctgcacagcctttcggagcacagcgccgagtccgagggggagggcggcccgggcccggggccaggggtcgcaggggccgagcccggggcgcgagaagccggcctggagctggagaagaagcggctggaggagcgcatcgcccagctcatctcccacaaccaggcggtggtggacgatgcccagctggacaacgtgcggccccggaagaccgggctgtccaaacagggcagcatcgacctgcccacgccctacacctacaaggactccttccactttgacatccgcgcgctggagccaggccgtaggagggccccgggccccgtgcgctccacctggacgcccccagacaagtctcggcccctcttcttccactccgtccccactcagctctccaccaccgtggaatgtgtccccgtcaccaggagcaactcgctgcccttcgtcgagggctccaggacgtggctggagcccagggagccccgggacccctggtccaggacgcagaagcctctgagccccaggcccggcccagcccgcctgggctgccgctcgggactaagctcgactgacgttcccagtgggcatccccgggccctggtcagacaggccgcggtggaggacctgccaggcacccccattggcgatgccctggtgcccgcagaggacacagacgcaaagagaactgctgcgcgggaggccatggccggcaagggcagagcgggcggcaggaagtgcggccagagaaggctgaagatgttctcccaggagaagtggcaggtgtacggggatgagacgttcaaaaggatctaccagaaaatgaaagccagtccccatggaggcaagaaagccagggaggtgggaatgggcagtggggcagaactgggctttcctctgcagaaagaggcagcagggagctcaggcacagtccccacccaagacaggaggacccctgtccatgaggacatatccgcaggggcaacgccagagccttggggaaatccaccagccctggaggcctccttggtgactgaacccactaagcatggggagacggtggccaggagaggagacagtgaccgacccagggtggaagaggctgtgtcatcccctgcactgggtggcagagacagtccctgttcaggcagtaggagccccctggtctctccaaatgggaggctggaactggggtggcagatgcccccagcacctggccccctcaaagggggtgatgtagaggctcccaggccagtttggccggaccccaagctggaaggaggtgcccgaggtgtgggggatgttcaggagacctgcctgtgggcccagactgtcctgagatggcccagcaggggctcaggggaggacaagctcccctcagagaggaagaagctgaaagtggaggacctgcacagctggaagcaaccagagcctgtgagcgcagagaccccaggtgggcccacgcagcctgcctctttgtcatcccagaagcaggatgccgatcccggggaggtgccagggggctcaaaggagagtgccaggcaggtgggcgagcctctggagtcctctggagcctccttggctgctgcttctgttgccctgaagagggtggggccaagggacaaggctaccccactgcatcctgcagccccagcccccgcagagcacccctcgctggccaccccacctcaggctcctagagtgctctctgccctggcagataatgccttttcccccaagtacctcctcaggttacctcaggcagagacccccttaccactgcccattccctggggaccaaggcacagccaggactctctctgcagcagtgggtggcctgaagaacgggcatcatttgttgggtcaggactggggacccctctttctcccagcccagcctcaggcccctccccaggtgaggcggacagcatcctggaggaccccagctgttccaggccacaggatgggagaaaaggggcacagttggggggggacaagggggacaggatggccactagcaggccagcagccagggagttgcccatctcagcaccaggggctcccagggaggctacctcctccccgcccactccaacgtgtgaggcacacttagttcaggacatggagggtgacagccaccgtatccatcgcctctgcatgggcagcactttggcaagggccaggctctctggggatgtcctgaatccctgggtacccaactgggagctgggggagcctcctgggaatgccccagaagatccttcttcagggcccctggtgggccccgacccgtgttcccccctccagcctggctccttcctcactgccctcactcggcctcagggtgtgcccccaggctggccagagctggccttgtcttcccactcagggacgtcccggagccacagcacccgcagtccccacagcacccaaaacccctttccctcactgaaggctgagccgcggctcacgtggtgttgcctgagccgcagtgtccctctgcccgcggagcagaaggcaaaggcggcatctgtgtacttggcggtgcactttcctggtagcagcctccgagatgagggtcccaatggccctcctgggagcaatggaggatggacctggacaagccctggagaaggagggccggcgcagatgtccaagttctcctacccaacagtcccaggggtgatgccccagcaccaggtgtctgagccagaatggaagaaaggcctgccttggagggcaaagatgtctcgtgggaacagcaagcagagaaaactgaagatcaaccctaaaaggtacaaagggaatttcttgcagagctgtgttcagctgagagccagtagacttcgcacaccaacctgggtgcgaagaagaagccgccaccctcccgcacttgagggactgaagccatgcaggacccctgggcagacctcttcagaaatagcaggtctgaatctgcaagaggagccatcttgtgccacctcagaatcacctccttgttgtgggaaggaagagaagaaggaaggtgactgcagacaaaccttaggaaccctctctcttggtacaagttcaagaattgtcagggaaatggacaaacgaactgtgaaggatatttctccatctgctggtgagcatggtgactgtactactcacagcactgctgccacatcaggattatctctgcaatctgacacctgcctggcagtggttaatgacgtgcctctaccccctggcaaaggtcttgaccttgggttgctggagactcagctgctggcctcccaggattcagtctcaacagatcccaaaccatacatcttctcagatgctcaaaggccttcttcctttgggtccaaaggaacttttccccaccatgacattgctacctctgtggctgccgtttgtatttctctgccagtgagaacagatcacatagcccaggaaattcacagtgctgaatcacgagaccacagccagactgcagggaggactctgacatcaagctccccagacagcaaagtcacagaagagggcagagcacagaccctcttgccagggagaccttcatctggacaaagaatttcagattcggttccactggagtcaactgaaaaaactcatcttgaaataccagcttcaggaccaagttcagctagttcacaccacaaggaagggagacacaagacgttttttccttccagaggccagtatgggtgtggggaaatgactgtcccctgcccctctttaggaagtgacggtaggaaacgtcaggtatctggattaatcactcggaaagattctgtggttccttctaagccagagcagcccatagaaattcctgaagccccttctaaatccctcaagaagaggagtctggaaggaatgagaaagcaaactcgagtagagttcagtgacaccagcagcgacgatgaagaccgattagttatagaaatatagtaatgaactagtccgtaacttgaaagtatttcgatttcttggctttatatatcttgtggaaaggacgacacccatatccctacgatagcagc

SEQ ID NO: 1003 - DNA, 1715 bp, Homo sapiens
  source 1..1715: mol_type = genomic DNA
accgccaccatggagggactcttgagcgtcgccctccagggcgcagagttggaaggaaactggaaacacgagggccaggttgaggacctgcaggaaaaccaggaaagctgtccagagccagaggccgtggcctgcaagggagaccctgctggggacagcatgcaggaacgcgatgaattcagccgaatcccaagaaccatatcgagccctgctgctacccaagccagtgtccccgacgacagcagttcccggaggtgcagcgcgcctggggagagcccgaaggagaggcatcctgacagccgccagcgggagagaggtggaggccccaagaagccgtggaaatgcggggactgcgggaaggccttcagctactgttcagcgttcatcttacaccagagaatccacaccggggagaagccatttgcgtgccccgagtgcggcaaggccttcagccagagcgtgcacctgaccctgcaccagcgcacgcacacgggcgagaagccctacgcctgccacgagtgcggcaaggccttcagccagggctcgtacctggcgtcccactggcgcacgcacacgggcgagaagccgcaccgctgcgccgactgcggcaaggccttcacgcgcgtcacgcacctgacccagcaccggcgcgtgcacacgggcgagcggccctacgcgtgcgcccagtgcgccaaggcgttccgcaaccgctcgtccctgatagagcaccagcgcatccacaccggtgagaagccctacgagtgctccgcgtgcgccaaggccttccgcttctcctcagcgctcatccgccaccagcgcatccacacggaggagaagccctaccgctgcggccagtgcgccaaggccttcgcgcagatcgcgcacctgacccagcaccggcgcgtgcacacgggcgagaagccctacacgtgccaggactgcggcgcgctcttcagccagagcgcctctctggccgagcaccggcgcatccacacaggcgagaagccctacgcgtgcggccagtgcgccaaggccttcacccaggtgtcgcacctgacgcagcaccagcgcacgcacaccggagagcggccttacccctgccacgactgcggcaagcgcttcagcaaccgctcccacctcctccagcaccgcctcgtgcacaccggtgagcggccctacaggtgcctgcaatgcggggccgccttcagccacgtgtcctcgcttatagagcaccagaagatccacaccggagagcggccctacaagtgcggcgagtgcggcaaagctttcagccagggctcctcgctcgccctgcaccagcgcacgcacacgggcgagcggccctacacctgccccgagtgcggcaaggccttcagcaaccgctcctacctgatccagcaccacatcgtgcacaccggggagaagccctacgagtgcagcggctgcgggaaggccttcagcttctcctccgcgctcatccgacaccagaggacgcatgcagacagttcgggacgcctttgcccagctcccacgcctgactcaacacctgggctctcacagggaggagaaacctgtcaacaggggtgccctggcagaaacccgcgtggaccagcagaagattagtaatgaactagtccgtaacttgaaagtatttcgatttcttggctttatatatcttgtggaaaggacgatctagaaagccctaagtcccacct

SEQ ID NO: 1004 - DNA, 2912 bp, Homo sapiens
  source 1..2912: mol_type = genomic DNA
accgccaccatggctcttacacagggacctttgacattcagggatgtagccatagaattctctcaggaggagtggaaatccctggaccctgtgcagaaagctttgtactgggatgtgatgttggagaactacaggaacctggtcttcctgggtatccttcctaaatgtatgaccaaggaattaccaccaatagggaacagtaatacaggagaaaaatgccaaacagtgacgctggaaagacatgaatgttatgatgttgaaaatttttacttaagggaaatccagaaaaatctacaggaccttgagtttcaatggaaagatggtgaaataaattataaagaagtgccaatgacctataaaaacaatcttaatggtaaaagaggtcaacatagtcaagaggatgtagaaaacaaatgtattgaaaatcagcttacattaagctttcagtcacgtctgactgaactgcagaaatttcaaactgaagggaaaatttatgagtgtaaccaatctgagaagacagttaataacagttccctagtttcaccacttcaaagaattcttcctagtgtccaaaccaacatttctaaaaaatatgagaatgagtttttgcagctgtcattacccacccaacttgagaaaacacacattagggaaaaaccttatatgtgtaaagggtgtggcaaagcctttagagtgtcttcaagtcttattaaccatcagatggtacatactacagagaaaccttacaaatgcaatgaatgtggcaaagcctttcatcggggctcactactaactatacatcagatagtccatacaagggggaagccatatcaatgtggtgtatgtggcaagatcttcagacaaaattcagatcttgtaaatcaccggagaagtcacactggagagaaaccgtacaaatgtaatgaatgtggcaagtcctttagtcaaagttataaccttgcaatacatcagagaattcacactggagagaaaccttacaaatgtaatgagtgtgggaaaaccttcaaacaaggctcatgcctcactacacatcagataatccatacaggagagaaaccatatcaatgtgatatatgtggcaaggtcttcaggcagaattctaatcttgtaaatcaccagagaatccacactggagagaaaccatacaaatgcaacatatgtggaaagtcctttagtcaaagttccaacctggcaactcatcagacagttcatagtggaaacaaaccttacaaatgtgatgagtgtggcaaaacctttaaacggagctccagcctcactacacatcagataatccatacaggagagaaaccatatacatgtgatgtatgcgacaaggtcttcagtcaacgttcacaacttgcaaggcaccagagaagtcatactggagagaaaccttacaaatgcaatgaatgtggcaaggtcttcagtcagacttcacatcttgtggggcatcggagaattcatactggagagaaaccttacaaatgtgataaatgtggtaaagcctttaaacagggctcattactcactcgacataagataattcataccagagagaaacgttaccaatgcggtgaatgtggaaaggtctttagtgaaaattcatgccttgtaagacatttaagaattcatactggggagcaaccttacaaatgtaatgtgtgtggcaaggtcttcaattacagtggaaacctttcaattcataagagaatacatacgggagagaaacctttccaatgtaatgaatgtggcacagtcttcaggaactactcatgcctagcacgtcatctaagaattcatactgggcagaaaccttacaaatgtaatgtgtgtggcaaggtcttcaatgacagtggaaacctttcaaatcataagagaattcatactggagagaagccgtttcaatgtaacgaatgcggcaaggttttcagttactactcatgcctagcacgtcatcggaaaattcataccggagagaaaccttacaaatgtaatgattgtggcaaagcctatactcagcgttcaagcctcactaaacatctgataattcatactggagagaaaccttacaattgtaatgagtttggaggggcatttatccaaagttcaaaacttgcaagatatcacagaaatcctactggggagaaaccacacaaatgtagccattgtggtagaacttttagtcatataacaggcctgacgtaccatcagagaaggcatactggagagatgccatacaaatgtattgaatgtggccaggtctttaattccacttcgaaccttgcaaggcatcggagaattcacactggagagaaaccttacaaatgtaatgaatgtggcaaggtctttcgtcatcaatcaacactagcacgtcatcggagtattcatactggagagaaaccttacgtgtgtaatgagtgtggcaaagcctttagagtgcgttcaattctggttaatcatcagaaaatgcatactggggacaaaccttacaaatgtaatgaatgtggtaaagcttttattgaaaggtcaaagctggtgtaccatcaaagaaatcacactggagagaagccatacaaatgtattgaatgtggcaaggcctttgggcggttttcttgcctcaacaaacaccaaatgattcattctggagaaaaaccttataaatgtaatgagtgtggcaaatctttcattagtcgctcaggcctcactaaacatcagacaaaacatactgcagagagtcttaaaacaaaattcaatgtggaaaagcctttagatgttctcctaacttctgggttcaaatagtaatgaactagtccgtaacttgaaagtatttcgatttcttggctttatatatcttgtggaaaggacgagcggcacacgctcctgcatggaca

SEQ ID NO: 1005 - DNA, 4496 bp, Homo sapiens
  source 1..4496: mol_type = genomic DNA
accgccaccatgagtgggatgggagaaaatacctctgacccctccagggcagagacaagaaagcgcaaggaatgtcctgaccaacttggacccagccccaaaaggaacactgaaaaacgtaatcgtgaacaggaaaataaatatatagaagaacttgcagagttgatttttgcaaattttaatgatatagacaactttaacttcaaacctgacaaatgtgcaatcttaaaagaaactgtgaagcaaattcgtcagatcaaagaacaagagaaagcagcagctgccaacatagatgaagtgcagaagtcagatgtatcctctacagggcagggtgtcatcgacaaggatgcgctggggcctatgatgcttgaggcccttgatgggttcttctttgtagtgaacctggaaggcaacgttgtgtttgtgtcagagaatgtgacacagtatctaaggtataaccaagaagagctgatgaacaaaagtgtatatagcatcttgcatgttggggaccacacggaatttgtcaaaaacctgctgccaaagtctatagtaaatgggggatcttggtctggcgaacctccgaggcggaacagccataccttcaattgtcggatgctggtaaaacctttacctgattcagaagaggagggtcatgataaccaggaagctcatcagaaatatgaaactatgcagtgcttcgctgtctctcaaccaaagtccatcaaagaagaaggagaagatttgcagtcctgcttgatttgcgtggcaagaagagttcccatgaaggaaagaccagttcttccctcatcagaaagttttactactcgccaggatctccaaggcaagatcacgtctctggataccagcaccatgagagcagccatgaaaccaggctgggaggacctggtaagaaggtgtattcagaagttccatgcgcagcatgaaggagaatctgtgtcctatgctaagaggcatcatcatgaagtactgagacaaggattggcattcagtcaaatctatcgtttttccttgtctgatggcactcttgttgctgcacaaacgaagagcaaactcatccgttctcagactactaatgaacctcaacttgtaatatctttacatatgcttcacagagagcagaatgtgtgtgtgatgaatccggatctgactggacaaacgatggggaagccactgaatccaattagctctaacagccctgcccatcaggccctgtgcagtgggaacccaggtcaggacatgaccctcagtagcaatataaattttcccataaatggcccaaaggaacaaatgggcatgcccatgggcaggtttggtggttctgggggaatgaaccatgtgtcaggcatgcaagcaaccactcctcagggtagtaactatgcactcaaaatgaacagcccctcacaaagcagccctggcatgaatccaggacagcccacctccatgctttcaccaaggcatcgcatgagccctggagtggctggcagccctcgaatcccacccagtcagttttcccctgcaggaagcttgcattcccctgtgggagtttgcagcagcacaggaaatagccatagttataccaacagctccctcaatgcacttcaggccctcagcgaggggcacggggtctcattagggtcatcgttggcttcaccagacctaaaaatgggcaatttgcaaaactccccagttaatatgaatcctcccccactcagcaagatgggaagcttggactcaaaagactgttttggactatatggggagccctctgaaggtacaactggacaagcagagagcagctgccatcctggagagcaaaaggaaacaaatgaccccaacctgcccccggccgtgagcagtgagagagctgacgggcagagcagactgcatgacagcaaagggcagaccaaactcctgcagctgctgaccaccaaatctgatcagatggagccctcgcccttagccagctctttgtcggatacaaacaaagactccacaggtagcttgcctggttctgggtctacacatggaacctcgctcaaggagaagcataaaattttgcacagactcttgcaggacagcagttcccctgtggacttggccaagttaacagcagaagccacaggcaaagacctgagccaggagtccagcagcacagctcctggatcagaagtgactattaaacaagagccggtgagccccaagaagaaagagaatgcactacttcgctatttgctagataaagatgatactaaagatattggtttaccagaaataacccccaaacttgagagactggacagtaagacagatcctgccagtaacacaaaattaatagcaatgaaaactgagaaggaggagatgagctttgagcctggtgaccagcctggcagtgagctggacaacttggaggagattttggatgatttgcagaatagtcaattaccacagcttttcccagacacgaggccaggcgcccctgctggatcagttgacaagcaagccatcatcaatgacctcatgcaactcacagctgaaaacagccctgtcacacctgttggagcccagaaaacagcactgcgaatttcacagagcacttttaataacccacgaccagggcaactgggcaggttattgccaaaccagaatttaccacttgacatcacattgcaaagcccaactggtgctggacctttcccaccaatcagaaacagtagtccctactcagtgatacctcagccaggaatgatgggtaatcaagggatgataggaaaccaaggaaatttagggaacagtagcacaggaatgattggtaacagtgcttctcggcctactatgccatctggagaatgggcaccgcagagttcggctgtgagagtcacctgtgctgctaccaccagtgccatgaaccggccagtccaaggaggtatgattcggaacccagcagccagcatccccatgaggcccagcagccagcctggccaaagacagacgcttcagtctcaggtcatgaatatagggccatctgaattagagatgaacatggggggacctcagtatagccaacaacaagctcctccaaatcagactgccccatggcctgaaagcatcctgcctatagaccaggcgtcttttgccagccaaaacaggcagccatttggcagttctccagatgacttgctatgtccacatcctgcagctgagtctccgagtgatgagggagctctcctggaccagctgtatctggccttgcggaattttgatggcctggaggagattgatagagccttaggaatacccgaactggtcagccagagccaagcagtagatccagaacagttctcaagtcaggattccaacatcatgctggagcagaaggcgcccgttttcccacagcagtatgcatctcaggcacaaatggcccagggtagctattctcccatgcaagatccaaactttcacaccatgggacagcggcctagttatgccacactccgtatgcagcccagaccgggcctcaggcccacgggcctagtgcagaaccagccaaatcaactaagacttcaacttcagcatcgcctccaagcacagcagaatcgccagccacttatgaatcaaatcagcaatgtttccaatgtgaacttgactctgaggcctggagtaccaacacaggcacctattaatgcacagatgctggcccagagacagagggaaatcctgaaccagcatcttcgacagagacaaatgcatcagcaacagcaagttcagcaacgaactttgatgatgagaggacaagggttgaatatgacaccaagcatggtggctcctagtggtatgccagcaactatgagcaaccctcggattccccaggcaaatgcacagcagtttccatttcctccaaactacggaataagtcagcaacctgatccaggctttactggggctacgactccccagagcccacttatgtcaccccgaatggcacatacacagagtcccatgatgcaacagtctcaggccaacccagcctatcaggccccctccgacataaatggatgggcgcaggggaacatgggcggaaacagcatgttttcccagcagtccccaccacactttgggcagcaagcaaacaccagcatgtacagtaacaacatgaacatcaatgtgtccatggcgaccaacacaggtggcatgagcagcatgaaccagatgacaggacagatcagcatgacctcagtgacctccgtgcctacgtcagggctgtcctccatgggtcccgagcaggttaatgatcctgctctgaggggaggcaacctgttcccaaaccagctgcctggaatggatatgattaagcaggagggagacacaacacggaaatattgctagtaatgaactagtccgtaacttgaaagtatttcgatttcttggctttatatatcttgtggaaaggacgacgggagcaggcatcggtaatgagg

SEQ ID NO: 1006 - DNA, 4349 bp, Homo sapiens
  source 1..4349: mol_type = genomic DNA
accgccaccatgagtggattaggagaaaacttggatccactggccagtgattcacgaaaacgcaaattgccatgtgatactccaggacaaggtcttacctgcagtggtgaaaaacggagacgggagcaggaaagtaaatatattgaagaattggctgagctgatatctgccaatcttagtgatattgacaatttcaatgtcaaaccagataaatgtgcgattttaaaggaaacagtaagacagatacgtcaaataaaagagcaaggaaaaactatttccaatgatgatgatgttcaaaaagccgatgtatcttctacagggcagggagttattgataaagactccttaggaccgcttttacttcaggcattggatggtttcctatttgtggtgaatcgagacggaaacattgtatttgtatcagaaaatgtcacacaatacctgcaatataagcaagaggacctggttaacacaagtgtttacaatatcttacatgaagaagacagaaaggattttcttaagaatttaccaaaatctacagttaatggagtttcctggacaaatgagacccaaagacaaaaaagccatacatttaattgccgtatgttgatgaaaacaccacatgatattctggaagacataaacgccagtcctgaaatgcgccagagatatgaaacaatgcagtgctttgccctgtctcagccacgagctatgatggaggaaggggaagatttgcaatcttgtatgatctgtgtggcacgccgcattactacaggagaaagaacatttccatcaaaccctgagagctttattaccagacatgatctttcaggaaaggttgtcaatatagatacaaattcactgagatcctccatgaggcctggctttgaagatataatccgaaggtgtattcagagattttttagtctaaatgatgggcagtcatggtcccagaaacgtcactatcaagaagttaccagtgatgggatattttccccaacagcttatcttaatggccatgcagaaaccccagtatatcgattctcgttggctgatggaactatagtgactgcacagacaaaaagcaaactcttccgaaatcctgtaacaaatgatcgacatggctttgtctcaacccacttccttcagagagaacagaatggatatagaccaaacccaaatcctgttggacaagggattagaccacctatggctggatgcaacagttcggtaggcggcatgagtatgtcgccaaaccaaggcttacagatgccgagcagcagggcctatggcttggcagaccctagcaccacagggcagatgagtggagctaggtatgggggttccagtaacatagcttcattgacccctgggccaggcatgcaatcaccatcttcctaccagaacaacaactatgggctcaacatgagtagccccccacatgggagtcctggtcttgccccaaaccagcagaatatcatgatttctcctcgtaatcgtgggagtccaaagatagcctcacatcagttttctcctgttgcaggtgtgcactctcccatggcatcttctggcaatactgggaaccacagcttttccagcagctctctcagtgccctgcaagccatcagtgaaggtgtggggacttcccttttatctactctgtcatcaccaggccccaaattggataactctcccaatatgaatattacccaaccaagtaaagtaagcaatcaggattccaagagtcctctgggcttttattgcgaccaaaatccagtggagagttcaatgtgtcagtcaaatagcagagatcacctcagtgacaaagaaagtaaggagagcagtgttgagggggcagagaatcaaaggggtcctttggaaagcaaaggtcataaaaaattactgcagttacttacctgttcttctgatgaccggggtcattcctccttgaccaactcccccctagattcaagttgtaaagaatcttctgttagtgtcaccagcccctctggagtctcctcctctacatctggaggagtatcctctacatccaatatgcatgggtcactgttacaagagaagcaccggattttgcacaagttgctgcagaatgggaattcaccagctgaggtagccaagattactgcagaagccactgggaaagacaccagcagtataacttcttgtggggacggaaatgttgtcaagcaggagcagctaagtcctaagaagaaggagaataatgcacttcttagatacctgctggacagggatgatcctagtgatgcactctctaaagaactacagccccaagtggaaggagtggataataaaatgagtcagtgcaccagctccaccattcctagctcaagtcaagagaaagaccctaaaattaagacagagacaagtgaagagggatctggagacttggataatctagatgctattcttggtgatctgactagttctgacttttacaataattccatatcctcaaatggtagtcatctggggactaagcaacaggtgtttcaaggaactaattctctgggtttgaaaagttcacagtctgtgcagtctattcgtcctccatataaccgagcagtgtctctggatagccctgtttctgttggctcaagtcctccagtaaaaaatatcagtgctttccccatgttaccaaagcaacccatgttgggtgggaatccaagaatgatggatagtcaggaaaattatggctcaagtatgggagactggggcttaccaaactcaaaggccggcagaatggaacctatgaattcaaactccatgggaagaccaggaggagattataatacttctttacccagacctgcactgggtggctctattcccacattgcctcttcggtctaatagcataccaggtgcgagaccagtattgcaacagcagcagcagatgcttcaaatgaggcctggtgaaatccccatgggaatgggggctaatccctatggccaagcagcagcatctaaccaactgggttcctggcccgatggcatgttgtccatggaacaagtttctcatggcactcaaaataggcctcttcttaggaattccctggatgatcttgttgggccaccttccaacctggaaggccagagtgacgaaagagcattattggaccagctgcacactcttctcagcaacacagatgccacaggcctggaagaaattgacagagctttgggcattcctgaacttgtcaatcagggacaggcattagagcccaaacaggatgctttccaaggccaagaagcagcagtaatgatggatcagaaggcaggattatatggacagacatacccagcacaggggcctccaatgcaaggaggctttcatcttcagggacaatcaccatcttttaactctatgatgaatcagatgaaccagcaaggcaattttcctctccaaggaatgcacccacgagccaacatcatgagaccccggacaaacacccccaagcaacttagaatgcagcttcagcagaggctgcagggccagcagtttttgaatcagagccgacaggcacttgaattgaaaatggaaaaccctactgctggtggtgctgcggtgatgaggcctatgatgcagccccagcagggttttcttaatgctcaaatggtcgcccaacgcagcagagagctgctaagtcatcacttccgacaacagagggtggctatgatgatgcagcagcagcagcagcagcaacagcagcagcagcagcagcagcagcagcaacagcaacagcaacagcaacagcagcaacagcagcaaacccaggccttcagcccacctcctaatgtgactgcttcccccagcatggatgggcttttggcaggacccacaatgccacaagctcctccgcaacagtttccatatcaaccaaattatggaatgggacaacaaccagatccagcctttggtcgagtgtctagtcctcccaatgcaatgatgtcgtcaagaatgggtccctcccagaatcccatgatgcaacacccgcaggctgcatccatctatcagtcctcagaaatgaagggctggccatcaggaaatttggccaggaacagctccttttcccagcagcagtttgcccaccaggggaatcctgcagtgtatagtatggtgcacatgaatggcagcagtggtcacatgggacagatgaacatgaaccccatgcccatgtctggcatgcctatgggtcctgatcagaaatactgctagtaatgaactagtccgtaacttgaaagtatttcgatttcttggctttatatatcttgtggaaaggacgacattccgagcgcattgacggccga

SEQ ID NO: 1007 - DNA, 4376 bp, Homo sapiens
  source 1..4376: mol_type = genomic DNA
accgccaccatgagtggattaggagaaaacttggatccactggccagtgattcacgaaaacgcaaattgccatgtgatactccaggacaaggtcttacctgcagtggtgaaaaacggagacgggagcaggaaagtaaatatattgaagaattggctgagctgatatctgccaatcttagtgatattgacaatttcaatgtcaaaccagataaatgtgcgattttaaaggaaacagtaagacagatacgtcaaataaaagagcaaggaaaaactatttccaatgatgatgatgttcaaaaagccgatgtatcttctacagggcagggagttattgataaagactccttaggaccgcttttacttcaggcattggatggtttcctatttgtggtgaatcgagacggaaacattgtatttgtatcagaaaatgtcacacaatacctgcaatataagcaagaggacctggttaacacaagtgtttacaatatcttacatgaagaagacagaaaggattttcttaagaatttaccaaaatctacagttaatggagtttcctggacaaatgagacccaaagacaaaaaagccatacatttaattgccgtatgttgatgaaaacaccacatgatattctggaagacataaacgccagtcctgaaatgcgccagagatatgaaacaatgcagtgctttgccctgtctcagccacgagctatgatggaggaaggggaagatttgcaatcttgtatgatctgtgtggcacgccgcattactacaggagaaagaacatttccatcaaaccctgagagctttattaccagacatgatctttcaggaaaggttgtcaatatagatacaaattcactgagatcctccatgaggcctggctttgaagatataatccgaaggtgtattcagagattttttagtctaaatgatgggcagtcatggtcccagaaacgtcactatcaagaagcttatcttaatggccatgcagaaaccccagtatatcgattctcgttggctgatggaactatagtgactgcacagacaaaaagcaaactcttccgaaatcctgtaacaaatgatcgacatggctttgtctcaacccacttccttcagagagaacagaatggatatagaccaaacccaaatcctgttggacaagggattagaccacctatggctggatgcaacagttcggtaggcggcatgagtatgtcgccaaaccaaggcttacagatgccgagcagcagggcctatggcttggcagaccctagcaccacagggcagatgagtggagctaggtatgggggttccagtaacatagcttcattgacccctgggccaggcatgcaatcaccatcttcctaccagaacaacaactatgggctcaacatgagtagccccccacatgggagtcctggtcttgccccaaaccagcagaatatcatgatttctcctcgtaatcgtgggagtccaaagatagcctcacatcagttttctcctgttgcaggtgtgcactctcccatggcatcttctggcaatactgggaaccacagcttttccagcagctctctcagtgccctgcaagccatcagtgaaggtgtggggacttcccttttatctactctgtcatcaccaggccccaaattggataactctcccaatatgaatattacccaaccaagtaaagtaagcaatcaggattccaagagtcctctgggcttttattgcgaccaaaatccagtggagagttcaatgtgtcagtcaaatagcagagatcacctcagtgacaaagaaagtaaggagagcagtgttgagggggcagagaatcaaaggggtcctttggaaagcaaaggtcataaaaaattactgcagttacttacctgttcttctgatgaccggggtcattcctccttgaccaactcccccctagattcaagttgtaaagaatcttctgttagtgtcaccagcccctctggagtctcctcctctacatctggaggagtatcctctacatccaatatgcatgggtcactgttacaagagaagcaccggattttgcacaagttgctgcagaatgggaattcaccagctgaggtagccaagattactgcagaagccactgggaaagacaccagcagtataacttcttgtggggacggaaatgttgtcaagcaggagcagctaagtcctaagaagaaggagaataatgcacttcttagatacctgctggacagggatgatcctagtgatgcactctctaaagaactacagccccaagtggaaggagtggataataaaatgagtcagtgcaccagctccaccattcctagctcaagtcaagagaaagaccctaaaattaagacagagacaagtgaagagggatctggagacttggataatctagatgctattcttggtgatctgactagttctgacttttacaataattccatatcctcaaatggtagtcatctggggactaagcaacaggtgtttcaaggaactaattctctgggtttgaaaagttcacagtctgtgcagtctattcgtcctccatataaccgagcagtgtctctggatagccctgtttctgttggctcaagtcctccagtaaaaaatatcagtgctttccccatgttaccaaagcaacccatgttgggtgggaatccaagaatgatggatagtcaggaaaattatggctcaagtatgggtgggccaaaccgaaatgtgactgtgactcagactccttcctcaggagactggggcttaccaaactcaaaggccggcagaatggaacctatgaattcaaactccatgggaagaccaggaggagattataatacttctttacccagacctgcactgggtggctctattcccacattgcctcttcggtctaatagcataccaggtgcgagaccagtattgcaacagcagcagcagatgcttcaaatgaggcctggtgaaatccccatgggaatgggggctaatccctatggccaagcagcagcatctaaccaactgggttcctggcccgatggcatgttgtccatggaacaagtttctcatggcactcaaaataggcctcttcttaggaattccctggatgatcttgttgggccaccttccaacctggaaggccagagtgacgaaagagcattattggaccagctgcacactcttctcagcaacacagatgccacaggcctggaagaaattgacagagctttgggcattcctgaacttgtcaatcagggacaggcattagagcccaaacaggatgctttccaaggccaagaagcagcagtaatgatggatcagaaggcaggattatatggacagacatacccagcacaggggcctccaatgcaaggaggctttcatcttcagggacaatcaccatcttttaactctatgatgaatcagatgaaccagcaaggcaattttcctctccaaggaatgcacccacgagccaacatcatgagaccccggacaaacacccccaagcaacttagaatgcagcttcagcagaggctgcagggccagcagtttttgaatcagagccgacaggcacttgaattgaaaatggaaaaccctactgctggtggtgctgcggtgatgaggcctatgatgcagccccaggtgagctcccagcagggttttcttaatgctcaaatggtcgcccaacgcagcagagagctgctaagtcatcacttccgacaacagagggtggctatgatgatgcagcagcagcagcagcagcaacagcagcagcagcagcagcagcagcagcaacagcaacagcaacagcaacagcagcaacagcagcaaacccaggccttcagcccacctcctaatgtgactgcttcccccagcatggatgggcttttggcaggacccacaatgccacaagctcctccgcaacagtttccatatcaaccaaattatggaatgggacaacaaccagatccagcctttggtcgagtgtctagtcctcccaatgcaatgatgtcgtcaagaatgggtccctcccagaatcccatgatgcaacacccgcaggctgcatccatctatcagtcctcagaaatgaagggctggccatcaggaaatttggccaggaacagctccttttcccagcagcagtttgcccaccaggggaatcctgcagtgtatagtatggtgcacatgaatggcagcagtggtcacatgggacagatgaacatgaaccccatgcccatgtctggcatgcctatgggtcctgatcagaaatactgctagtaatgaactagtccgtaacttgaaagtatttcgatttcttggctttatatatcttgtggaaaggacgaccgaggtgttggcgtgcgtgcttt

SEQ ID NO: 1008 - DNA, 4301 bp, Homo sapiens
  source 1..4301: mol_type = genomic DNA
accgccaccatgagtggcctcggggacagttcatccgaccctgctaacccagactcacataagaggaaaggatcgccatgtgacacactggcatcaagcacggaaaagaggcgcagggagcaagaaaataaatatttagaagaactagctgagttactgtctgccaacattagtgacattgacagcttgagtgtaaaaccagacaaatgcaagattttgaagaaaacagtcgatcagatacagctaatgaagagaatggaacaagagaaatcaacaactgatgacgatgtacagaaatcagacatctcatcaagtagtcaaggagtgatagaaaaggaatccttgggacctcttcttttggaggctttggatggatttttctttgttgtgaactgtgaagggagaattgtatttgtgtcagagaatgtaaccagctacttaggttacaatcaggaggaattaatgaatacgagcgtctacagcatactgcacgtgggggatcatgcagaatttgtgaagaatctgctaccaaaatcactagtaaatggagttccttggcctcaagaggcaacacgacgaaatagccatacctttaactgcaggatgctaattcaccctccagatgagccagggaccgagaaccaagaagcttgccagcgttatgaagtaatgcagtgtttcactgtgtcacagccaaaatcaattcaagaggatggagaagatttccagtcatgtctgatttgtattgcacggcgattacctcggcctccagctattacgggtgtagaatcctttatgaccaagcaagatactacaggtaaaatcatctctattgatactagttccctgagagctgctggcagaactggttgggaagatttagtgaggaagtgcatttatgcttttttccaacctcagggcagagaaccatcttatgccagacagctgttccaagaagtgatgactcgtggcactgcctccagcccctcctatagattcatattgaatgatgggacaatgcttagcgcccacaccaagtgtaaactttgctaccctcaaagtccagacatgcaacctttcatcatgggaattcatatcatcgacagggagcacagtgggctttctcctcaagatgacactaattctggaatgtcaattccccgagtaaatccctcggtcaatcctagtatctctccagctcatggtgtggctcgttcatccacattgccaccatccaacagcaacatggtatccaccagaataaaccgccagcagagctcagaccttcatagcagcagtcatagtaattctagcaacagccaaggaagtttcggatgctcacccggaagtcagattgtagccaatgttgccttaaaccaaggacaggccagttcacagagcagtaatccctctttaaacctcaataattctcctatggaaggtacaggaatatccctagcacagttcatgtctccaaggagacaggttacttctggattggcaacaaggcccaggatgccaaacaattcctttcctcctaatatttcgacattaagctctcccgttggcatgacaagtagtgcctgtaataataataaccgatcttattcaaacatcccagtaacatctttacagggtatgaatgaaggacccaataactccgttggcttctctgccagttctccagtcctcaggcagatgagctcacagaattcacctagcagattaaatatacaaccagcaaaagctgagtccaaagataacaaagagattgcctcaattttaaatgaaatgattcaatctgacaacagctctagtgatggcaaacctctggattcagggcttctgcataacaatgacagactttcagatggagacagtaaatactctcaaaccagtcacaaactagtgcagcttttgacaacaactgccgaacagcagttacggcatgctgatatagacacaagctgcaaagatgtcctgtcttgcacaggcacttccaactctgcctctgctaactcttcaggaggttcttgtccctcttctcatagctcattgacagaacggcataaaattctacaccggctcttacaggagggtagcccctcagatatcaccactttgtctgtcgagcctgataaaaaggacagtgcatctacttctgtgtcagtgactggacaggtacaaggaaactccagtataaaactagaactggatgcttcaaagaaaaaagaatcaaaagaccatcagctcctacgctatcttttagataaagatgagaaagatttaagatcaactccaaacctgagcctggatgatgtaaaggtgaaagtggaaaagaaagaacagatggatccatgtaatacaaacccaaccccaatgaccaaacccactcctgaggaaataaaactggaggcccagagccagtttacagctgaccttgaccagtttgatcagttactgcccacgctggagaaggcagcacagttgccaggcttatgtgagacagacaggatggatggtgcggtcaccagtgtaaccatcaaatcggagatcctgccagcttcacttcagtccgccactgccagacccacttccaggctaaatagattacctgagctggaattggaagcaattgataaccaatttggacaaccaggaacaggcgatcagattccatggacaaataatacagtgacagctataaatcagagtaaatcagaagaccagtgtattagctcacaattagatgagcttctctgtccacccacaacagtagaagggagaaatgatgagaaggctcttcttgaacagctggtatccttccttagtggcaaagatgaaactgagctagctgaactagacagagctctgggaattgacaaacttgttcaggggggtggattagatgtattatcagagagatttccaccacaacaagcaacgccacctttgatcatggaagaaagacccaacctttattcccagccttactcttctccttctcctactgccaatctccctagccctttccaaggcatggtcaggcaaaaaccttcactggggacgatgcctgttcaagtaacacctccccgaggtgctttttcacctggcatgggcatgcagcccaggcaaactctaaacagacctccggctgcacctaaccagcttcgacttcaactacagcagcgattacagggacaacagcagttgatacaccaaaatcggcaagctatcttaaaccagtttgcagcaactgctcctgttggcatcaatatgagatcaggcatgcaacagcaaattacacctcagccacccctgaatgctcaaatgttggcacaacgtcagcgggaactgtacagtcaacagcaccgacagaggcagctaatacagcagcaaagagccatgcttatgaggcagcaaagctttgggaacaacctccctccctcatctggactaccagttcaaatggggaacccccgtcttcctcagggtgctccacagcaattcccctatccaccaaactatggtacaaatccaggaaccccacctgcttctaccagcccgttttcacaactagcagcaaatcctgaagcatccttggccaaccgcaacagcatggtgagcagaggcatgacaggaaacataggaggacagtttggcactggaatcaatcctcagatgcagcagaatgtcttccagtatccaggagcaggaatggttccccaaggtgaggccaactttgctccatctctaagccctgggagctccatggtgccgatgccaatccctcctcctcagagttctcttctccagcaaactccacctgcctccgggtatcagtcaccagacatgaaggcctggcagcaaggagcgataggaaacaacaatgtgttcagtcaagctgtccagaaccagcccacgcctgcacagccaggagtatacaacaacatgagcatcaccgtttccatggcaggtggaaatacgaatgttcagaacatgaacccaatgatggcccagatgcagatgagctctttgcagatgccaggaatgaacactgtgtgccctgagcagataaatgatcccgcactgagacacacaggcctctactgcaaccagctctcatccactgaccttctcaaaacagaagcagatggaacccaggacaagaagacagaagagttcttctctgtggtgactacagactagtaatgaactagtccgtaacttgaaagtatttcgatttcttggctttatatatcttgtggaaaggacgaggagataggacgcttctaagaggg

SEQ ID NO: 1009 - DNA, 4427 bp, Homo sapiens
  source 1..4427: mol_type = genomic DNA
accgccaccatgagtggcctcggggacagttcatccgaccctgctaacccagactcacataagaggaaaggatcgccatgtgacacactggcatcaagcacggaaaagaggcgcagggagcaagaaaataaatatttagaagaactagctgagttactgtctgccaacattagtgacattgacagcttgagtgtaaaaccagacaaatgcaagattttgaagaaaacagtcgatcagatacagctaatgaagagaatggaacaagagaaatcaacaactgatgacgatgtacagaaatcagacatctcatcaagtagtcaaggagtgatagaaaaggaatccttgggacctcttcttttggaggctttggatggatttttctttgttgtgaactgtgaagggagaattgtatttgtgtcagagaatgtaaccagctacttaggttacaatcaggaggaattaatgaatacgagcgtctacagcatactgcacgtgggggatcatgcagaatttgtgaagaatctgctaccaaaatcactagtaaatggagttccttggcctcaagaggcaacacgacgaaatagccatacctttaactgcaggatgctaattcaccctccagatgagccagggaccgagaaccaagaagcttgccagcgttatgaagtaatgcagtgtttcactgtgtcacagccaaaatcaattcaagaggatggagaagatttccagtcatgtctgatttgtattgcacggcgattacctcggcctccagctattacgggtgtagaatcctttatgaccaagcaagatactacaggtaaaatcatctctattgatactagttccctgagagctgctggcagaactggttgggaagatttagtgaggaagtgcatttatgcttttttccaacctcagggcagagaaccatcttatgccagacagctgttccaagaagtgatgactcgtggcactgcctccagcccctcctatagattcatattgaatgatgggacaatgcttagcgcccacaccaagtgtaaactttgctaccctcaaagtccagacatgcaacctttcatcatgggaattcatatcatcgacagggagcacagtgggctttctcctcaagatgacactaattctggaatgtcaattccccgagtaaatccctcggtcaatcctagtatctctccagctcatggtgtggctcgttcatccacattgccaccatccaacagcaacatggtatccaccagaataaaccgccagcagagctcagaccttcatagcagcagtcatagtaattctagcaacagccaaggaagtttcggatgctcacccggaagtcagattgtagccaatgttgccttaaaccaaggacaggccagttcacagagcagtaatccctctttaaacctcaataattctcctatggaaggtacaggaatatccctagcacagttcatgtctccaaggagacaggttacttctggattggcaacaaggcccaggatgccaaacaattcctttcctcctaatatttcgacattaagctctcccgttggcatgacaagtagtgcctgtaataataataaccgatcttattcaaacatcccagtaacatctttacagggtatgaatgaaggacccaataactccgttggcttctctgccagttctccagtcctcaggcagatgagctcacagaattcacctagcagattaaatatacaaccagcaaaagctgagtccaaagataacaaagagattgcctcaattttaaatgaaatgattcaatctgacaacagctctagtgatggcaaacctctggattcagggcttctgcataacaatgacagactttcagatggagacagtaaatactctcaaaccagtcacaaactagtgcagcttttgacaacaactgccgaacagcagttacggcatgctgatatagacacaagctgcaaagatgtcctgtcttgcacaggcacttccaactctgcctctgctaactcttcaggaggttcttgtccctcttctcatagctcattgacagaacggcataaaattctacaccggctcttacaggagggtagcccctcagatatcaccactttgtctgtcgagcctgataaaaaggacagtgcatctacttctgtgtcagtgactggacaggtacaaggaaactccagtataaaactagaactggatgcttcaaagaaaaaagaatcaaaagaccatcagctcctacgctatcttttagataaagatgagaaagatttaagatcaactccaaacctgagcctggatgatgtaaaggtgaaagtggaaaagaaagaacagatggatccatgtaatacaaacccaaccccaatgaccaaacccactcctgaggaaataaaactggaggcccagagccagtttacagctgaccttgaccagtttgatcagttactgcccacgctggagaaggcagcacagttgccaggcttatgtgagacagacaggatggatggtgcggtcaccagtgtaaccatcaaatcggagatcctgccagcttcacttcagtccgccactgccagacccacttccaggctaaatagattacctgagctggaattggaagcaattgataaccaatttggacaaccaggaacaggcgatcagattccatggacaaataatacagtgacagctataaatcagagtaaatcagaagaccagtgtattagctcacaattagatgagcttctctgtccacccacaacagtagaagggagaaatgatgagaaggctcttcttgaacagctggtatccttccttagtggcaaagatgaaactgagctagctgaactagacagagctctgggaattgacaaacttgttcaggggggtggattagatgtattatcagagagatttccaccacaacaagcaacgccacctttgatcatggaagaaagacccaacctttattcccagccttactcttctccttctcctactgccaatctccctagccctttccaaggcatggtcaggcaaaaaccttcactggggacgatgcctgttcaagtaacacctccccgaggtgctttttcacctggcatgggcatgcagcccaggcaaactctaaacagacctccggctgcacctaaccagcttcgacttcaactacagcagcgattacagggacaacagcagttgatacaccaaaatcggcaagctatcttaaaccagtttgcagcaactgctcctgttggcatcaatatgagatcaggcatgcaacagcaaattacacctcagccacccctgaatgctcaaatgttggcacaacgtcagcgggaactgtacagtcaacagcaccgacagaggcagctaatacagcagcaaagagccatgcttatgaggcagcaaagctttgggaacaacctccctccctcatctggactaccagttcaaatggggaacccccgtcttcctcagggtgctccacagcaattcccctatccaccaaactatggtacaaatccaggaaccccacctgcttctaccagcccgttttcacaactagcagcaaatcctgaagcatccttggccaaccgcaacagcatggtgagcagaggcatgacaggaaacataggaggacagtttggcactggaatcaatcctcagatgcagcagaatgtcttccagtatccaggagcaggaatggttccccaaggtgaggccaactttgctccatctctaagccctgggagctccatggtgccgatgccaatccctcctcctcagagttctcttctccagcaaactccacctgcctccgggtatcagtcaccagacatgaaggcctggcagcaaggagcgataggaaacaacaatgtgttcagtcaagctgtccagaaccagcccacgcctgcacagccaggagtatacaacaacatgagcatcaccgtttccatggcaggtggaaatacgaatgttcagaacatgaacccaatgatggcccagatgcagatgagctctttgcagatgccaggaatgaacactgtgtgccctgagcagataaatgatcccgcactgagacacacaggcctctactgcaaccagctctcatccactgaccttctcaaaacagaagcagatggaacccagcaggtgcaacaggttcaggtgtttgctgacgtccagtgtacagtgaatctggtaggcggggacccttacctgaaccagcctggtccactgggaactcaaaagcccacgtcaggaccacagaccccccaggcccagcagaagagcctccttcagcagctactgactgaatagtaatgaactagtccgtaacttgaaagtatttcgatttcttggctttatatatcttgtggaaaggacgatctgggcgatacttctcccataaa

SEQ ID NO: 1010 - DNA, 4424 bp, Homo sapiens
  source 1..4424: mol_type = genomic DNA
accgccaccatgagtggcctcggggacagttcatccgaccctgctaacccagactcacataagaggaaaggatcgccatgtgacacactggcatcaagcacggaaaagaggcgcagggagcaagaaaataaatatttagaagaactagctgagttactgtctgccaacattagtgacattgacagcttgagtgtaaaaccagacaaatgcaagattttgaagaaaacagtcgatcagatacagctaatgaagagaatggaacaagagaaatcaacaactgatgacgatgtacagaaatcagacatctcatcaagtagtcaaggagtgatagaaaaggaatccttgggacctcttcttttggaggctttggatggatttttctttgttgtgaactgtgaagggagaattgtatttgtgtcagagaatgtaaccagctacttaggttacaatcaggaggaattaatgaatacgagcgtctacagcatactgcacgtgggggatcatgcagaatttgtgaagaatctgctaccaaaatcactagtaaatggagttccttggcctcaagaggcaacacgacgaaatagccatacctttaactgcaggatgctaattcaccctccagatgagccagggaccgagaaccaagaagcttgccagcgttatgaagtaatgcagtgtttcactgtgtcacagccaaaatcaattcaagaggatggagaagatttccagtcatgtctgatttgtattgcacggcgattacctcggcctccagctattacgggtgtagaatcctttatgaccaagcaagatactacaggtaaaatcatctctattgatactagttccctgagagctgctggcagaactggttgggaagatttagtgaggaagtgcatttatgcttttttccaacctcagggcagagaaccatcttatgccagacagctgttccaagaagtgatgactcgtggcactgcctccagcccctcctatagattcatattgaatgatgggacaatgcttagcgcccacaccaagtgtaaactttgctaccctcaaagtccagacatgcaacctttcatcatgggaattcatatcatcgacagggagcacagtgggctttctcctcaagatgacactaattctggaatgtcaattccccgagtaaatccctcggtcaatcctagtatctctccagctcatggtgtggctcgttcatccacattgccaccatccaacagcaacatggtatccaccagaataaaccgccagcagagctcagaccttcatagcagcagtcatagtaattctagcaacagccaaggaagtttcggatgctcacccggaagtcagattgtagccaatgttgccttaaaccaaggacaggccagttcacagagcagtaatccctctttaaacctcaataattctcctatggaaggtacaggaatatccctagcacagttcatgtctccaaggagacaggttacttctggattggcaacaaggcccaggatgccaaacaattcctttcctcctaatatttcgacattaagctctcccgttggcatgacaagtagtgcctgtaataataataaccgatcttattcaaacatcccagtaacatctttacagggtatgaatgaaggacccaataactccgttggcttctctgccagttctccagtcctcaggcagatgagctcacagaattcacctagcagattaaatatacaaccagcaaaagctgagtccaaagataacaaagagattgcctcaattttaaatgaaatgattcaatctgacaacagctctagtgatggcaaacctctggattcagggcttctgcataacaatgacagactttcagatggagacagtaaatactctcaaaccagtcacaaactagtgcagcttttgacaacaactgccgaacagcagttacggcatgctgatatagacacaagctgcaaagatgtcctgtcttgcacaggcacttccaactctgcctctgctaactcttcaggaggttcttgtccctcttctcatagctcattgacagaacggcataaaattctacaccggctcttacaggagggtagcccctcagatatcaccactttgtctgtcgagcctgataaaaaggacagtgcatctacttctgtgtcagtgactggacaggtacaaggaaactccagtataaaactagaactggatgcttcaaagaaaaaagaatcaaaagaccatcagctcctacgctatcttttagataaagatgagaaagatttaagatcaactccaaacctgagcctggatgatgtaaaggtgaaagtggaaaagaaagaacagatggatccatgtaatacaaacccaaccccaatgaccaaacccactcctgaggaaataaaactggaggcccagagccagtttacagctgaccttgaccagtttgatcagttactgcccacgctggagaaggcagcacagttgccaggcttatgtgagacagacaggatggatggtgcggtcaccagtgtaaccatcaaatcggagatcctgccagcttcacttcagtccgccactgccagacccacttccaggctaaatagattacctgagctggaattggaagcaattgataaccaatttggacaaccaggaacaggcgatcagattccatggacaaataatacagtgacagctataaatcagagtaaatcagaagaccagtgtattagctcacaattagatgagcttctctgtccacccacaacagtagaagggagaaatgatgagaaggctcttcttgaacagctggtatccttccttagtggcaaagatgaaactgagctagctgaactagacagagctctgggaattgacaaacttgttcaggggggtggattagatgtattatcagagagatttccaccacaacaagcaacgccacctttgatcatggaagaaagacccaacctttattcccagccttactcttctccttctcctactgccaatctccctagccctttccaaggcatggtcaggcaaaaaccttcactggggacgatgcctgttcaagtaacacctccccgaggtgctttttcacctggcatgggcatgcagcccaggcaaactctaaacagacctccggctgcacctaaccagcttcgacttcaactacagcagcgattacagggacaacagcagttgatacaccaaaatcggcaagctatcttaaaccagtttgcagcaactgctcctgttggcatcaatatgagatcaggcatgcaacagcaaattacacctcagccacccctgaatgctcaaatgttggcacaacgtcagcgggaactgtacagtcaacagcaccgacagaggcagctaatacagcagcaaagagccatgcttatgaggcagcaaagctttgggaacaacctccctccctcatctggactaccagttcaaatggggaacccccgtcttcctcagggtgctccacagcaattcccctatccaccaaactatggtacaaatccaggaaccccacctgcttctaccagcccgttttcacaactagcagcaaatcctgaagcatccttggccaaccgcaacagcatggtgagcagaggcatgacaggaaacataggaggacagtttggcactggaatcaatcctcagatgcagcagaatgtcttccagtatccaggagcaggaatggttccccaaggtgaggccaactttgctccatctctaagccctgggagctccatggtgccgatgccaatccctcctcctcagagttctcttctccagcaaactccacctgcctccgggtatcagtcaccagacatgaaggcctggcagcaaggagcgataggaaacaacaatgtgttcagtcaagctgtccagaaccagcccacgcctgcacagccaggagtatacaacaacatgagcatcaccgtttccatggcaggtggaaatacgaatgttcagaacatgaacccaatgatggcccagatgcagatgagctctttgcagatgccaggaatgaacactgtgtgccctgagcagataaatgatcccgcactgagacacacaggcctctactgcaaccagctctcatccactgaccttctcaaaacagaagcagatggaacccaggtgcaacaggttcaggtgtttgctgacgtccagtgtacagtgaatctggtaggcggggacccttacctgaaccagcctggtccactgggaactcaaaagcccacgtcaggaccacagaccccccaggcccagcagaagagcctccttcagcagctactgactgaatagtaatgaactagtccgtaacttgaaagtatttcgatttcttggctttatatatcttgtggaaaggacgaaacaattcaccgtatcgtctcgga

SEQ ID NO: 1011 - DNA, 803 bp, Homo sapiens
  source 1..803: mol_type = genomic DNA
accgccaccatgaatctcaacttcacctctcctctacacccggcgtcttctcagaggcccacatccttcttcatcgaggacatcctgctgcacaagcccaagccgctgagagaggtggccccagaccatttcgccagctctctggcctctcgggtgcctctgctagactatggctaccccctcatgcccacacccaccctcttggctcctcacgcccatcaccctctgcataagggagaccaccatcatccttatttcctcaccacctcggggatgccagtcccagcgctgttcccgcacccgcagcacgcggagctgccggggaagcactgccgccgccgcaaagcccgcacggttttctctgactcgcagctctcgggcttggagaagaggttcgagatccagcgctacctgtccacgccagaacgagtggagctggccacggccctcagcctgtccgagacgcaggtgaaaacgtggttccagaaccggcggatgaagcataaaaagcaactgcggaaaagccaagacgaacccaaagcaccagacgggccagaaagccccgagggcagcccccgcggttcagaggccgccaccgccgccgaggctcggctgagcctgcccgccggtcccttcgtgctgaccgagccagaggacgaggtggacattggagacgagggggagctgggctcagggccgcacgtgctctagtaatgaactagtccgtaacttgaaagtatttcgatttcttggctttatatatcttgtggaaaggacgaggaattcgatgttaaccgcttata

SEQ ID NO: 1012 - DNA, 1373 bp, Homo sapiens
  source 1..1373: mol_type = genomic DNA
accgccaccatggcaatggtagttagcagctggcgagatccgcaggacgacgtggccgggggcaaccccggcggccccaaccccgcagcgcaggcggcccgcggcggcggcggcggcgccggcgagcagcagcagcaggcgggctcgggcgcgccgcacacgccgcagaccccgggccagcccggagcgcccgccacccccggcacggcgggggacaagggccagggcccgcccggttcgggccagagccagcagcacatcgagtgcgtggtgtgcggggacaagtcgagcggcaagcactacggccaattcacctgcgagggctgcaaaagtttcttcaagaggagcgtccgcaggaacttaacttacacatgccgtgccaacaggaactgtcccatcgaccagcaccaccgcaaccagtgccaatactgccgcctcaagaagtgcctcaaagtgggcatgaggcgggaagcggttcagcgaggaagaatgcctccaacccagcccaatccaggccagtacgcactcaccaacggggaccccctcaacggccactgctacctgtccggctacatctcgctgctgctgcgcgccgagccctaccccacgtcgcgctacggcagccagtgcatgcagcccaacaacattatgggcatcgagaacatctgcgagctggccgcgcgcctgctcttcagcgccgtcgagtgggcccgcaacatccccttcttcccggatctgcagatcaccgaccaggtgtccctgctacgcctcacctggagcgagctgttcgtgctcaacgcggcccagtgctctatgccgctgcacgtggcgccgttgctggccgccgccggcctgcatgcctcgcccatgtctgccgaccgcgtcgtggccttcatggaccacatccgcatcttccaggagcaggtggagaagctcaaggcgctacacgtcgactcagccgagtacagctgcctcaaagccatcgtgctgttcacgtcagacgcctgtggcctgtcggatgcggcccacatcgagagcctgcaggagaagtcgcagtgcgcactggaggagtacgtgaggagccagtaccccaaccagcccagccgttttggcaaactgctgctgcgactgccctcgctgcgcaccgtgtcctcctccgtcatcgagcagctcttcttcgtccgtttggtaggtaaaacccccatcgaaactctcatccgcgatatgttactgtctgggagcagcttcaactggccttacatgtccatccagtgctcctagtaatgaactagtccgtaacttgaaagtatttcgatttcttggctttatatatcttgtggaaaggacgacgtcatctagtgacacgctcgaac

SEQ ID NO: 1013 - DNA, 947 bp, Homo sapiens
  source 1..947: mol_type = genomic DNA
accgccaccatgcaagcggtttgggaccttgaacaaggcaaatatggttttgcggtgcagaggggcaggatgccgccgacccagccgacccacgggcagttcgcgctgaccaacggggatcccctcaactgccactcgtacctgtccggatatatttccctgctgttgcgcgcggagccctatcccacgtcgcgcttcggcagccaatgcatgcagcccaacaacatcatgggtatcgagaacatttgcgaactggccgcgaggatgctcttcagcgccgtcgagtgggcccggaacatccccttcttccccgacctgcagatcacggaccaggtggccctgcttcgcctcacctggagcgagctgtttgtgttgaatgcggcgcagtgctccatgcccctccacgtcgccccgctcctggccgccgccggcctgcatgcttcgcccatgtccgccgaccgggtggtcgcctttatggaccacatacggatcttccaagagcaagtggagaagctcaaggcgctgcacgttgactcagccgagtacagctgcctcaaggccatagtcctgttcacctcagatgcctgtggtctctctgatgtagcccatgtggaaagcttgcaggaaaagtctcagtgtgctttggaagaatacgttaggagccagtaccccaaccagccgacgagattcggaaagcttttgcttcgcctcccttccctccgcaccgtctcctcctcagtcatagagcaattgtttttcgtccgtttggtaggtaaaacccccatcgaaaccctcatccgggatatgttactgtccggcagcagttttaactggccgtatatggcaattcaatagtaatgaactagtccgtaacttgaaagtatttcgatttcttggctttatatatcttgtggaaaggacgatgctgatacgccgtagtacggtct

SEQ ID NO: 1014 - DNA, 1346 bp, Homo sapiens
  source 1..1346: mol_type = genomic DNA
accgccaccatggcaatggtagtcagcacgtggcgcgacccccaggacgaggtgcccggctcacagggcagccaggcctcgcaggcgccgcccgtgcccggcccgccgcccggcgccccgcacacgccacagacgcccggccaagggggcccagccagcacgccagcccagacggcggccggtggccagggcggccctggcggcccgggtagcgacaagcagcagcagcagcaacacatcgagtgcgtggtgtgcggagacaagtcgagcggcaagcactacggccagttcacgtgcgagggctgcaagagcttcttcaagcgcagcgtgcggaggaacctgagctacacgtgccgcgccaaccggaactgtcccatcgaccagcaccatcgcaaccagtgccagtactgccgcctcaaaaagtgcctcaaagtgggcatgagacgggaagcggtgcagaggggcaggatgccgccgacccagccgacccacgggcagttcgcgctgaccaacggggatcccctcaactgccactcgtacctgtccggatatatttccctgctgttgcgcgcggagccctatcccacgtcgcgcttcggcagccaatgcatgcagcccaacaacatcatgggtatcgagaacatttgcgaactggccgcgaggatgctcttcagcgccgtcgagtgggcccggaacatccccttcttccccgacctgcagatcacggaccaggtggccctgcttcgcctcacctggagcgagctgtttgtgttgaatgcggcgcagtgctccatgcccctccacgtcgccccgctcctggccgccgccggcctgcatgcttcgcccatgtccgccgaccgggtggtcgcctttatggaccacatacggatcttccaagagcaagtggagaagctcaaggcgctgcacgttgactcagccgagtacagctgcctcaaggccatagtcctgttcacctcagatgcctgtggtctctctgatgtagcccatgtggaaagcttgcaggaaaagtctcagtgtgctttggaagaatacgttaggagccagtaccccaaccagccgacgagattcggaaagcttttgcttcgcctcccttccctccgcaccgtctcctcctcagtcatagagcaattgtttttcgtccgtttggtaggtaaaacccccatcgaaaccctcatccgggatatgttactgtccggcagcagttttaactggccgtatatggcaattcaatagtaatgaactagtccgtaacttgaaagtatttcgatttcttggctttatatatcttgtggaaaggacgattactgcgtaaccaggatgatcaa

SEQ ID NO: 1015 - DNA, 887 bp, Homo sapiens
  source 1..887: mol_type = genomic DNA
accgccaccatgccgccgacccagccgacccacgggcagttcgcgctgaccaacggggatcccctcaactgccactcgtacctgtccggatatatttccctgctgttgcgcgcggagccctatcccacgtcgcgcttcggcagccaatgcatgcagcccaacaacatcatgggtatcgagaacatttgcgaactggccgcgaggatgctcttcagcgccgtcgagtgggcccggaacatccccttcttccccgacctgcagatcacggaccaggtggccctgcttcgcctcacctggagcgagctgtttgtgttgaatgcggcgcagtgctccatgcccctccacgtcgccccgctcctggccgccgccggcctgcatgcttcgcccatgtccgccgaccgggtggtcgcctttatggaccacatacggatcttccaagagcaagtggagaagctcaaggcgctgcacgttgactcagccgagtacagctgcctcaaggccatagtcctgttcacctcagatgcctgtggtctctctgatgtagcccatgtggaaagcttgcaggaaaagtctcagtgtgctttggaagaatacgttaggagccagtaccccaaccagccgacgagattcggaaagcttttgcttcgcctcccttccctccgcaccgtctcctcctcagtcatagagcaattgtttttcgtccgtttggtaggtaaaacccccatcgaaaccctcatccgggatatgttactgtccggcagcagttttaactggccgtatatggcaattcaatagtaatgaactagtccgtaacttgaaagtatttcgatttcttggctttatatatcttgtggaaaggacgagaggtactgtgcccacaactgaac

SEQ ID NO: 1016 - DNA, 560 bp, Homo sapiens
  source 1..560: mol_type = genomic DNA
accgccaccatgaagtcctgcaagcccagcggcccgccggcgggagcgcgcgttgcacccccgtgcgcgggcggcaccgagtgcgcgggcacgtgcgccggggccgggcggctggagagcgcggcgcgcaggcgcctggcggccaacgcgcgcgagcgccgccgcatgcaggggctcaacactgccttcgaccgcttacgcagggtggttccccagtggggccaggataaaaagctgtccaagtacgagaccctgcagatggccctgagctacatcatggctctgacccggatcctggccgaggccgagcgattcggctcggagcgggactgggtgggtctccactgtgagcacttcggccgcgaccactacctcccgttcccgggcgcgaagctgccgggcgagagcgagctgtacagccagagactcttcggcttccagcccgagcccttccagatggccacctagtaatgaactagtccgtaacttgaaagtatttcgatttcttggctttatatatcttgtggaaaggacgactatgtgtcgttgatttcaacatt

SEQ ID NO: 1017 - DNA, 818 bp, Homo sapiens
  source 1..818: mol_type = genomic DNA
accgccaccatggctcccaagaaacgcccagaaacccagaagacctccgagattgtattacgccccaggaacaagaggagcaggagtcccctggagctggagcccgaggccaagaagctctgtgcgaagggctccggtcctagcagaagatgtgactcagactgcctctgggtggggctggctggcccacagatcctgccaccatgccgcagcatcgtcaggaccctccaccagcataagctgggcagagcttcctggccatctgtccagcaggggctccagcagtcctttttgcacactctggattcttaccggatattacaaaaggctgccccctttgacaggagggctacatccttggcgtggcacccaactcaccccagcaccgtggctgtgggttccaaagggggagatatcatgctctggaattttggcatcaaggacaaacccaccttcatcaaaggggcagcctggcatcctcgctacaacctcattgttgtgggccgatacccagatcctaatttcaaaagttgtaccccttatgaattgaggacgatcgacgtgttcgatggaaactcagggaagatgatgtgtcagctctatgacccagaatcttctggcatcagttcgcttaatgaattcaatcccatgggggacacgctggcctctgcaatgggttaccacattctcatctggagccaggaggaagccaggacacggaagtagtaatgaactagtccgtaacttgaaagtatttcgatttcttggctttatatatcttgtggaaaggacgatgagccgtgcctcatacacgaata

SEQ ID NO: 1018 - DNA, 3524 bp, Homo sapiens
  source 1..3524: mol_type = genomic DNA
accgccaccatgtcgtacaactacgtggtaacggcccagaagcccaccgccgtgaacggctgcgtgaccggacactttacttcggccgaagacttaaacctgttgattgccaaaaacacgagattagagatctatgtggtcaccgccgaggggcttcggcccgtcaaagaggtgggcatgtatgggaagattgcggtcatggagcttttcaggcccaagggggagagcaaggacctgctgtttatcttgacagcgaagtacaatgcctgcatcctggagtataaacagagtggcgagagcattgacatcattacgcgagcccatggcaatgtccaggaccgcattggccgcccctcagagaccggcattattggcatcattgaccctgagtgccggatgattggcctgcgtctctatgatggccttttcaaggttattccactagatcgcgataataaagaactcaaggccttcaacatccgcctggaggagctgcatgtcattgatgtcaagttcctatatggttgccaagcacctactatttgctttgtctaccaggaccctcaggggcggcacgtaaaaacctatgaggtgtctctccgagaaaaggaattcaataagggcccttggaaacaggaaaatgtcgaagctgaagcttccatggtgatcgcagtcccagagccctttgggggggccatcatcattggacaggagtcaatcacctatcacaatggtgacaaatacctggctattgcccctcctatcatcaagcaaagcacgattgtgtgccacaatcgagtggaccctaatggctcaagatacctgctgggagacatggaaggccggctcttcatgctgcttttggagaaggaggaacagatggatggcaccgtcactctcaaggatctccgtgtagaactccttggagagacctctattgctgagtgcttgacataccttgataatggtgttgtgtttgtcgggtctcgcctgggtgactcccagcttgtgaagctcaacgttgacagtaatgaacaaggctcctatgtagtggccatggaaacctttaccaacttaggacccattgtcgatatgtgcgtggtggacctggagaggcaggggcaggggcagctggtcacttgctctggggctttcaaggaaggttctttgcggatcatccggaatggaattggaatccacgagcatgccagcattgacttaccaggcatcaaaggattatggccactgcggtctgaccctaatcgtgagactgatgacactttggtgctctcttttgtgggccagacaagagttctcatgttaaatggagaggaggtagaagaaaccgaactgatgggtttcgtggatgatcagcagactttcttctgtggcaacgtggctcatcagcagcttatccagatcacttcagcatcggtgaggttggtctctcaagaacccaaagctctggtcagtgaatggaaggagcctcaggccaagaacatcagtgtggcctcctgcaatagcagccaggtggtggtggctgtaggcagggccctctactatctgcagatccatcctcaggagctccggcagatcagccacacagagatggaacatgaagtggcttgcttggacatcaccccattaggagacagcaatggactgtcccctctttgtgccattggcctctggacggacatctcggctcgtatcttgaagttgccctcttttgaactactgcacaaggagatgctgggtggagagatcattcctcgctccatcctgatgaccacctttgagagtagccattacctcctttgtgccttgggagatggagcgcttttctactttgggctcaacattgagacaggtctgttgagcgaccgtaagaaggtgactttgggcacccagcccaccgtattgaggacttttcgttctctttctaccaccaacgtctttgcttgttctgaccgccccactgtcatctatagcagcaaccacaaattggtcttctcaaatgtcaacctcaaggaagtgaactacatgtgtcccctcaattcagatggctatcctgacagcctggcgctggccaacaatagcaccctcaccattggcaccatcgatgagatccagaagctgcacattcgcacagttcccctctatgagtctccaaggaagatctgctaccaggaagtgtcccagtgtttcggggtcctctccagccgcattgaagtccaagacacgagtgggggcacgacagccttgaggcccagcgctagcacccaggctctgtccagcagtgtaagctccagcaagctgttctccagcagcactgctcctcatgagacctcctttggagaagaggtggaggtgcacaacctacttatcattgaccaacacacctttgaagtgcttcatgcccaccagtttctgcagaatgaatatgccctcagtctggtttcctgcaagctgggcaaagaccccaacacttacttcattgtgggcacagcaatggtgtatcctgaagaggcagagcccaagcagggtcgcattgtggtctttcagtattcggatggaaaactacagactgtggctgaaaaggaagtgaaaggggccgtgtactctatggtggaatttaacgggaagctgttagccagcatcaatagcacggtgcggctctatgagtggacaacagagaaggagctgcgcactgagtgcaaccactacaacaacatcatggccctctacctgaagaccaagggcgacttcatcctggtgggcgaccttatgcgctcagtgctgctgcttgcctacaagcccatggaaggaaactttgaagagattgctcgagactttaatcccaactggatgagtgctgtggaaatcttggatgatgacaattttctgggggctgaaaatgcctttaacttgtttgtgtgtcaaaaggatagcgctgccaccactgacgaggagcggcagcacctccaggaggttggtcttttccacctgggcgagtttgtcaatgtcttttgccacggctctctggtaatgcagaatctgggtgagacttccacccccacacaaggctcggtgctcttcggcacggtcaacggcatgatagggctggtgacctcactgtcagagagctggtacaacctcctgctggacatgcagaatcgactcaataaagtcatcaaaagtgtggggaagatcgagcactccttctggagatcctttcacaccgagcggaagacagaaccagccacaggtttcatcgacggtgacttgattgagagtttcctggatattagccgccccaagatgcaggaggtggtggcaaacctacagtatgacgatggcagcggtatgaagcgagaggccactgcagacgacctcatcaaggttgtggaggagctaactcggatccattagtaatgaactagtccgtaacttgaaagtatttcgatttcttggctttatatatcttgtggaaaggacgacctatctccgtgttgcggtcccat

SEQ ID NO: 1019 - DNA, 1067 bp, Homo sapiens
  source 1..1067: mol_type = genomic DNA
accgccaccatgaagcacatcccggtcctcgaggacgggccgtggaagaccgtgtgcgtgaaggagctgaacggccttaagaagctcaagcggaaaggcaaggagccggcgcggcgcgcgaacggctataaaactttccgactggacttggaagcgcccgagccccgcgccgtagccaccaacgggctgcgggacaggacccatcggctgcagccggtcccggtaccggtgccggtgccagtcccagtggcgccggccgttcccccaagagggggcacggacacagccggggagcgcgggggctctcgggcgcccgaggtctccgacgcgcggaaacgctgcttcgccctaggcgcagtggggccaggactccccacgccgccgccgccgccgcctcctgcgccccagagccaggcacctgggggcccagaggcacagcctttccgggagccgggtctgcgtcctcgcatcttgctgtgcgcaccgcccgcgcgccccgcgccgtcagcacccccagcaccgccagcgcccccggagtccactgtgcgccctgcgcccccgacgcgccccggggaaagttcctactcgtcaatttcacacgtaatttacaataaccaccaggattcctccgcgtcgcctaggaaacgaccgggcgaagcgactgccgcctcctccgagatcaaagccctgcagcagacccggaggctcctggcgaacgccagggagcggacgcgggtgcacaccatcagcgcagccttcgaggcgctcaggaagcaggtgccgtgctactcatatgggcagaagctgtccaaactggccatcctgaggatcgcctgtaactacatcctgtccctggcgcggctggctgaccttgactacagtgccgaccacagcaacctcagcttctccgagtgtgtgcagcgctgcacccgcaccctgcaggccgagggacgtgccaagaagcgcaaggagtagtaatgaactagtccgtaacttgaaagtatttcgatttcttggctttatatatcttgtggaaaggacgaacgagctcagcgccctcatttgcc

SEQ ID NO: 1020 - DNA, 1652 bp, Homo sapiens
  source 1..1652: mol_type = genomic DNA
accgccaccatgcatgggagaaaggatgatgcacaaaagcagcctgttaaaaatcagcttggattaaacccgcagtcacatctaccagaactgcagctatttcaagctgaagggaaaatatataaatatgatcacatggaaaaatctgtcaacagtagttccttagtttccccaccccaacgtatttcttctactgtcaaaacccacatttctcatacatatgaatgtaattttgtggattcattattcacacaaaaagagaaagcaaatattgggacagaacactacaaatgtagtgagcgtggcaaggcctttcatcaaggcttacattttactatacatcaaataatccatactaaagagacgcaatttaaatgtgatatatgtggcaagatcttcaataaaaaatcaaaccttgcaagtcatcaaagaattcatactggagagaagccatataaatgtaatgaatgtggcaaggtcttccataatatgtcacaccttgcacagcatcgcaggattcatactggagagaaaccatataaatgtaatgaatgtggcaaggtctttaatcaaatttcacaccttgcacaacatcaaagaattcataccggagagaaaccttataaatgtaatgaatgtggaaaggtcttccatcaaatttcacaccttgcacaacatcggacaattcatactggagaaaaaccttacgaatgtaacaaatgtggcaaggtgttcagtcgcaattcctaccttgtacaacatctgatcattcatactggagagaaaccttacagatgtaatgtatgtggaaaggtcttccatcatatttcacaccttgcacaacatcagagaatccacactggagagaaaccttacaaatgtaatgagtgtggcaaggtcttcagtcacaagtcatccctagtaaatcactggagaattcatactggagagaaaccttacaaatgtaatgagtgtggcaaggtcttcagtcacaagtcatccctagtaaatcactggagaatccacactggagagaaaccttacaaatgtaatgaatgtggcaaggtcttcagtcgcaattcataccttgcccaacatctgataattcatgccggtgagaaaccttataagtgtgatgaatgtgacaaagcattcagtcaaaattcacatcttgtacaacatcacagaatccatactggagagaaaccttacaaatgtgatgaatgtggcaaagtcttcagtcaaaattcataccttgcatatcattggagaattcatactggagaaaaagcttataaatgtaatgaatgtgggaaggtcttcggtctaaactcatccctagcacatcatcggaaaattcacactggagagaaacctttcaaatgtaatgaatgtggcaaagcttttagtatgcgttcaagcctcactaatcatcatgcgatccacactggagagaaacatttcaaatgtaatgaatgtggcaaactcttccgcgacaattcatatcttgtacgtcatcagagatttcatgccggaaagaaatctaacacatgtaattagtaatgaactagtccgtaacttgaaagtatttcgatttcttggctttatatatcttgtggaaaggacgacacggtttaattgtaataggaaat

SEQ ID NO: 1021 - DNA, 1598 bp, Homo sapiens
  source 1..1598: mol_type = genomic DNA
accgccaccatggccgccgccgccgccgccgcgccgagcggaggaggaggaggaggcgaggaggagagactggaagaaaagtcagaagaccaggacctccagggcctcaaggacaaacccctcaagtttaaaaaggtgaagaaagataagaaagaagagaaagagggcaagcatgagcccgtgcagccatcagcccaccactctgctgagcccgcagaggcaggcaaagcagagacatcagaagggtcaggctccgccccggctgtgccggaagcttctgcctcccccaaacagcggcgctccatcatccgtgaccggggacccatgtatgatgaccccaccctgcctgaaggctggacacggaagcttaagcaaaggaaatctggccgctctgctgggaagtatgatgtgtatttgatcaatccccagggaaaagcctttcgctctaaagtggagttgattgcgtacttcgaaaaggtaggcgacacatccctggaccctaatgattttgacttcacggtaactgggagagggagcccctcccggcgagagcagaaaccacctaagaagcccaaatctcccaaagctccaggaactggcagaggccggggacgccccaaagggagcggcaccacgagacccaaggcggccacgtcagagggtgtgcaggtgaaaagggtcctggagaaaagtcctgggaagctccttgtcaagatgccttttcaaacttcgccagggggcaaggctgaggggggtggggccaccacatccacccaggtcatggtgatcaaacgccccggcaggaagcgaaaagctgaggccgaccctcaggccattcccaagaaacggggccgaaagccggggagtgtggtggcagccgctgccgccgaggccaaaaagaaagccgtgaaggagtcttctatccgatctgtgcaggagaccgtactccccatcaagaagcgcaagacccgggagacggtcagcatcgaggtcaaggaagtggtgaagcccctgctggtgtccaccctcggtgagaagagcgggaaaggactgaagacctgtaagagccctgggcggaaaagcaaggagagcagccccaaggggcgcagcagcagcgcctcctcaccccccaagaaggagcaccaccaccatcaccaccactcagagtccccaaaggcccccgtgccactgctcccacccctgcccccacctccacctgagcccgagagctccgaggaccccaccagcccccctgagccccaggacttgagcagcagcgtctgcaaagaggagaagatgcccagaggaggctcactggagagcgacggctgccccaaggagccagctaagactcagcccgcggttgccaccgccgccacggccgcagaaaagtacaaacaccgaggggagggagagcgcaaagacattgtttcatcctccatgccaaggccaaacagagaggagcctgtggacagccggacgcccgtgaccgagagagttagctagtaatgaactagtccgtaacttgaaagtatttcgatttcttggctttatatatcttgtggaaaggacgaagtagaggctgtcagacctagcga

SEQ ID NO: 1022 - DNA, 923 bp, Homo sapiens
  source 1..923: mol_type = genomic DNA
accgccaccatgagccctaaacgcgatgggttggggacaggtgatggtctgcactcacaggttttacaggagcaggtctccacaggagacaatctccatgaatgtgactcccagggaccaagtaaagacactttggttcgtgaggggaagacctacaaatgcaaggaatgtgggagcgtgtttaacaaaaacagcctccttgttcgacatcagcagattcacactggggtgaagccttatgaatgccaggagtgtggaaaagcctttcctgaaaaggtcgacttcgttcgacccatgaggattcacacaggggagaagccctgtaagtgcgtggagtgcgggaaggtcttcaaccgcaggtcgcacctcctgtgctaccgccagattcacactggagagaagccctatgagtgcagcgagtgtggaaagaccttcagctatcactctgtcttcatccagcatcgtgtgacccacactggagaaaaactctttgggtgcaaagaatgtggaaaaaccttttactacaactcttccttaacccggcacatgaagattcacactggagagaagccctgcaagtgcagtgagtgcgggaagaccttcacctaccgctctgttttcttccgacatagtatgacccacactgcaggaaagccctacgagtgcaaagaatgtgggaaaggtttttactacagctattccctcactcgacatacaaggagtcacactggagagaaaccttatgagtgccttgaacatagaaaggactttggctaccactctgcttttgcccaacagagtaagatccactctggaggaaaaaacctttagtaatgaactagtccgtaacttgaaagtatttcgatttcttggctttatatatcttgtggaaaggacgaaatataagctctacgcttaaagtt

SEQ ID NO: 1023 - DNA, 365 bp, Homo sapiens
  source 1..365: mol_type = genomic DNA
accgccaccatgggaccattgacatttagggatgtggccatagaattctctctgaaggagtggcaatgcctggacactgcacagcggaatttatatagaaatgtgatgttagagaactacagaaacctggtcttcctgggtattactgtttctaagccagacctgatcacttgtctggagcaagggaaagaggcctggagtatgaagagacatgagatcatggtggccaaacccacagaatcttactctgtcacccagtctggaatgcagtagtaatgaactagtccgtaacttgaaagtatttcgatttcttggctttatatatcttgtggaaaggacgatgcgtgctacttccaatcgcacgt

SEQ ID NO: 1024 - DNA, 1889 bp, Homo sapiens
  source 1..1889: mol_type = genomic DNA
accgccaccatgggaccattgacatttagggatgtggccatagaattctctctgaaggagtggcaatgcctggacactgcacagcggaatttatatagaaatgtgatgttagagaactacagaaacctggtcttcctgggtattactgtttctaagccagacctgatcacttgtctggagcaagggaaagaggcctggagtatgaagagacatgagatcatggtggccaaacccacagttatgtgttctcattttgcccaagacctttggccggagcagaatataaaagattctttccaaaaagtgacactgaaaagatatggaaaatgtagacatgaaaatttaccattaagaaaaggctgtgaaagtatggatgagtgtaagatgcacaaaggaggttgtaatggacttaaccaatgtctcacagctacccagagcaaaatatttcaatgtgataaatatgtaaaagtcgctcataaattttcaaattcaaacagacatgagataagacatactaaaaagaaacctttcaaatgtacaaaatgtggcaaatcatttggcatgatttcatgcctaactgaacatagcagaattcatactagagtaaatttctacaaatgtgaagaatgtggaaaagcctttaactggtcctcaacccttactaaacataagagaattcatacgggagagaaaccttacaaatgtgaagaatgtggtaaagcctttaaccagtcctcaaaccttattaaacataagaaaattcatactggagagaaaccctacaaatgtgaagaatgtggcaaaacttttaaccgattctcaactcttactacccataagataattcatactggagagaaaccctacaaatgtaaagaatgtggtaaagcttttaaccgatcttcaacccttactacccatagaaaaattcatactggagagaaaccttacaaatgtgaagaatgtggcaaagcctttaagcagtcctcaaaccttactacacataagataattcatactggagagaaaccctacaaatgtaaaaaatgtggaaaagcctttaaccagtctgcacaccttaccacacatgaggtaattcatactggagagaaaccctacaaatgtgaaaaatgtggaaaagcctttaatcatttctcacaccttactacacataagataattcatactggagagaaaccttacaaatgtaaagaatgtggtaaagcttttaaacactcttcaacccttactaaacataagataattcatactggagagaagccttacaaatgtaaagaatgtgaaaaagcttttaaccaatcctcaaaacttactgaacataagaaaattcatactggagagaaaccctatgaatgtgaaaaatgtggcaaagcttttaaccagtcctcaaatcttactagacataagaaaagtcatacagaagagaaaccttacaaatgtgaagaatgtggcaaaggttttaaatggccctcaacccttactatccataagataattcatactggagagaaaccatacaaatgtgaagaatgtggcaaagcttttaaccaatcctcaaaacttaccaaacataagaaaattcatactggagagaaaccctacacatgtgaagaatgtggcaaagcctttaaccagtcctcaaaccttactaaacataagagaattcatactggagaaaaaccttacaaatgtgaagaatgtgacaaagcttttaaatggtcctcagtccttactaaacataagataattcataccggagaaaaattacaaatatagtaatgaactagtccgtaacttgaaagtatttcgatttcttggctttatatatcttgtggaaaggacgatggcctaaataggcgctcgcacca

SEQ ID NO: 1025 - DNA, 2318 bp, Homo sapiens
  source 1..2318: mol_type = genomic DNA
accgccaccatgaccatgttacaggagtcattctcatttgacgatttatctgtggacttcacccaaaaggagtggcagctactggatccctctcagaagaatttatacaaggatgtgatgttggagaactatagcagcctagtgtcactggggtatgaagttatgaaaccagatgtcatcttcaaattggagcaaggagaagagccgtgggtaggagatggagaaattccaagttcagattctccagaagtctggaaagtagatggtaacatgatgtggcaccaggataaccaagacaagcttaaaattataaaaagaggtcatgaatgtgatgcatttggaaaaaatttcaatctgaacatgaactttgttcctttaaggaaatcaaacagtgaaggtgacttagatggattgattttaaaacatcatttagatttgcttattccaaaaggagattatggaaaagcagaatcagatgactttaatgtgtttgataatttttttctccattccaagcctgaggatactgatacctggttaaaatactatgactgtgataaatataaagagagctataaaaagtcacagattatcatatatcatagaaatcgtttaggggagaaactctatgaatgcagtgaatgtaggaagcgcttcagtaagaaaccaagtctcattaaacatcagagcagacatataagagacatagcctttggctgtggtaattgtggcaaaacctttccccagaagtctcagtttattacacatcacagaactcatacaggagaaaaaccttataattgtagccagtgtgggaaagccttctcccaaaagtcacagctcacatcccatcagcggacacatacaggagagaaaccttatgagtgtggtgaatgtgggaaagccttctcccggaagtcacatctcatatcgcattggagaacacacacaggagagaaaccctatggatgcaatgaatgtgggagggcctttagtgaaaagtccaatctcattaaccatcagagaattcataccggtgagaagccttttgaatgcagggaatgtgggaaagccttcagcaggaagtcacaactcgttacacatcacagaactcacacaggaacaaaaccctttggatgtagtgattgtagaaaagcattctttgagaagtcagagcttattagacatcagacaattcatactggagagaaaccctatgaatgcagcgagtgtaggaaagcatttagagagaggtcgagtctcattaatcatcagagaacacatacaggagagaaacctcatggatgcattcagtgtgggaaggccttctcccagaagtcacatctcatatcacatcagatgacacacacaggagaaaaaccctttatatgcagtaaatgtgggaaagccttcagcaggaaatcacagctcgttagacatcagagaactcatacgggagaaaaaccgtatgaatgcagtgagtgtgggaaagctttcagtgaaaaattaagtctcactaatcatcaaagaattcatacaggagaaaaaccatatgtatgcagtgaatgtgggaaagccttttgtcagaagtcacatctcatatcacatcagaggacacatacaggggagaaaccctatgaatgcagtgaatgtgggaaggcctttggtgagaagtcaagtcttgcaactcatcagagaactcatactggagaaaaaccgtatgaatgcagggactgtgaaaaagctttctcccagaaatcacagctaaatacccatcagagaattcacactggagagaaaccctatgaatgcagtctttgtaggaaagctttttttgagaagtcggagctaattagacatctgagaactcatacaggagaaaaaccttatgaatgcaatgaatgtagaaaagccttcagggagaagtcaagtctcatcaatcatcagagaatacatacaggagagaagccttttgaatgcagtgagtgtggcaaagctttctctcggaagtcacaccttataccacatcaaaggacacatacgggtgagaaaccctatggatgcagtgaatgtaggaaggccttctctcagaagtcacagctggttaatcatcagagaattcatacaggagagaagccttatcgatgcattgaatgtgggaaagctttctcacagaagtcacagctcatcaatcatcagagaactcatacagtaaaaaaatcctagtaatgaactagtccgtaacttgaaagtatttcgatttcttggctttatatatcttgtggaaaggacgagcttcgctagagtagaaatctccc

SEQ ID NO: 1026 - DNA, 1265 bp, Homo sapiens
  source 1..1265: mol_type = genomic DNA
accgccaccatgtctgtggctttcgcggccccgaggcagcgaggcaagggggagatcactcccgctgcgattcagaagatgttggatgacaataaccatcttattcagtgtataatggactctcagaataaaggaaagacctcagagtgttctcagtatcagcagatgttgcacacaaacttggtataccttgctacaatagcagattctaatcaaaatatgcagtctcttttaccagcaccacccacacagaatatgcctatgggtcctggagggatgaatcagagcggccctcccccacctccacgctctcacaacatgccttcagatggaatggtaggtgggggtcctcctgcaccgcacatgcagaaccagatgaacggccagatgcctgggcctaaccatatgcctatgcagggacctggacccaatcaactcaatatgacaaacagttccatgaatatgccttcaagtagccatggatccatgggaggttacaaccattctgtgccatcatcacagagcatgccagtacagaatcagatgacaatgagtcagggacaaccaatgggaaactatggtcccagaccaaatatgagtatgcagccaaaccaaggtccaatgatgcatcagcagcctccttctcagcaatacaatatgccacagggaggcggacagcattaccaaggacagcagccacctatgggaatgatgggtcaagttaaccaaggcaatcatatgatgggtcagagacagattcctccctatagacctcctcaacagggcccaccacagcagtactcaggccaggaagactattacggggaccaatacagtcatggtggacaaggtcctccagaaggcatgaaccagcaatattaccctgatggaaattcacagtatggccaacagcaagatgcataccagggaccacctccacaacagggatatccaccccagcagcagcagtacccagggcagcaaggttacccaggacagcagcagggctacggtccttcacagggtggtccaggtcctcagtatcctaactacccacagggacaaggtcagcagtatggaggatatagaccaacacagcctggaccaccacagccaccccagcagaggccttatggatatgaccagggacagtatggaaattaccagcagtagtaatgaactagtccgtaacttgaaagtatttcgatttcttggctttatatatcttgtggaaaggacgataatcggcgtttccagcgaacggg

SEQ ID NO: 1027 - DNA, 1289 bp, Homo sapiens
  source 1..1289: mol_type = genomic DNA
accgccaccatgttggatgacaataaccatcttattcagtgtataatggactctcagaataaaggaaagacctcagagtgttctcagtatcagcagatgttgcacacaaacttggtataccttgctacaatagcagattctaatcaaaatatgcagtctcttttaccagcaccacccacacagaatatgcctatgggtcctggagggatgaatcagagcggccctcccccacctccacgctctcacaacatgccttcagatggaatggtaggtgggggtcctcctgcaccgcacatgcagaaccagatgaacggccagatgcctgggcctaaccatatgcctatgcagggacctggacccaatcaactcaatatgacaaacagttccatgaatatgccttcaagtagccatggatccatgggaggttacaaccattctgtgccatcatcacagagcatgccagtacagaatcagatgacaatgagtcagggacaaccaatgggaaactatggtcccagaccaaatatgagtatgcagccaaaccaaggtccaatgatgcatcagcagcctccttctcagcaatacaatatgccacagggaggcggacagcattaccaaggacagcagccacctatgggaatgatgggtcaagttaaccaaggcaatcatatgatgggtcagagacagattcctccctatagacctcctcaacagggcccaccacagcagtactcaggccaggaagactattacggggaccaatacagtcatggtggacaaggtcctccagaaggcatgaaccagcaatattaccctgatggtcataatgattacggttatcagcaaccgtcgtatcctgaacaaggctacgataggccttatgaggattcctcacaacattactacgaaggaggaaattcacagtatggccaacagcaagatgcataccagggaccacctccacaacagggatatccaccccagcagcagcagtacccagggcagcaaggttacccaggacagcagcagggctacggtccttcacagggtggtccaggtcctcagtatcctaactacccacagggacaaggtcagcagtatggaggatatagaccaacacagcctggaccaccacagccaccccagcagaggccttatggatatgaccagggacagtatggaaattaccagcagtagtaatgaactagtccgtaacttgaaagtatttcgatttcttggctttatatatcttgtggaaaggacgatatctgaagatgaaatgtgtgcta

SEQ ID NO: 1028 - DNA, 1358 bp, Homo sapiens
  source 1..1358: mol_type = genomic DNA
accgccaccatgtctgtggctttcgcggccccgaggcagcgaggcaagggggagatcactcccgctgcgattcagaagatgttggatgacaataaccatcttattcagtgtataatggactctcagaataaaggaaagacctcagagtgttctcagtatcagcagatgttgcacacaaacttggtataccttgctacaatagcagattctaatcaaaatatgcagtctcttttaccagcaccacccacacagaatatgcctatgggtcctggagggatgaatcagagcggccctcccccacctccacgctctcacaacatgccttcagatggaatggtaggtgggggtcctcctgcaccgcacatgcagaaccagatgaacggccagatgcctgggcctaaccatatgcctatgcagggacctggacccaatcaactcaatatgacaaacagttccatgaatatgccttcaagtagccatggatccatgggaggttacaaccattctgtgccatcatcacagagcatgccagtacagaatcagatgacaatgagtcagggacaaccaatgggaaactatggtcccagaccaaatatgagtatgcagccaaaccaaggtccaatgatgcatcagcagcctccttctcagcaatacaatatgccacagggaggcggacagcattaccaaggacagcagccacctatgggaatgatgggtcaagttaaccaaggcaatcatatgatgggtcagagacagattcctccctatagacctcctcaacagggcccaccacagcagtactcaggccaggaagactattacggggaccaatacagtcatggtggacaaggtcctccagaaggcatgaaccagcaatattaccctgatggtcataatgattacggttatcagcaaccgtcgtatcctgaacaaggctacgataggccttatgaggattcctcacaacattactacgaaggaggaaattcacagtatggccaacagcaagatgcataccagggaccacctccacaacagggatatccaccccagcagcagcagtacccagggcagcaaggttacccaggacagcagcagggctacggtccttcacagggtggtccaggtcctcagtatcctaactacccacagggacaaggtcagcagtatggaggatatagaccaacacagcctggaccaccacagccaccccagcagaggccttatggatatgaccagggacagtatggaaattaccagcagtagtaatgaactagtccgtaacttgaaagtatttcgatttcttggctttatatatcttgtggaaaggacgacaaggtctctagaacacttgcgcc

SEQ ID NO: 1029 - DNA, 2681 bp, Homo sapiens
  source 1..2681: mol_type = genomic DNA
accgccaccatggacttcaccttgggagactgggagcagctcgggctggaacagggggacacgttctgggacacagcgttggacaattgccaggacctcttcctgctggaccccccaagacccaacctgacctcccacccagatggcagtgaagatctggagcctctggcaggaggaagcccagaagcaacaagccctgatgtgactgagaccaagaactctcctctgatggaggatttcttcgaagaaggattctcccaggagattatagagatgttatccaaggatggcttctggaactccaatttcggagaagcctgtatagaggacacctggttagatagtttgctaggcgatccagaaagtcttctgaggtctgatattgccaccaacggggaaagtcccacggaatgcaagagtcatgaattaaagagaggactcagtcctgtgtccaccgtttccacgggagaagattccatggtgcataatgtttctgaaaagaccctcacaccagctaagtctaaggaatataggggtgagtttttctcctactccgaccacagccagcaggattctgttcaggaaggggagaaaccatatcaatgtagtgaatgtgggaaaagcttcagtgggagttaccgtcttacccagcactggatcactcatactagggagaaacccactgtccatcaagagtgtgagcaaggttttgaccggaatgcttccctttctgtgtatccgaaaactcacacgggctacaaattctatgtgtgtaatgaatatgggacaacttttagtcagagtacatacctgtggcatcagaaaactcacactggagaaaaaccatgtaagagtcaagatagtgaccacccacccagtcatgacacacagcctggtgagcatcagaaaactcacacagatagtaagtcctacaactgtaacgaatgcggcaaggcttttacccggatcttccaccttactcggcaccagaagatccacactcggaaacgctatgagtgttccaagtgccaggcgaccttcaacttgagaaaacacctcatccaacatcagaaaactcacgctgcaaaaactacctctgagtgtcaggagtgtgggaagatttttaggcacagttcgctgctcattgaacaccaggctcttcatgctggagaggagccttataagtgtaacgaacgtgggaaatccttcaggcataactctaccctaaagatccatcagagggttcacagtggagagaagccttacaaatgcagtgagtgtgggaaggccttccaccggcacactcaccttaatgaacatcggcgaattcatacaggctacagaccccacaaatgtcaggaatgcgtcaggagtttcagccggccctcacatctgatgcgacatcaggccattcacaccgcagaaaagccctatagctgtgctgaatgcaaggagactttcagcgataacaatcgccttgtgcaacaccagaaaatgcacactgtcaaaaccccatatgaatgtcaggagtgcggagaacgcttcatttgcggctcaaccctgaagtgccacgagagtgttcacgccagagaaaaacaaggattttttgtgagtgggaagatcttggatcagaacccagaacagaaagagaagtgctttaagtgtaacaaatgtgagaaaacctttagctgcagcaaatacctaactcagcacgagaggattcacaccaggggagtgaagccctttgaatgtgaccagtgtgggaaagcctttggccaaagtactcggctcattcaccatcaaagaatccactctagagtgaggctgtataaatggggtgagcaagggaaagccatcagcagtgcctcccttatcaaacttcagtccttccacacaaaggagcacccttttaaatgtaacgaatgcggaaagaccttcagccacagtgcacacctctcaaaacatcagttaattcacgctggagagaatccctttaaatgtagtaagtgtgacagagtcttcacccagagaaactaccttgttcagcatgagcgaactcatgccagaaagaagccgttggtgtgtaacgaatgcgggaaaacgttccgtcagagctcatgcctttctaagcatcagagaattcactcaggtgagaagccctatgtatgtgattactgcgggaaggccttcggcctgagtgctgagcttgtccgccaccagagaattcacactggagaaaagccttatgtttgtcaggaatgcgggaaagccttcacccagagctcatgcctttctattcaccggagagttcacactggggagaagccctacagatgtggtgaatgtgggaaagcctttgcccagaaagcaaatctaacacagcaccagagaattcacacaggggagaagccttactcctgtaatgtgtgtggcaaagcttttgtcctcagtgcccatctcaaccagcacctgagagttcacacccaggagacactttatcagtgtcaacgttgccagaaagcctttcggtgccactcgagcctcagccgccatcagcgtgtacacaacaagcagcaatactgcctgtagtaatgaactagtccgtaacttgaaagtatttcgatttcttggctttatatatcttgtggaaaggacgaatcgagaggtcagacacatttacc

SEQ ID NO: 1030 - DNA, 1559 bp, Homo sapiens
  source 1..1559: mol_type = genomic DNA
accgccaccatgaatgagtatcctaaaaaaagaaaaaggaagactctacacccttctcgttattcagattcctctggaataagcagaattgcagatggattcaatggaattttctctgatcattgttacagtgtctgttctatgagacagccagatttaaaatattttgacaacaaagatgatgattctgataccgagacgtcaaatgacttgccaaaatttgcagatggaatcaaggccagaaacagaaatcagaactacctggttcccagtcctgtacttagaattctagaccacactgccttttctacagaaaaatctgctgatattgtaatttgtgatgaagagtgtgactcacctgaatcagtcaaccagcaaacccaagaggagagtcctatagaagttcacactgctgaagatgttccaattgctgtagaagtgcatgcgatttctgaggattatgatatagagacagaaaacaattcctctgagagtctccaagaccaaactgatgaagaaccgccagctaaactttgtaaaattcttgacaagagccaagctttgaatgtgactgcccagcagaaatggcctttactgagagctaatagcagtggcctctataaatgtgaactttgtgagtttaacagcaaatatttttctgacttaaagcagcatatgatcctgaagcataaacgtactgattcaaatgtgtgtcgagtatgcaaggaaagtttctctaccaatatgcttctgatagaacatgccaaactgcatgaagaggatccctacatttgtaaatactgtgattataagacagtaatttttgagaacctcagccagcacattgcagacacccattttagtgatcacctctattggtgtgaacagtgtgatgtacagttctcctcaagcagtgaactctacctacatttccaggagcacagctgtgatgaacagtacttgtgtcagttctgtgaacatgaaactaatgatccagaagacttgcatagccatgtggtaaatgagcatgcatgtaaattaatagagttaagtgataagtataacaatggtgaacatggacagtatagcctcttaagcaaaattacctttgacaaatgtaaaaacttctttgtatgtcaagtatgtggttttcggagtagacttcacacaaatgttaacaggcatgttgctattgaacatacaaaaatttttcctcatgtttgtgatgactgtgggaaaggcttttcaagtatgctagaatattgcaagcatttaaattcacatttatctgaagggatttatttatgtcaatattgtgaatattcaacaggacaaattgaagatcttaaaattcatctagatttcaagcattcagctgacttgcctcataaatgtagtgactgcttgatgaggtttggaaatgaaagggaattaataagtcaccttccagtccatgagacaacttagtaatgaactagtccgtaacttgaaagtatttcgatttcttggctttatatatcttgtggaaaggacgatcagtcacctggaagcttaccatc

SEQ ID NO: 1031 - DNA, 539 bp, Homo sapiens
  source 1..539: mol_type = genomic DNA
accgccaccatgctctccgtccagcccaaagggaagcagaagggctgtgcgggctgtaaccgcaagatcaaggaccgctatctgctgaaggcattggacaagtactggcacgaagactgcctcaagtgtgcctgctgtgactgccgcctgggcgaggtgggctccaccctctacaccaaggccaacctcatcctgtgccgacgcgactacctgaggctctttggcaccacagggaactgtgctgcttgcagcaagctgatcccagccttcgagatggtgatgcgggcccgggacaacgtgtatcacctcgactgcttcgcctgccagctctgcaaccagagattttgtgtgggagacaaattcttcctgaagaacaacatgatcttgtgtcagatggactatgaggaagggcagctcaatggcacctttgaatcccaagttcagtagtaatgaactagtccgtaacttgaaagtatttcgatttcttggctttatatatcttgtggaaaggacgacgagtttaataagtctgcccacgg

SEQ ID NO: 1032 - DNA, 569 bp, Homo sapiens
  source 1..569: mol_type = genomic DNA
accgccaccatggtgttggaccaggaggacggcgtgccgatgctctccgtccagcccaaagggaagcagaagggctgtgcgggctgtaaccgcaagatcaaggaccgctatctgctgaaggcattggacaagtactggcacgaagactgcctcaagtgtgcctgctgtgactgccgcctgggcgaggtgggctccaccctctacaccaaggccaacctcatcctgtgccgacgcgactacctgaggctctttggcaccacagggaactgtgctgcttgcagcaagctgatcccagccttcgagatggtgatgcgggcccgggacaacgtgtatcacctcgactgcttcgcctgccagctctgcaaccagagattttgtgtgggagacaaattcttcctgaagaacaacatgatcttgtgtcagatggactatgaggaagggcagctcaatggcacctttgaatcccaagttcagtagtaatgaactagtccgtaacttgaaagtatttcgatttcttggctttatatatcttgtggaaaggacgagaagccatccgcactgctgacggg

SEQ ID NO: 1033 - DNA, 785 bp, Homo sapiens
  source 1..785: mol_type = genomic DNA
accgccaccatggaagggagcgcggtgactgtccttgagcgcggaggggcgagctcgccggcggagcgccggagcaagcggaggcgcaggagcggcggcgacggcggcggcggcggcggcgcccgagcacccgagggggtccgagccccggcagccggccagccccgcgccacaaagggagcgcccccgccgcccggcaccccgcctccctccccaatgtcctcggccatcgaaaggaagagcctggacccttcagaggaaccagtggatgaggtgctgcagatccccccatccctgctgacatgcggcggctgccagcagaacattggggaccgctacttcctgaaggccatcgaccagtactggcacgaggactgcctgagctgcgacctctgtggctgccggctgggtgaggtggggcggcgcctctactacaaactgggccggaagctctgccggagagactatctcaggctttttgggcaagacggtctctgcgcatcctgtgacaagcggattcgtgcctatgagatgacaatgcgggtgaaagacaaagtgtatcacctggaatgtttcaaatgcgccgcctgtcagaagcatttctgtgtaggtgacagatacctcctcatcaactctgacatagtgtgcgaacaggacatctacgagtggactaagatcaatgggatgatatagtaatgaactagtccgtaacttgaaagtatttcgatttcttggctttatatatcttgtggaaaggacgagcttgaaagaatctcaagatggac

SEQ ID NO: 1034 - DNA, 593 bp, Homo sapiens
  source 1..593: mol_type = genomic DNA
accgccaccatgttgatggaaggagggagagcggctgcggcgcggaacgtctcaagtatacaaatgctctcagtccagccagacaccaagccgaaaggttgtgctggctgcaaccgaaagatcaaggaccggtatcttctaaaggcactggacaaatactggcatgaagactgcctgaagtgtgcctgctgtgactgtcgcttgggagaggtgggctccaccctgtacactaaagctaatcttatcctttgtcgcagagactatctgaggctctttggtgtaacgggaaactgcgctgcctgtagtaagctcatccctgcctttgagatggtgatgcgtgccaaggacaatgtttaccacctggactgctttgcatgtcagctttgtaatcagagattttgtgttggagacaaatttttcctaaagaataacatgatcctttgccagacggactacgaggaaggtttaatgaaagaaggttatgcaccccaggttcgctagtaatgaactagtccgtaacttgaaagtatttcgatttcttggctttatatatcttgtggaaaggacgatttgtggatccgaggtgaaacatt

SEQ ID NO: 1035 - DNA, 605 bp, Homo sapiens
  source 1..605: mol_type = genomic DNA
accgccaccatgctctcagtccagccagacaccaagccgaaaggttgtgctggctgcaaccgaaagatcaaggaccggtatcttctaaaggcactggacaaatactggcatgaagactgcctgaagtgtgcctgctgtgactgtcgcttgggagagcatttgaagaggtgtggatctatatacatacatgctgcacatacagagattggaatctgtgtaaccttagaatggccattaccttttgtcatcattgactttagccaacaaatcaccatagcttggctctttggtgtaacgggaaactgcgctgcctgtagtaagctcatccctgcctttgagatggtgatgcgtgccaaggacaatgtttaccacctggactgctttgcatgtcagctttgtaatcagagattttgtgttggagacaaatttttcctaaagaataacatgatcctttgccagacggactacgaggaaggtttaatgaaagaaggttatgcaccccaggttcgctagtaatgaactagtccgtaacttgaaagtatttcgatttcttggctttatatatcttgtggaaaggacgattaaatacgcgattattgtgtagc

SEQ ID NO: 1036 - DNA, 572 bp, Homo sapiens
  source 1..572: mol_type = genomic DNA
accgccaccatgcagaaaaaggagaaaagttttggtatacaaatgctctcagtccagccagacaccaagccgaaaggttgtgctggctgcaaccgaaagatcaaggaccggtatcttctaaaggcactggacaaatactggcatgaagactgcctgaagtgtgcctgctgtgactgtcgcttgggagaggtgggctccaccctgtacactaaagctaatcttatcctttgtcgcagagactatctgaggctctttggtgtaacgggaaactgcgctgcctgtagtaagctcatccctgcctttgagatggtgatgcgtgccaaggacaatgtttaccacctggactgctttgcatgtcagctttgtaatcagagattttgtgttggagacaaatttttcctaaagaataacatgatcctttgccagacggactacgaggaaggtttaatgaaagaaggttatgcaccccaggttcgctagtaatgaactagtccgtaacttgaaagtatttcgatttcttggctttatatatcttgtggaaaggacgaatattcaccaaatgcgcctggtga

SEQ ID NO: 1037 - DNA, 611 bp, Homo sapiens
  source 1..611: mol_type = genomic DNA
accgccaccatgttccagccggcgcccaagcgctgcttcaccatcgagtcgctggtggccaaggacagtcccctgcccgcctcgcgctccgaggaccccatccgtcccgcggcactcagctacgctaactccagccccataaatccgttcctcaacggcttccactcggccgccgccgccgccgccggtaggggcgtctactccaacccggacttggtgttcgccgaggcggtctcgcacccgcccaaccccgccgtgccagtgcacccggtgccgccgccgcacgccctggccgcccaccccctaccctcctcgcactcgccacaccccctattcgcctcgcagcagcgggatccgtccaccttctacccctggctcatccaccgctaccgatatctgggtcatcgcttccaaggtaaaagtatggtttcagaaccgaagaacaaagttcaaaaggcagaagctggaggaagaaggctcagattcgcaacaaaagaaaaaagggacgcaccatattagtaatgaactagtccgtaacttgaaagtatttcgatttcttggctttatatatcttgtggaaaggacgagagcccatagtttccgtctgacaa

SEQ ID NO: 1038 - DNA, 860 bp, Homo sapiens
  source 1..860: mol_type = genomic DNA
accgccaccatgttccagccggcgcccaagcgctgcttcaccatcgagtcgctggtggccaaggacagtcccctgcccgcctcgcgctccgaggaccccatccgtcccgcggcactcagctacgctaactccagccccataaatccgttcctcaacggcttccactcggccgccgccgccgccgccggtaggggcgtctactccaacccggacttggtgttcgccgaggcggtctcgcacccgcccaaccccgccgtgccagtgcacccggtgccgccgccgcacgccctggccgcccaccccctaccctcctcgcactcgccacaccccctattcgcctcgcagcagcgggatccgtccaccttctacccctggctcatccaccgctaccgatatctgggtcatcgcttccaagggaacgacactagccccgagagtttccttttgcacaacgcgctggcccgaaagcccaagcggatccgaaccgccttctccccgtcccagcttctaaggctggaacacgcctttgagaagaatcactacgtggtgggcgccgaaaggaagcagctggcacacagcctcagcctcacggaaactcaggtaaaagtatggtttcagaaccgaagaacaaagttcaaaaggcagaagctggaggaagaaggctcagattcgcaacaaaagaaaaaagggacgcaccatattaaccggtggagaatcgccaccaagcaggcgagtccggaggaaatagacgtgacctcagatgattagtaatgaactagtccgtaacttgaaagtatttcgatttcttggctttatatatcttgtggaaaggacgagcacatcagccgccgatcctaccc

SEQ ID NO: 1039 - DNA, 974 bp, Homo sapiens
  source 1..974: mol_type = genomic DNA
accgccaccatgtgcctggctgggtgcacaccccgcaaggcggcggcgccaggacgcggagcgctccccagagcccggctgcctcgcacagctcccgcggctgcgaccatgttccagcccgcggccaagcgcggctttaccatagagtccttggtggccaaggacggcggcaccggcgggggcactggcggcgggggcgcgggctcccatctcctggcggcggccgcctccgaggaaccgctccggcccacggcgctcaactaccctcaccccagcgcggccgaggcggccttcgtgagtggcttccctgccgcggccgccgcgggcgcgggccgctcgctctacggtgggcccgagctcgtgttccccgaggccatgaaccaccccgcgctgaccgtgcatccggcgcaccagctgggcgcctccccgctgcagcccccgcactccttcttcggcgcccagcaccgggaccctctccatttctacccctgggtcctgcggaaccgcttcttcggccaccgcttccaggccagcgacgtgccccaggacgggctgcttctgcacggccccttcgcacgcaagcccaagcggatccgcacggccttctcgccctcgcagctgctgcggctggagcgcgccttcgagaagaaccactacgtggtgggcgccgagcggaagcagctggccggcagtctcagcctctccgagacgcaggtgaaggtgtggttccagaaccggaggacaaagtacaaacggcagaagctggaggaggaagggcctgagtccgagcagaagaagaagggctcccatcacatcaaccggtggcgcattgccacgaagcaggccaatggggaggacatcgatgtcacctccaatgactagtaatgaactagtccgtaacttgaaagtatttcgatttcttggctttatatatcttgtggaaaggacgaggcaattgcggcgctatcacctaa

SEQ ID NO: 1040 - DNA, 4850 bp, Homo sapiens
  source 1..4850: mol_type = genomic DNA
accgccaccatgggttccaagagaagaagagctacctccccttccagcagtgtcagcggggactttgatgatgggcaccattctgtgtcaacaccaggcccaagcaggaaaaggaggagactttccaatcttccaactgtagatcctattgccgtgtgccatgaactctataataccatccgagactataaggatgaacagggcagacttctctgtgagctcttcattagggcaccaaagcgaagaaatcaaccagactattatgaagtggtttctcagcccattgacttgatgaaaatccaacagaaactaaaaatggaagagtatgatgatgttaatttgctgactgctgacttccagcttctttttaacaatgcaaagtcctattataagccagattctcctgaatataaagccgcttgcaaactctgggatttgtaccttcgaacaagaaatgagtttgttcagaaaggagaagcagatgacgaagatgatgatgaagatgggcaagacaatcagggcacagtgactgaaggatcttctccagcttacttgaaggagatcctggagcagcttcttgaagccatagttgtagctacaaatccatcaggacgtctcattagcgaactttttcagaaactgccttctaaagtgcaatatccagattattatgcaataattaaggagcctatagatctcaagaccattgcccagaggatacagaatggaagctacaaaagtattcatgcaatggccaaagatatagatctcctcgcaaaaaatgccaaaacttataatgagcctggctctcaagtattcaaggatgcaaattcaattaaaaaaatattttatatgaaaaaggctgaaattgaacatcatgaaatggctaagtcaagtcttcgaatgaggactccatccaacttggctgcagccagactgacaggtccttcacacagtaaaggcagccttggtgaagagagaaatcccactagcaagtattaccgtaataaaagagcagtacaaggaggtcgtttatcagcaattacaatggcacttcaatatggctcagaaagtgaagaagatgctgctttagctgctgcacgctatgaagagggagagtcagaagcagaaagcatcacttcctttatggatgtttcaaatcctttttatcagctttatgacacagttaggagttgtcggaataaccaagggcagctaatagctgaacctttttaccatttgccttcaaagaaaaaataccctgattattaccagcaaattaaaatgcccatatcactacaacagatccgaacaaaactgaagaatcaagaatatgaaactttagatcatttggagtgtgatctgaatttaatgtttgaaaatgccaaacgctataatgtgcccaattcagccatctacaagcgagttctaaaattgcagcaagttatgcaggcaaagaagaaagagcttgccaggagagacgatatcgaggacggagacagcatgatctcttcagccacctctgatactggtagtgccaaaagaaaaagtaaaaagaacataagaaagcagcgaatgaaaatcttattcaatgttgttcttgaagctcgagagccaggttcaggcagaagactttgtgacctatttatggttaaaccatccaaaaaggactatcctgattattataaaatcatcttggagccaatggacttgaaaataattgagcataacatccgcaatgacaaatatgctggtgaagagggaatgatagaagacatgaagctgatgttccggaatgccaggcactataatgaggagggctcccaggtttataatgatgcacatatcctggagaagttactcaaggagaaaaggaaagagctgggcccactgcctgatgatgatgacatggcttctcccaaactcaagctgagtaggaagagtggcatttctcctaaaaaatcaaaatacatgactccaatgcagcagaaactaaatgaggtctatgaagctgtaaagaactatactgataagaggggtcgccgcctcagtgccatatttctgaggcttccctctagatctgagttgcctgactactatctgactattaaaaagcccatggacatggaaaaaattcgaagtcacatgatggccaacaagtaccaagatattgactctatggttgaggactttgtcatgatgtttaataatgcctgtacatacaatgagccggagtctttgatctacaaagatgctcttgttctacacaaagtcctgcttgaaacacgcagagacctggagggagatgaggactctcatgtcccaaatgtgactttgctgattcaagagcttatccacaatctttttgtgtcagtcatgagtcatcaggatgatgagggaagatgctacagcgattctttagcagaaattcctgctgtggatcccaactttcctaacaaaccaccccttacatttgacataattaggaagaatgttgaaaataatcgctaccgtcggcttgatttatttcaagagcatatgtttgaagtattggaacgagcaagaaggatgaatcggacagattcagaaatatatgaagatgcagtagaacttcagcagttttttattaaaattcgtgatgaactctgcaaaaatggagagattcttctttcaccggcactcagctataccacaaaacatttgcataatgatgtggagaaagagagaaaggaaaaattgccaaaagaaatagaggaagataaactaaaacgagaagaagaaaaaagagaagctgaaaagagtgaagattcctctggtgctgcaggcctctcaggcttacatcgcacatacagccaggactgtagctttaaaaacagcatgtaccatgttggagattacgtctatgtggaacctgcagaggccaacctacaaccacatatcgtctgtattgaaagactgtgggaggattcagctggtgaaaaatggttgtatggctgttggttttaccgaccaaatgaaacattccacctggctacacgaaaatttctagaaaaagaagtttttaagagtgactattacaacaaagttccagttagtaaaattctaggcaagtgtgtggtcatgtttgtcaaggaatactttaagttatgcccagaaaacttccgagatgaggatgtttttgtctgtgaatcacggtattctgccaaaaccaaatcttttaagaaaattaaactgtggaccatgcccatcagctcagtcaggtttgtccctcgggatgtgcctctgcctgtggttcgcgtggcctctgtatttgcaaatgcagataaaggtgatgatgagaagaatacagacaactcagaggacagtcgagctgaagacaattttaacttggaaaaggaaaaagaagatgtccctgtggaaatgtccaatggtgaaccaggttgccactactttgagcagctccattacaatgacatgtggctgaaggttggcgactgtgtcttcatcaagtcccatggcctggtgcgtcctcgtgtgggcagaattgaaaaagtatgggttcgagatggagctgcatatttttatggccccatcttcattcacccagaagaaacagagcatgagcccacaaaaatgttctacaaaaaagaagtatttctgagtaatctggaagaaacctgccccatgacatgtattctcggaaagtgtgctgtgttgtcattcaaggacttcctctcctgcaggccaactgaaataccagaaaatgacattctgctttgtgagagccgctacaatgagagcgacaagcagatgaagaaattcaaaggattgaagaggttttcactctctgctaaagtggtagatgatgaaatttactacttcagaaaaccaattgttcctcagaaggagccatcacctttgctggaaaagaagatccagttgctagaagctaaatttgccgagttagaaggtggagatgatgatattgaagagatgggagaagaagatagtgaggtcattgaacctccttctctacctcagcttcagacccccctggccagtgagctggacctcatgccctacacacccccacagtctaccccaaagtctgccaaaggcagtgcaaagaaggaaggctccaaacggaaaatcaacatgagtggctacatcctgttcagcagtgagatgagggctgtgattaaggcccaacacccagactactctttcggggagctcagccgcctggtggggacagaatggagaaatcttgagacagccaagaaagcagaatatgaaggtgtgatgaaccaaggagtggcccctatggtagggactccagcaccaggtggaagtccatatggacaacaggtgggagttttggggcctccagggcagcaggcaccacctccatatcccggcccacatccagctggaccccctgtcatacagcagccaacaacacccatgtttgtagctcccccaccaaagacccagcggcttcttcactcagaggcctacctgaaatacattgaaggactcagtgcggagtccaacagcattagcaagtgggatcagacactggcagctcgaagacgcgacgtccatttgtcgaaagaacaggagagccgcctaccctctcactggctgaaaagcaaaggggcccacaccaccatggcagatgccctctggcgccttcgagatttgatgctccgggacaccctcaacattcgccaagcatacaacctagaaaatgtttagtaatgaactagtccgtaacttgaaagtatttcgatttcttggctttatatatcttgtggaaaggacgagtgagtcggcgtcccgtcctgcga

SEQ ID NO: 1041 - DNA, 5171 bp, Homo sapiens
  source 1..5171: mol_type = genomic DNA
accgccaccatgggttccaagagaagaagagctacctccccttccagcagtgtcagcggggactttgatgatgggcaccattctgtgtcaacaccaggcccaagcaggaaaaggaggagactttccaatcttccaactgtagatcctattgccgtgtgccatgaactctataataccatccgagactataaggatgaacagggcagacttctctgtgagctcttcattagggcaccaaagcgaagaaatcaaccagactattatgaagtggtttctcagcccattgacttgatgaaaatccaacagaaactaaaaatggaagagtatgatgatgttaatttgctgactgctgacttccagcttctttttaacaatgcaaagtcctattataagccagattctcctgaatataaagccgcttgcaaactctgggatttgtaccttcgaacaagaaatgagtttgttcagaaaggagaagcagatgacgaagatgatgatgaagatgggcaagacaatcagggcacagtgactgaaggatcttctccagcttacttgaaggagatcctggagcagcttcttgaagccatagttgtagctacaaatccatcaggacgtctcattagcgaactttttcagaaactgccttctaaagtgcaatatccagattattatgcaataattaaggagcctatagatctcaagaccattgcccagaggatacagaatggaagctacaaaagtattcatgcaatggccaaagatatagatctcctcgcaaaaaatgccaaaacttataatgagcctggctctcaagtattcaaggatgcaaattcaattaaaaaaatattttatatgaaaaaggctgaaattgaacatcatgaaatggctaagtcaagtcttcgaatgaggactccatccaacttggctgcagccagactgacaggtccttcacacagtaaaggcagccttggtgaagagagaaatcccactagcaagtattaccgtaataaaagagcagtacaaggaggtcgtttatcagcaattacaatggcacttcaatatggctcagaaagtgaagaagatgctgctttagctgctgcacgctatgaagagggagagtcagaagcagaaagcatcacttcctttatggatgtttcaaatcctttttatcagctttatgacacagttaggagttgtcggaataaccaagggcagctaatagctgaacctttttaccatttgccttcaaagaaaaaataccctgattattaccagcaaattaaaatgcccatatcactacaacagatccgaacaaaactgaagaatcaagaatatgaaactttagatcatttggagtgtgatctgaatttaatgtttgaaaatgccaaacgctataatgtgcccaattcagccatctacaagcgagttctaaaattgcagcaagttatgcaggcaaagaagaaagagcttgccaggagagacgatatcgaggacggagacagcatgatctcttcagccacctctgatactggtagtgccaaaagaaaaagtaaaaagaacataagaaagcagcgaatgaaaatcttattcaatgttgttcttgaagctcgagagccaggttcaggcagaagactttgtgacctatttatggttaaaccatccaaaaaggactatcctgattattataaaatcatcttggagccaatggacttgaaaataattgagcataacatccgcaatgacaaatatgctggtgaagagggaatgatagaagacatgaagctgatgttccggaatgccaggcactataatgaggagggctcccaggtttataatgatgcacatatcctggagaagttactcaaggagaaaaggaaagagctgggcccactgcctgatgatgatgacatggcttctcccaaactcaagctgagtaggaagagtggcatttctcctaaaaaatcaaaatacatgactccaatgcagcagaaactaaatgaggtctatgaagctgtaaagaactatactgataagaggggtcgccgcctcagtgccatatttctgaggcttccctctagatctgagttgcctgactactatctgactattaaaaagcccatggacatggaaaaaattcgaagtcacatgatggccaacaagtaccaagatattgactctatggttgaggactttgtcatgatgtttaataatgcctgtacatacaatgagccggagtctttgatctacaaagatgctcttgttctacacaaagtcctgcttgaaacacgcagagacctggagggagatgaggactctcatgtcccaaatgtgactttgctgattcaagagcttatccacaatctttttgtgtcagtcatgagtcatcaggatgatgagggaagatgctacagcgattctttagcagaaattcctgctgtggatcccaactttcctaacaaaccaccccttacatttgacataattaggaagaatgttgaaaataatcgctaccgtcggcttgatttatttcaagagcatatgtttgaagtattggaacgagcaagaaggatgaatcggacagattcagaaatatatgaagatgcagtagaacttcagcagttttttattaaaattcgtgatgaactctgcaaaaatggagagattcttctttcaccggcactcagctataccacaaaacatttgcataatgatgtggagaaagagagaaaggaaaaattgccaaaagaaatagaggaagataaactaaaacgagaagaagaaaaaagagaagctgaaaagagtgaagattcctctggtgctgcaggcctctcaggcttacatcgcacatacagccaggactgtagctttaaaaacagcatgtaccatgttggagattacgtctatgtggaacctgcagaggccaacctacaaccacatatcgtctgtattgaaagactgtgggaggattcagctggtgaaaaatggttgtatggctgttggttttaccgaccaaatgaaacattccacctggctacacgaaaatttctagaaaaagaagtttttaagagtgactattacaacaaagttccagttagtaaaattctaggcaagtgtgtggtcatgtttgtcaaggaatactttaagttatgcccagaaaacttccgagatgaggatgtttttgtctgtgaatcacggtattctgccaaaaccaaatcttttaagaaaattaaactgtggaccatgcccatcagctcagtcaggtttgtccctcgggatgtgcctctgcctgtggttcgcgtggcctctgtatttgcaaatgcagataaaggtgatgatgagaagaatacagacaactcagaggacagtcgagctgaagacaattttaacttggaaaaggaaaaagaagatgtccctgtggaaatgtccaatggtgaaccaggttgccactactttgagcagctccattacaatgacatgtggctgaaggttggcgactgtgtcttcatcaagtcccatggcctggtgcgtcctcgtgtgggcagaattgaaaaagtatgggttcgagatggagctgcatatttttatggccccatcttcattcacccagaagaaacagagcatgagcccacaaaaatgttctacaaaaaagaagtatttctgagtaatctggaagaaacctgccccatgacatgtattctcggaaagtgtgctgtgttgtcattcaaggacttcctctcctgcaggccaactgaaataccagaaaatgacattctgctttgtgagagccgctacaatgagagcgacaagcagatgaagaaattcaaaggattgaagaggttttcactctctgctaaagtggtagatgatgaaatttactacttcagaaaaccaattgttcctcagaaggagccatcacctttgctggaaaagaagatccagttgctagaagctaaatttgccgagttagaaggtggagatgatgatattgaagagatgggagaagaagatagtgaggtcattgaacctccttctctacctcagcttcagacccccctggccagtgagctggacctcatgccctacacacccccacagtctaccccaaagtctgccaaaggcagtgcaaagaaggaaggctccaaacggaaaatcaacatgagtggctacatcctgttcagcagtgagatgagggctgtgattaaggcccaacacccagactactctttcggggagctcagccgcctggtggggacagaatggagaaatcttgagacagccaagaaagcagaatatgaagagcgggcagctaaagttgctgagcagcaggagagagagcgagcagcacagcaacagcagccgagtgcttctccccgagcaggcacccctgtgggggctctcatgggggtggtgccaccaccaacaccaatggggatgctcaatcagcagttgacacctgttgcaggcatgatgggtggctatccgccaggccttccacctttgcagggcccagttgatggccttgttagcatgggcagcatgcagccacttcaccctggggggcctccaccccaccatcttccgccaggtgtgcctggcctcccgggcatcccaccaccgggtgtgatgaaccaaggagtggcccctatggtagggactccagcaccaggtggaagtccatatggacaacaggtgggagttttggggcctccagggcagcaggcaccacctccatatcccggcccacatccagctggaccccctgtcatacagcagccaacaacacccatgtttgtagctcccccaccaaagacccagcggcttcttcactcagaggcctacctgaaatacattgaaggactcagtgcggagtccaacagcattagcaagtgggatcagacactggcagctcgaagacgcgacgtccatttgtcgaaagaacaggagagccgcctaccctctcactggctgaaaagcaaaggggcccacaccaccatggcagatgccctctggcgccttcgagatttgatgctccgggacaccctcaacattcgccaagcatacaacctagaaaatgtttagtaatgaactagtccgtaacttgaaagtatttcgatttcttggctttatatatcttgtggaaaggacgatgcgagtcctagatgactatacct

SEQ ID NO: 1042 - DNA, 4850 bp, Homo sapiens
  source 1..4850: mol_type = genomic DNA
accgccaccatgggttccaagagaagaagagctacctccccttccagcagtgtcagcggggactttgatgatgggcaccattctgtgtcaacaccaggcccaagcaggaaaaggaggagactttccaatcttccaactgtagatcctattgccgtgtgccatgaactctataataccatccgagactataaggatgaacagggcagacttctctgtgagctcttcattagggcaccaaagcgaagaaatcaaccagactattatgaagtggtttctcagcccattgacttgatgaaaatccaacagaaactaaaaatggaagagtatgatgatgttaatttgctgactgctgacttccagcttctttttaacaatgcaaagtcctattataagccagattctcctgaatataaagccgcttgcaaactctgggatttgtaccttcgaacaagaaatgagtttgttcagaaaggagaagcagatgacgaagatgatgatgaagatgggcaagacaatcagggcacagtgactgaaggatcttctccagcttacttgaaggagatcctggagcagcttcttgaagccatagttgtagctacaaatccatcaggacgtctcattagcgaactttttcagaaactgccttctaaagtgcaatatccagattattatgcaataattaaggagcctatagatctcaagaccattgcccagaggatacagaatggaagctacaaaagtattcatgcaatggccaaagatatagatctcctcgcaaaaaatgccaaaacttataatgagcctggctctcaagtattcaaggatgcaaattcaattaaaaaaatattttatatgaaaaaggctgaaattgaacatcatgaaatggctaagtcaagtcttcgaatgaggactccatccaacttggctgcagccagactgacaggtccttcacacagtaaaggcagccttggtgaagagagaaatcccactagcaagtattaccgtaataaaagagcagtacaaggaggtcgtttatcagcaattacaatggcacttcaatatggctcagaaagtgaagaagatgctgctttagctgctgcacgctatgaagagggagagtcagaagcagaaagcatcacttcctttatggatgtttcaaatcctttttatcagctttatgacacagttaggagttgtcggaataaccaagggcagctaatagctgaacctttttaccatttgccttcaaagaaaaaataccctgattattaccagcaaattaaaatgcccatatcactacaacagatccgaacaaaactgaagaatcaagaatatgaaactttagatcatttggagtgtgatctgaatttaatgtttgaaaatgccaaacgctataatgtgcccaattcagccatctacaagcgagttctaaaattgcagcaagttatgcaggcaaagaagaaagagcttgccaggagagacgatatcgaggacggagacagcatgatctcttcagccacctctgatactggtagtgccaaaagaaaaagtaaaaagaacataagaaagcagcgaatgaaaatcttattcaatgttgttcttgaagctcgagagccaggttcaggcagaagactttgtgacctatttatggttaaaccatccaaaaaggactatcctgattattataaaatcatcttggagccaatggacttgaaaataattgagcataacatccgcaatgacaaatatgctggtgaagagggaatgatagaagacatgaagctgatgttccggaatgccaggcactataatgaggagggctcccaggtttataatgatgcacatatcctggagaagttactcaaggagaaaaggaaagagctgggcccactgcctgatgatgatgacatggcttctcccaaactcaagctgagtaggaagagtggcatttctcctaaaaaatcaaaatacatgactccaatgcagcagaaactaaatgaggtctatgaagctgtaaagaactatactgataagaggggtcgccgcctcagtgccatatttctgaggcttccctctagatctgagttgcctgactactatctgactattaaaaagcccatggacatggaaaaaattcgaagtcacatgatggccaacaagtaccaagatattgactctatggttgaggactttgtcatgatgtttaataatgcctgtacatacaatgagccggagtctttgatctacaaagatgctcttgttctacacaaagtcctgcttgaaacacgcagagacctggagggagatgaggactctcatgtcccaaatgtgactttgctgattcaagagcttatccacaatctttttgtgtcagtcatgagtcatcaggatgatgagggaagatgctacagcgattctttagcagaaattcctgctgtggatcccaactttcctaacaaaccaccccttacatttgacataattaggaagaatgttgaaaataatcgctaccgtcggcttgatttatttcaagagcatatgtttgaagtattggaacgagcaagaaggatgaatcggacagattcagaaatatatgaagatgcagtagaacttcagcagttttttattaaaattcgtgatgaactctgcaaaaatggagagattcttctttcaccggcactcagctataccacaaaacatttgcataatgatgtggagaaagagagaaaggaaaaattgccaaaagaaatagaggaagataaactaaaacgagaagaagaaaaaagagaagctgaaaagagtgaagattcctctggtgctgcaggcctctcaggcttacatcgcacatacagccaggactgtagctttaaaaacagcatgtaccatgttggagattacgtctatgtggaacctgcagaggccaacctacaaccacatatcgtctgtattgaaagactgtgggaggattcagctgaaaaagaagtttttaagagtgactattacaacaaagttccagttagtaaaattctaggcaagtgtgtggtcatgtttgtcaaggaatactttaagttatgcccagaaaacttccgagatgaggatgtttttgtctgtgaatcacggtattctgccaaaaccaaatcttttaagaaaattaaactgtggaccatgcccatcagctcagtcaggtttgtccctcgggatgtgcctctgcctgtggttcgcgtggcctctgtatttgcaaatgcagataaaggtgatgatgagaagaatacagacaactcagaggacagtcgagctgaagacaattttaacttggaaaaggaaaaagaagatgtccctgtggaaatgtccaatggtgaaccaggttgccactactttgagcagctccattacaatgacatgtggctgaaggttggcgactgtgtcttcatcaagtcccatggcctggtgcgtcctcgtgtgggcagaattgaaaaagtatgggttcgagatggagctgcatatttttatggccccatcttcattcacccagaagaaacagagcatgagcccacaaaaatgttctacaaaaaagaagtatttctgagtaatctggaagaaacctgccccatgacatgtattctcggaaagtgtgctgtgttgtcattcaaggacttcctctcctgcaggccaactgaaataccagaaaatgacattctgctttgtgagagccgctacaatgagagcgacaagcagatgaagaaattcaaaggattgaagaggttttcactctctgctaaagtggtagatgatgaaatttactacttcagaaaaccaattgttcctcagaaggagccatcacctttgctggaaaagaagatccagttgctagaagctaaatttgccgagttagaaggtggagatgatgatattgaagagatgggagaagaagatagtgagtctaccccaaagtctgccaaaggcagtgcaaagaaggaaggctccaaacggaaaatcaacatgagtggctacatcctgttcagcagtgagatgagggctgtgattaaggcccaacacccagactactctttcggggagctcagccgcctggtggggacagaatggagaaatcttgagacagccaagaaagcagaatatgaaggcatgatgggtggctatccgccaggccttccacctttgcagggcccagttgatggccttgttagcatgggcagcatgcagccacttcaccctggggggcctccaccccaccatcttccgccaggtgtgcctggcctcccgggcatcccaccaccgggtgtgatgaaccaaggagtggcccctatggtagggactccagcaccaggtggaagtccatatggacaacaggtgggagttttggggcctccagggcagcaggcaccacctccatatcccggcccacatccagctggaccccctgtcatacagcagccaacaacacccatgtttgtagctcccccaccaaagacccagcggcttcttcactcagaggcctacctgaaatacattgaaggactcagtgcggagtccaacagcattagcaagtgggatcagacactggcagctcgaagacgcgacgtccatttgtcgaaagaacaggagagccgcctaccctctcactggctgaaaagcaaaggggcccacaccaccatggcagatgccctctggcgccttcgagatttgatgctccgggacaccctcaacattcgccaagcatacaacctagaaaatgtttagtaatgaactagtccgtaacttgaaagtatttcgatttcttggctttatatatcttgtggaaaggacgaagactcttctcagcgaaaccacct

SEQ ID NO: 1043 - DNA, 5006 bp, Homo sapiens
  source 1..5006: mol_type = genomic DNA
accgccaccatgggttccaagagaagaagagctacctccccttccagcagtgtcagcggggactttgatgatgggcaccattctgtgtcaacaccaggcccaagcaggaaaaggaggagactttccaatcttccaactgtagatcctattgccgtgtgccatgaactctataataccatccgagactataaggatgaacagggcagacttctctgtgagctcttcattagggcaccaaagcgaagaaatcaaccagactattatgaagtggtttctcagcccattgacttgatgaaaatccaacagaaactaaaaatggaagagtatgatgatgttaatttgctgactgctgacttccagcttctttttaacaatgcaaagtcctattataagccagattctcctgaatataaagccgcttgcaaactctgggatttgtaccttcgaacaagaaatgagtttgttcagaaaggagaagcagatgacgaagatgatgatgaagatgggcaagacaatcagggcacagtgactgaaggatcttctccagcttacttgaaggagatcctggagcagcttcttgaagccatagttgtagctacaaatccatcaggacgtctcattagcgaactttttcagaaactgccttctaaagtgcaatatccagattattatgcaataattaaggagcctatagatctcaagaccattgcccagaggatacagaatggaagctacaaaagtattcatgcaatggccaaagatatagatctcctcgcaaaaaatgccaaaacttataatgagcctggctctcaagtattcaaggatgcaaattcaattaaaaaaatattttatatgaaaaaggctgaaattgaacatcatgaaatggctaagtcaagtcttcgaatgaggactccatccaacttggctgcagccagactgacaggtccttcacacagtaaaggcagccttggtgaagagagaaatcccactagcaagtattaccgtaataaaagagcagtacaaggaggtcgtttatcagcaattacaatggcacttcaatatggctcagaaagtgaagaagatgctgctttagctgctgcacgctatgaagagggagagtcagaagcagaaagcatcacttcctttatggatgtttcaaatcctttttatcagctttatgacacagttaggagttgtcggaataaccaagggcagctaatagctgaacctttttaccatttgccttcaaagaaaaaataccctgattattaccagcaaattaaaatgcccatatcactacaacagatccgaacaaaactgaagaatcaagaatatgaaactttagatcatttggagtgtgatctgaatttaatgtttgaaaatgccaaacgctataatgtgcccaattcagccatctacaagcgagttctaaaattgcagcaagttatgcaggcaaagaagaaagagcttgccaggagagacgatatcgaggacggagacagcatgatctcttcagccacctctgatactggtagtgccaaaagaaaaagtaaaaagaacataagaaagcagcgaatgaaaatcttattcaatgttgttcttgaagctcgagagccaggttcaggcagaagactttgtgacctatttatggttaaaccatccaaaaaggactatcctgattattataaaatcatcttggagccaatggacttgaaaataattgagcataacatccgcaatgacaaatatgctggtgaagagggaatgatagaagacatgaagctgatgttccggaatgccaggcactataatgaggagggctcccaggtttataatgatgcacatatcctggagaagttactcaaggagaaaaggaaagagctgggcccactgcctgatgatgatgacatggcttctcccaaactcaagctgagtaggaagagtggcatttctcctaaaaaatcaaaatacatgactccaatgcagcagaaactaaatgaggtctatgaagctgtaaagaactatactgataagaggggtcgccgcctcagtgccatatttctgaggcttccctctagatctgagttgcctgactactatctgactattaaaaagcccatggacatggaaaaaattcgaagtcacatgatggccaacaagtaccaagatattgactctatggttgaggactttgtcatgatgtttaataatgcctgtacatacaatgagccggagtctttgatctacaaagatgctcttgttctacacaaagtcctgcttgaaacacgcagagacctggagggagatgaggactctcatgtcccaaatgtgactttgctgattcaagagcttatccacaatctttttgtgtcagtcatgagtcatcaggatgatgagggaagatgctacagcgattctttagcagaaattcctgctgtggatcccaactttcctaacaaaccaccccttacatttgacataattaggaagaatgttgaaaataatcgctaccgtcggcttgatttatttcaagagcatatgtttgaagtattggaacgagcaagaaggatgaatcggacagattcagaaatatatgaagatgcagtagaacttcagcagttttttattaaaattcgtgatgaactctgcaaaaatggagagattcttctttcaccggcactcagctataccacaaaacatttgcataatgatgtggagaaagagagaaaggaaaaattgccaaaagaaatagaggaagataaactaaaacgagaagaagaaaaaagagaagctgaaaagagtgaagattcctctggtgctgcaggcctctcaggcttacatcgcacatacagccaggactgtagctttaaaaacagcatgtaccatgttggagattacgtctatgtggaacctgcagaggccaacctacaaccacatatcgtctgtattgaaagactgtgggaggattcagctggtgaaaaatggttgtatggctgttggttttaccgaccaaatgaaacattccacctggctacacgaaaatttctagaaaaagaagtttttaagagtgactattacaacaaagttccagttagtaaaattctaggcaagtgtgtggtcatgtttgtcaaggaatactttaagttatgcccagaaaacttccgagatgaggatgtttttgtctgtgaatcacggtattctgccaaaaccaaatcttttaagaaaattaaactgtggaccatgcccatcagctcagtcaggtttgtccctcgggatgtgcctctgcctgtggttcgcgtggcctctgtatttgcaaatgcagataaaggtgatgatgagaagaatacagacaactcagaggacagtcgagctgaagacaattttaacttggaaaaggaaaaagaagatgtccctgtggaaatgtccaatggtgaaccaggttgccactactttgagcagctccattacaatgacatgtggctgaaggttggcgactgtgtcttcatcaagtcccatggcctggtgcgtcctcgtgtgggcagaattgaaaaagtatgggttcgagatggagctgcatatttttatggccccatcttcattcacccagaagaaacagagcatgagcccacaaaaatgttctacaaaaaagaagtatttctgagtaatctggaagaaacctgccccatgacatgtattctcggaaagtgtgctgtgttgtcattcaaggacttcctctcctgcaggccaactgaaataccagaaaatgacattctgctttgtgagagccgctacaatgagagcgacaagcagatgaagaaattcaaaggattgaagaggttttcactctctgctaaagtggtagatgatgaaatttactacttcagaaaaccaattgttcctcagaaggagccatcacctttgctggaaaagaagatccagttgctagaagctaaatttgccgagttagaaggtggagatgatgatattgaagagatgggagaagaagatagtgaggtcattgaacctccttctctacctcagcttcagacccccctggccagtgagctggacctcatgccctacacacccccacagtctaccccaaagtctgccaaaggcagtgcaaagaaggaaggctccaaacggaaaatcaacatgagtggctacatcctgttcagcagtgagatgagggctgtgattaaggcccaacacccagactactctttcggggagctcagccgcctggtggggacagaatggagaaatcttgagacagccaagaaagcagaatatgaaggcatgatgggtggctatccgccaggccttccacctttgcagggcccagttgatggccttgttagcatgggcagcatgcagccacttcaccctggggggcctccaccccaccatcttccgccaggtgtgcctggcctcccgggcatcccaccaccgggtgtgatgaaccaaggagtggcccctatggtagggactccagcaccaggtggaagtccatatggacaacaggtgggagttttggggcctccagggcagcaggcaccacctccatatcccggcccacatccagctggaccccctgtcatacagcagccaacaacacccatgtttgtagctcccccaccaaagacccagcggcttcttcactcagaggcctacctgaaatacattgaaggactcagtgcggagtccaacagcattagcaagtgggatcagacactggcagctcgaagacgcgacgtccatttgtcgaaagaacaggagagccgcctaccctctcactggctgaaaagcaaaggggcccacaccaccatggcagatgccctctggcgccttcgagatttgatgctccgggacaccctcaacattcgccaagcatacaacctagaaaatgtttagtaatgaactagtccgtaacttgaaagtatttcgatttcttggctttatatatcttgtggaaaggacgaccaacctcagttgcttgtaatccc

SEQ ID NO: 1044 - DNA, 611 bp, Homo sapiens
  source 1..611: mol_type = genomic DNA
accgccaccatgtccagcgagcctccccctccttatcctgggggccccacagccccacttctggaagagaaaagtggagccccgcccaccccaggccgttcctccccagctgtgatgcagccccctccaggcatgccactgccccctgcggacattggccccccaccctatgagccgccgggtcacccaatgccccagcctggcttcatcccaccacacatgagtgcagatggcacctacatgcctccgggagctgccaccacggtgacagtgctgcagggagagatctttgagggagcgcctgtgcagacggtgtgtccccactgccagcaggccatcaccaccaagatctcctacgagattggcttgatgaatttcgtgctgggtttcttctgttgcttcatgggatgtgatctgggctgctgcctgatcccctgcctcatcaatgacttcaaggatgtgacgcacacatgccccagctgcaaagcctacatctacacgtacaagcgcctgtgctagtaatgaactagtccgtaacttgaaagtatttcgatttcttggctttatatatcttgtggaaaggacgaatcacacatgtgatgcgtagttag

SEQ ID NO: 1045 - DNA, 491 bp, Homo sapiens
  source 1..491: mol_type = genomic DNA
accgccaccatgtccagcgagcctccccctccttatcctgggggccccacagccccacttctggaagagaaaagtggagccccgcccaccccaggccgttcctccccagctgtgatgcagccccctccaggagctgccaccacggtgacagtgctgcagggagagatctttgagggagcgcctgtgcagacggtgtgtccccactgccagcaggccatcaccaccaagatctcctacgagattggcttgatgaatttcgtgctgggtttcttctgttgcttcatgggatgtgatctgggctgctgcctgatcccctgcctcatcaatgacttcaaggatgtgacgcacacatgccccagctgcaaagcctacatctacacgtacaagcgcctgtgctagtaatgaactagtccgtaacttgaaagtatttcgatttcttggctttatatatcttgtggaaaggacgaacaaatgttaaagcgcttcctgat

SEQ ID NO: 1046 - DNA, 869 bp, Homo sapiens
  source 1..869: mol_type = genomic DNA
accgccaccatggacgtgatggatggctgccagttctcaccttctgagtacttctacgacggctcctgcataccgtcccccgagggtgaatttggggacgagtttgtgccgcgagtggctgccttcggagcgcacaaagcagagctgcagggctcagatgaggacgagcacgtgcgagcgcctaccggccaccaccaggctggtcactgcctcatgtgggcctgcaaagcctgcaagaggaagtccaccaccatggatcggcggaaggcagccactatgcgcgagcggaggcgcctgaagaaggtcaaccaggctttcgaaaccctcaagaggtgtaccacgaccaaccccaaccagaggctgcccaaggtggagatcctcaggaatgccatccgctacatcgagagcctgcaggagttgctgagagagcaggtggagaactactatagcctgccgggacagagctgctcggagcccaccagccccacctccaactgctctgatggcatgcccgaatgtaacagtcctgtctggtccagaaagagcagtacttttgacagcatctactgtcctgatgtatcaaatgtatatgccacagataaaaactccttatccagcttggattgcttatccaacatagtggaccggatcacctcctcagagcaacctgggttgcctctccaggatctggcttctctctctccagttgccagcaccgattcacagcctgcaactccaggggcttctagttccaggcttatctatcatgtgctatagtaatgaactagtccgtaacttgaaagtatttcgatttcttggctttatatatcttgtggaaaggacgatgaactaaagctatcgccctagtc

SEQ ID NO: 1047 - DNA, 1598 bp, Homo sapiens
  source 1..1598: mol_type = genomic DNA
accgccaccatggagtccccaagagggtggaccctgcaggtggccccagaggaaggccaggtcctctgcaatgtgaagactgccacgaggggcctctctgagggggctgtgtctggaggctggggggcctgggaaaactccacggaggttccgagggaggcaggggacggccagcggcagcaagccacactgggggcggcggacgaacagggaggccccggcagggagctgggccccgcagacggtgggcgggacggggctgggcccaggagcgagcctgcagaccgggcgttgcgcccttcgcctctcccagaggagccgggctgccggtgcggggagtgcggcaaggcgttcagccagggctcttacttgctgcagcatcggcgcgtgcacacaggcgagaagccgtacacgtgccccgagtgcggcaaggccttcgcctggagctccaacctcagccagcaccagcgcatccacagcggcgagaagccctacgcttgcagggagtgcggcaaggccttccgcgcgcactcgcagctcatccaccaccaggagacacacagcggcctgaagcccttccgctgcccggactgcggcaagtccttcggccgaagcaccacgctggtgcagcaccgacgcacgcacacgggcgagaagccctacgagtgcccggagtgcggcaaggccttcagctggaactccaatttcctggagcaccggcgcgtgcacacgggcgcgcggccgcacgcctgccgggactgtggcaaggccttcagccagagctccaacctggccgagcacctgaagatccacgcgggcgcacggccacacgcctgtcccgactgcggcaaggccttcgtgcgtgtggcggggctgcggcagcaccggcgcacgcacagcagcgagaagcccttcccctgcgccgagtgcggaaaggctttccgcgagagctcgcagctcctgcagcaccagcgcacgcacactggtgagcggcccttcgagtgcgccgagtgcggccaggctttcgtcatgggctcctacctggcggagcaccggcgcgtgcacacgggcgagaagcctcatgcgtgcgcccagtgcggcaaggccttcagccagcgctccaacctactgagccaccggcgcacgcactcgggcgccaagcccttcgcctgcgccgactgcggcaaggccttccgcggcagttccggcctggcgcaccaccggctttcgcacacgggagagcgacccttcgcctgcgcagaatgcggcaaggccttccgcggcagctccgagctgcgccagcaccagcgcctgcactctggcgagaggccgttcgtctgcgcccactgcagcaaggccttcgtgcgcaagtcggagctcttaagccaccggcgcacgcacacgggcgagaggccctacgcttgcggcgagtgcgggaagcctttcagccaccgttgcaacctcaacgagcaccagaagcggcacgggggccgcgctgcgccctagtaatgaactagtccgtaacttgaaagtatttcgatttcttggctttatatatcttgtggaaaggacgagacatttggcgccgccatgtagta

SEQ ID NO: 1048 - DNA, 1865 bp, Homo sapiens
  source 1..1865: mol_type = genomic DNA
accgccaccatgcccacagccctgtgcccccgagtcttggctccgaaggaaagtgaggagcccaggaaaatgaggagcccacctggagagaaccctagcccccagggggagcttcccagccccgagtcctctcggcgtctcttccgccgtttccgctaccaggaggcggcgggcccccgggaggccctgcagcgcctctgggacctgtgcgggggctggctgcggcctgagaggcacaccaaggagcagattctggagctgctggtgctggagcagttcctggccatcctgccccgggagatccagagctgggtgcgggcgcaggagcctgagagcggagagcaggctgtggccgcggtggaggcactggaacgggagcccgggagaccctggcagtggctcaagcactgtgaagaccctgtggtgattgatgatggggacagccctctggaccaggagcaggagcagctgccggtagagccccacagcgaccttgcaaagaaccaggatgcccagcccataaccctggcacagtgcctggggctcccaagcagaccaccaagccagctcagcggggacccagttctgcaagatgctttccttcttcaggaagagaatgtgcgggacacacagcaggtgaccaccctccagctacccccgagtcgggtttctccattcaaggacatgattttatgcttctctgaagaggattggtcccttctagatcctgcccagactggcttctatggagagttcatcattggggaggattacggggtctcaatgcctccaaacgacctagctgcccagccagatctctcccagggagaggagaatgagccacgcgttccagagttgcaggatctccagggcaaagaagtgccccaggtctcctacttggactctccaagtctccagccattccaggtagaagaaagaaggaaacgtgaggagctgcaggtgccagagttccaggcctgcccacagacggtggtgcctcaaaacacctacccagctggcggcaacccgcgatctctagagaacagcctggatgaagaagtgaccatcgagatcgttctctccagctctggggacgaggactcccagcatggcccgtactgcacagaagagctggggagccccacagagaagcagcgcagcctccccgcctcccaccggagcagcaccgaggccggaggcgaggtgcagacctccaagaagtcctacgtgtgtccgaactgtgggaaaatcttccgctggagggtcaacttcatccggcatctgcggagccgcagggagcaggagaagccgcacgagtgctcggtgtgcggggagctgttcagcgacagcgaggacctggatgggcacctagagagccacgaggcccagaagccttaccggtgtggtgcctgcgggaagagcttccgcctgaactcccacctgctctcccaccggcggatacacctgcagccggacagactccagccggtggagaagagagagcaggcggcatccgaggacgcggacaagggtcccaaagagccgctggaaaacggcaaggccaaactgagcttccagtgctgtgagtgtgggaaggccttccagcggcacgaccacctggctcggcaccgcagccactttcacctgaaggacaaagcccggcccttccagtgccggtactgcgtcaagagcttcacgcagaactatgacctcctccgccacgagcgcctgcacatgaagcgccgttccaagcaggctctgaactcctactagtaatgaactagtccgtaacttgaaagtatttcgatttcttggctttatatatcttgtggaaaggacgaggtggtataccttggcaagctggg

SEQ ID NO: 1049 - DNA, 1523 bp, Homo sapiens
  source 1..1523: mol_type = genomic DNA
accgccaccatgaattacgacaagctgagccgggccctgcgctattactataacaagcgcattctgcacaagaccaaggggaaacggttcacctacaagttcaatttcaacaaactggtgctggtcaattacccattcattgatgtggggttggctgggggtgcagtgccccagagtgccccgccagtgccgtcgggtggtagccacttccgcttccctccctcaacgccctccgaggtgctgtcccccaccgaggacccccgctcaccaccagcctgctcttcatcttcatcttccctcttctcggctgtggtggcccgccgcctgggccgaggctcagtcagtgactgtagtgatggcacgtcagagctggaggaaccgctgggagaggatccccgcgcccgaccacccggccctccggatctgggtgccttccgagggcccccgctggcccgcctgccccatgaccctggtgtcttccgagtctatccccggcctcggggtggccctgaacccctcagccccttccctgtgtcgcctctggccggtcctggatccctgctgccccctcagctctccccggctctgcccatgacgcccacccacctggcctacactccctcgcccacgctgagcccgatgtaccccagtggtggcggggggcccagcggctcagggggaggctcccacttctccttcagccctgaggacatgaaacggtacctgcaggcccacacccaaagcgtctacaactaccacctcagcccccgcgccttcctgcactaccctgggctggtggtgccccagccccagcgccctgacaagtgcccgctgccgcccatggcacccgagaccccaccggtcccctcctcggcctcgtcatcctcttcttcttcttcctccccattcaagtttaagctccagccgcccccactcggacgccggcagcgggcagctggggagaaggccgtagccggtgctgacaagagcggtggcagtgcaggcgggctggctgagggggcaggggcgctagccccaccgcccccgccaccacagatcaaggtggagcccatctcggaaggcgagtcggaggaggtagaggtgactgacatcagtgatgaggatgaggaagacggggaggtgttcaagacgccccgtgccccacctgcaccccctaagcctgagcccggcgaggcacccggggcatcccagtgcatgcccctcaagctacgctttaagcggcgctggagtgaagactgtcgcctcgaagggggtgggggccccgctgggggctttgaggatgagggtgaggacaagaaggtgcgtggggaggggcctggggaggctggggggcccctcaccccaaggcgggtgagctctgacctccagcatgccacggcccagctctccctggagcaccgagactcctagtaatgaactagtccgtaacttgaaagtatttcgatttcttggctttatatatcttgtggaaaggacgaattgcgcacctctggaccggtctg

SEQ ID NO: 1050 - DNA, 1562 bp, Homo sapiens
  source 1..1562: mol_type = genomic DNA
accgccaccatgattcagactgtcccggacccagcagctcatatcaaggaagccttatcagttgtgagtgaggaccagtcgttgtttgagtgtgcctacggaacgccacacctggctaagacagagatgaccgcgtcctcctccagcgactatggacagacttccaagatgagcccacgcgtccctcagcaggattggctgtctcaacccccagccagggtcaccatcaaaatggaatgtaaccctagccaggtgaatggctcaaggaactctcctgatgaatgcagtgtggccaaaggcgggaagatggtgggcagcccagacaccgttgggatgaactacggcagctacatggaggagaagcacatgccacccccaaacatgaccacgaacgagcgcagagttatcgtgccagcagatcctacgctatggagtacagaccatgtgcggcagtggctggagtgggcggtgaaagaatatggccttccagacgtcaacatcttgttattccagaacatcgatgggaaggaactgtgcaagatgaccaaggacgacttccagaggctcacccccagctacaacgccgacatccttctctcacatctccactacctcagagagactcctcttccacatttgacttcagatgatgttgataaagccttacaaaactctccacggttaatgcatgctagaaacacagggggtgcagcttttattttcccaaatacttcagtatatcctgaagctacgcaaagaattacaactaggccagatttaccatatgagccccccaggagatcagcctggaccggtcacggccaccccacgccccagtcgaaagctgctcaaccatctccttccacagtgcccaaaactgaagaccagcgtcctcagttagatccttatcagattcttggaccaacaagtagccgccttgcaaatccaggcagtggccagatccagctttggcagttcctcctggagctcctgtcggacagctccaactccagctgcatcacctgggaaggcaccaacggggagttcaagatgacggatcccgacgaggtggcccggcgctggggagagcggaagagcaaacccaacatgaactacgataagctcagccgcgccctccgttactactatgacaagaacatcatgaccaaggtccatgggaagcgctacgcctacaagttcgacttccacgggatcgcccaggccctccagccccaccccccggagtcatctctgtacaagtacccctcagacctcccgtacatgggctcctatcacgcccacccacagaagatgaactttgtggcgccccaccctccagccctccccgtgacatcttccagtttttttgctgccccaaacccatactggaattcaccaactgggggtatataccccaacactaggctccccaccagccatatgccttctcatctgggcacttactactagtaatgaactagtccgtaacttgaaagtatttcgatttcttggctttatatatcttgtggaaaggacgatctgcctcgaatattgtttaattg

SEQ ID NO: 1051 - DNA, 1193 bp, Homo sapiens
  source 1..1193: mol_type = genomic DNA
accgccaccatggtgggcagcccagacaccgttgggatgaactacggcagctacatggaggagaagcacatgccacccccaaacatgaccacgaacgagcgcagagttatcgtgccagcagatcctacgctatggagtacagaccatgtgcggcagtggctggagtgggcggtgaaagaatatggccttccagacgtcaacatcttgttattccagaacatcgatgggaaggaactgtgcaagatgaccaaggacgacttccagaggctcacccccagctacaacgccgacatccttctctcacatctccactacctcagagagactcctcttccacatttgacttcagatgatgttgataaagccttacaaaactctccacggttaatgcatgctagaaacacagatttaccatatgagccccccaggagatcagcctggaccggtcacggccaccccacgccccagtcgaaagctgctcaaccatctccttccacagtgcccaaaactgaagaccagcgtcctcagttagatccttatcagattcttggaccaacaagtagccgccttgcaaatccaggcagtggccagatccagctttggcagttcctcctggagctcctgtcggacagctccaactccagctgcatcacctgggaaggcaccaacggggagttcaagatgacggatcccgacgaggtggcccggcgctggggagagcggaagagcaaacccaacatgaactacgataagctcagccgcgccctccgttactactatgacaagaacatcatgaccaaggtccatgggaagcgctacgcctacaagttcgacttccacgggatcgcccaggccctccagccccaccccccggagtcatctctgtacaagtacccctcagacctcccgtacatgggctcctatcacgcccacccacagaagatgaactttgtggcgccccaccctccagccctccccgtgacatcttccagtttttttgctgccccaaacccatactggaattcaccaactgggggtatataccccaacactaggctccccaccagccatatgccttctcatctgggcacttactactagtaatgaactagtccgtaacttgaaagtatttcgatttcttggctttatatatcttgtggaaaggacgaggcctcacctgagttgctagggcg

SEQ ID NO: 1052 - DNA, 1490 bp, Homo sapiens
  source 1..1490: mol_type = genomic DNA
accgccaccatgattcagactgtcccggacccagcagctcatatcaaggaagccttatcagttgtgagtgaggaccagtcgttgtttgagtgtgcctacggaacgccacacctggctaagacagagatgaccgcgtcctcctccagcgactatggacagacttccaagatgagcccacgcgtccctcagcaggattggctgtctcaacccccagccagggtcaccatcaaaatggaatgtaaccctagccaggtgaatggctcaaggaactctcctgatgaatgcagtgtggccaaaggcgggaagatggtgggcagcccagacaccgttgggatgaactacggcagctacatggaggagaagcacatgccacccccaaacatgaccacgaacgagcgcagagttatcgtgccagcagatcctacgctatggagtacagaccatgtgcggcagtggctggagtgggcggtgaaagaatatggccttccagacgtcaacatcttgttattccagaacatcgatgggaaggaactgtgcaagatgaccaaggacgacttccagaggctcacccccagctacaacgccgacatccttctctcacatctccactacctcagagagactcctcttccacatttgacttcagatgatgttgataaagccttacaaaactctccacggttaatgcatgctagaaacacagatttaccatatgagccccccaggagatcagcctggaccggtcacggccaccccacgccccagtcgaaagctgctcaaccatctccttccacagtgcccaaaactgaagaccagcgtcctcagttagatccttatcagattcttggaccaacaagtagccgccttgcaaatccaggcagtggccagatccagctttggcagttcctcctggagctcctgtcggacagctccaactccagctgcatcacctgggaaggcaccaacggggagttcaagatgacggatcccgacgaggtggcccggcgctggggagagcggaagagcaaacccaacatgaactacgataagctcagccgcgccctccgttactactatgacaagaacatcatgaccaaggtccatgggaagcgctacgcctacaagttcgacttccacgggatcgcccaggccctccagccccaccccccggagtcatctctgtacaagtacccctcagacctcccgtacatgggctcctatcacgcccacccacagaagatgaactttgtggcgccccaccctccagccctccccgtgacatcttccagtttttttgctgccccaaacccatactggaattcaccaactgggggtatataccccaacactaggctccccaccagccatatgccttctcatctgggcacttactactagtaatgaactagtccgtaacttgaaagtatttcgatttcttggctttatatatcttgtggaaaggacgactaagcgcggatcaacgctggccg

SEQ ID NO: 1053 - DNA, 1265 bp, Homo sapiens
  source 1..1265: mol_type = genomic DNA
accgccaccatggtgggcagcccagacaccgttgggatgaactacggcagctacatggaggagaagcacatgccacccccaaacatgaccacgaacgagcgcagagttatcgtgccagcagatcctacgctatggagtacagaccatgtgcggcagtggctggagtgggcggtgaaagaatatggccttccagacgtcaacatcttgttattccagaacatcgatgggaaggaactgtgcaagatgaccaaggacgacttccagaggctcacccccagctacaacgccgacatccttctctcacatctccactacctcagagagactcctcttccacatttgacttcagatgatgttgataaagccttacaaaactctccacggttaatgcatgctagaaacacagggggtgcagcttttattttcccaaatacttcagtatatcctgaagctacgcaaagaattacaactaggccagatttaccatatgagccccccaggagatcagcctggaccggtcacggccaccccacgccccagtcgaaagctgctcaaccatctccttccacagtgcccaaaactgaagaccagcgtcctcagttagatccttatcagattcttggaccaacaagtagccgccttgcaaatccaggcagtggccagatccagctttggcagttcctcctggagctcctgtcggacagctccaactccagctgcatcacctgggaaggcaccaacggggagttcaagatgacggatcccgacgaggtggcccggcgctggggagagcggaagagcaaacccaacatgaactacgataagctcagccgcgccctccgttactactatgacaagaacatcatgaccaaggtccatgggaagcgctacgcctacaagttcgacttccacgggatcgcccaggccctccagccccaccccccggagtcatctctgtacaagtacccctcagacctcccgtacatgggctcctatcacgcccacccacagaagatgaactttgtggcgccccaccctccagccctccccgtgacatcttccagtttttttgctgccccaaacccatactggaattcaccaactgggggtatataccccaacactaggctccccaccagccatatgccttctcatctgggcacttactactagtaatgaactagtccgtaacttgaaagtatttcgatttcttggctttatatatcttgtggaaaggacgagggcgtcaagctgttctggatgct

SEQ ID NO: 1054 - DNA, 1469 bp, Homo sapiens
  source 1..1469: mol_type = genomic DNA
accgccaccatggccagcactattaaggaagccttatcagttgtgagtgaggaccagtcgttgtttgagtgtgcctacggaacgccacacctggctaagacagagatgaccgcgtcctcctccagcgactatggacagacttccaagatgagcccacgcgtccctcagcaggattggctgtctcaacccccagccagggtcaccatcaaaatggaatgtaaccctagccaggtgaatggctcaaggaactctcctgatgaatgcagtgtggccaaaggcgggaagatggtgggcagcccagacaccgttgggatgaactacggcagctacatggaggagaagcacatgccacccccaaacatgaccacgaacgagcgcagagttatcgtgccagcagatcctacgctatggagtacagaccatgtgcggcagtggctggagtgggcggtgaaagaatatggccttccagacgtcaacatcttgttattccagaacatcgatgggaaggaactgtgcaagatgaccaaggacgacttccagaggctcacccccagctacaacgccgacatccttctctcacatctccactacctcagagagactcctcttccacatttgacttcagatgatgttgataaagccttacaaaactctccacggttaatgcatgctagaaacacagatttaccatatgagccccccaggagatcagcctggaccggtcacggccaccccacgccccagtcgaaagctgctcaaccatctccttccacagtgcccaaaactgaagaccagcgtcctcagttagatccttatcagattcttggaccaacaagtagccgccttgcaaatccaggcagtggccagatccagctttggcagttcctcctggagctcctgtcggacagctccaactccagctgcatcacctgggaaggcaccaacggggagttcaagatgacggatcccgacgaggtggcccggcgctggggagagcggaagagcaaacccaacatgaactacgataagctcagccgcgccctccgttactactatgacaagaacatcatgaccaaggtccatgggaagcgctacgcctacaagttcgacttccacgggatcgcccaggccctccagccccaccccccggagtcatctctgtacaagtacccctcagacctcccgtacatgggctcctatcacgcccacccacagaagatgaactttgtggcgccccaccctccagccctccccgtgacatcttccagtttttttgctgccccaaacccatactggaattcaccaactgggggtatataccccaacactaggctccccaccagccatatgccttctcatctgggcacttactactagtaatgaactagtccgtaacttgaaagtatttcgatttcttggctttatatatcttgtggaaaggacgattacataggctttccgcaggagtc

SEQ ID NO: 1055 - DNA, 2042 bp, Homo sapiens
  source 1..2042: mol_type = genomic DNA
accgccaccatgaatgagtgtaatgtgcacaaagaaggttataatgaactaaaccagtatttgacaactacccagagcaaaatatttcaatgtgataaatatgtgaaagtctttcataaacttttaaattcaaatagacataacacaaaacatactggaaagaaacctttcaaatgtaaaaaatgtggcaaatcattttgcatgcttttacacctatgtcagcataaaagaattcatattagagagaattcttaccgatgtgaagaatgtggcaaagcctttatctggttttcaacccttactagacacaggagagttcatactggagagaaatcctacaaatatgaatgtggcaaatcttttaaccaggactcaaaccttactacacataagagaattcatactggacagaaaccctacaaatgtgaagaatgtggcacatctttctaccaattctcataccttactaggcataagctaattcatactagagagaaaccctataaatgtgaacaatatggcaaaacttttaaccaatcttcaacccttactggacataagataattcataatggagaaaaaccctataaatgtgaagaatgtggcaaagcctttagtattttctcaacccctactaaacataagataattcacactgaagagaaatcccacagatgtgaagaatattgcaaagcttataaggagtcctcacaccttactacacataaaagaattcatactggagagaaaccctacaaatgtgaagaatgtggcaaagcctttagtattttctcaacccttactaaacataagataattcacactgaagagaaatcccacagatgtgaagaatgtggcaaagcttataaggagtcttcacaccttactacacataaaagaattcatactggagagaaaccctacaaatgtgaagaatgtggcaaaacctttagtgtattctcaattcttactaaacataaaataattcatacagaagagaaaccctacaaatgtgaagaatgtggcaaagcttttaaacgatcttcaacccttactaaacataggataattcatactgaagagaaaccctacaaatgtgaagaatgtggcaaagcttttaaccaatcttcaacccttagtatacataaaataattcatactggagaaaaaccctacaaatgtgaagaatgtggcaaagcttttaaacgatcttcaacccttactatacataaaatgattcacactggagaaaaaccctacaaatgtgaagaatgtggcaaagcttttaatcggtcctcacaccttactacacataagagaattcatactggacacaaaccctacaaatgtaaagaatgtggcaaatcctttagtgtattctcaacccttactaaacacaagataattcatactgataagaaaccctacaaatgtgaagaatgtggcaaagcttttaaccgatcttcaatccttagtatacataagaaaattcatactggagaaaaaccctacaaatgtgaagaatgtggcaaagcttttaagcggtcctcacacctcgctgggcacaagcaaattcatagtgtacaaaaaccctacaaatgtgaagaatgtggcaaagcctttagtatattctcaacccttactaaacataagataattcatactgaagagaaaccctacaaatgtgaaaaatgtggcaaaactttctaccgattctcaaaccttaatacgcataagataattcatactggagagaaaccttgcaaatgtgaagaatgtggcaaagcttttaaccattcctcaaaccttattaaacataagctaattcatactggagacaaaccctacaaatgtgaagcatgtggcaaagcttttaggcggtcttcacatcttagtagacataagataattcatattggaattcatactgaagagactgtacaaaagtagtaatgaactagtccgtaacttgaaagtatttcgatttcttggctttatatatcttgtggaaaggacgagtagaatcgagagggcgagacttc

SEQ ID NO: 1056 - DNA, 413 bp, Homo sapiens
  source 1..413: mol_type = genomic DNA
accgccaccatgccaggaccccctgaaagcctagacatggggccgttgacatttagggatgtggccatagaattctctctggaggagtggcaatgcctggacactgctcagcaggatttgtataggaaagtgatgttagagaactacagaaacctggtcttcttggcaggtattgctgtctctaagccagatctggtcacctgtctggagcaaggaaaagatccctggaatatgaagggacacagtacggtagtcaaacccccagtagagacggggtttcaccgttttagccaggatggtctctatctcctgacctcgtagtaatgaactagtccgtaacttgaaagtatttcgatttcttggctttatatatcttgtggaaaggacgaggtcctaagacagaaccggccctg

SEQ ID NO: 1057 - DNA, 2426 bp, Homo sapiens
  source 1..2426: mol_type = genomic DNA
accgccaccatgccaggaccccctgaaagcctagacatggggccgttgacatttagggatgtggccatagaattctctctggaggagtggcaatgcctggacactgctcagcaggatttgtataggaaagtgatgttagagaactacagaaacctggtcttcttgggtattgctgtctctaagccagatctggtcacctgtctggagcaaggaaaagatccctggaatatgaagggacacagtacggtagtcaaacccccagttatatgttctcattttgctgaagacttttgcccagggccaggcattaaagattcttttcaaaaagtgatactgagagaatatgtaaaatgtggacataaggatttacagttaagaaaaggatgtaaaagtatgaatgagtgtaatgtgcacaaagaaggttataatgaactaaaccagtatttgacaactacccagagcaaaatatttcaatgtgataaatatgtgaaagtctttcataaacttttaaattcaaatagacataacacaaaacatactggaaagaaacctttcaaatgtaaaaaatgtggcaaatcattttgcatgcttttacacctatgtcagcataaaagaattcatattagagagaattcttaccgatgtgaagaatgtggcaaagcctttatctggttttcaacccttactagacacaggagagttcatactggagagaaatcctacaaatatgaatgtggcaaatcttttaaccaggactcaaaccttactacacataagagaattcatactggacagaaaccctacaaatgtgaagaatgtggcacatctttctaccaattctcataccttactaggcataagctaattcatactagagagaaaccctataaatgtgaacaatatggcaaaacttttaaccaatcttcaacccttactggacataagataattcataatggagaaaaaccctataaatgtgaagaatgtggcaaagcctttagtattttctcaacccctactaaacataagataattcacactgaagagaaatcccacagatgtgaagaatattgcaaagcttataaggagtcctcacaccttactacacataaaagaattcatactggagagaaaccctacaaatgtgaagaatgtggcaaagcctttagtattttctcaacccttactaaacataagataattcacactgaagagaaatcccacagatgtgaagaatgtggcaaagcttataaggagtcttcacaccttactacacataaaagaattcatactggagagaaaccctacaaatgtgaagaatgtggcaaaacctttagtgtattctcaattcttactaaacataaaataattcatacagaagagaaaccctacaaatgtgaagaatgtggcaaagcttttaaacgatcttcaacccttactaaacataggataattcatactgaagagaaaccctacaaatgtgaagaatgtggcaaagcttttaaccaatcttcaacccttagtatacataaaataattcatactggagaaaaaccctacaaatgtgaagaatgtggcaaagcttttaaacgatcttcaacccttactatacataaaatgattcacactggagaaaaaccctacaaatgtgaagaatgtggcaaagcttttaatcggtcctcacaccttactacacataagagaattcatactggacacaaaccctacaaatgtaaagaatgtggcaaatcctttagtgtattctcaacccttactaaacacaagataattcatactgataagaaaccctacaaatgtgaagaatgtggcaaagcttttaaccgatcttcaatccttagtatacataagaaaattcatactggagaaaaaccctacaaatgtgaagaatgtggcaaagcttttaagcggtcctcacacctcgctgggcacaagcaaattcatagtgtacaaaaaccctacaaatgtgaagaatgtggcaaagcctttagtatattctcaacccttactaaacataagataattcatactgaagagaaaccctacaaatgtgaaaaatgtggcaaaactttctaccgattctcaaaccttaatacgcataagataattcatactggagagaaaccttgcaaatgtgaagaatgtggcaaagcttttaaccattcctcaaaccttattaaacataagctaattcatactggagacaaaccctacaaatgtgaagcatgtggcaaagcttttaggcggtcttcacatcttagtagacataagataattcatattggaattcatactgaagagactgtacaaaagtagtaatgaactagtccgtaacttgaaagtatttcgatttcttggctttatatatcttgtggaaaggacgagttcctggatagaatctcggctta

SEQ ID NO: 1058 - DNA, 749 bp, Homo sapiens
  source 1..749: mol_type = genomic DNA
accgccaccatgaacctcgtgggcagctacgcacaccatcaccaccatcaccacccgcaccctgcgcaccccatgctccacgaacccttcctcttcggtccggcctcgcgctgtcatcaggaaaggccctacttccagagctggctgctgagcccggctgacgctgccccggacttccctgcgggcgggccgccgcccgcggccgctgcagccgccaccgcctatggtcctgacgccaggcctgggcagagccccgggcggctggaggcgcttggcggccgtcttggccggcggaaaggctcaggacccaagaaggagcggagacgcactgagagcattaacagcgcattcgcggagttgcgcgagtgcatccccaacgtgccggccgacaccaagctctccaagatcaagactctgcgcctagccaccagctacatcgcctacctgatggacgtgctggccaaggatgcacagtctggcgatcccgaggccttcaaggctgaactcaagaaggcggatggcggccgtgagagcaagcggaaaagggagctgcagcagcacgaaggttttcctcctgccctgggcccagtcgagaagaggattaaaggacgcaccggctggccgcagcaagtctgggcgctggagttaaaccagtagtaatgaactagtccgtaacttgaaagtatttcgatttcttggctttatatatcttgtggaaaggacgatcggtaccagagtcgaagccgttg

SEQ ID NO: 1059 - DNA, 755 bp, Homo sapiens
  source 1..755: mol_type = genomic DNA
accgccaccatgagtctggtaggtggttttccccaccacccggtggtgcaccacgagggctacccgtttgccgccgccgccgccgcagctgccgccgccgccgccagccgctgcagccatgaggagaacccctacttccatggctggctcatcggccaccccgagatgtcgccccccgactacagcatggccctgtcctacagccccgagtatgccagcggcgccgccggcctggaccactcccattacgggggggtgccgccgggcgccgggcccccgggcctgggggggccgcgcccggtgaagcgccgaggcaccgccaaccgcaaggagcggcgcaggactcagagcatcaacagcgccttcgccgaactgcgcgagtgcatccccaacgtacccgccgacaccaaactctccaaaatcaagaccctgcgcctggccaccagctacatcgcctacctcatggacctgctggccaaggacgaccagaatggcgaggcggaggccttcaaggcagagatcaagaagaccgacgtgaaagaggagaagaggaagaaggagctgaacgaaatcttgaaaagcacagtgagcagcaacgacaagaaaaccaaaggccggacgggctggccgcagcacgtctgggccctggagctcaagcagtagtaatgaactagtccgtaacttgaaagtatttcgatttcttggctttatatatcttgtggaaaggacgaaaagtattgctgtctgtagtacct

SEQ ID NO: 1060 - DNA, 323 bp, Homo sapiens
  source 1..323: mol_type = genomic DNA
accgccaccatgtcgggacaccccggaagctgggaaatgaactcggttgcctttgaggatgtggctgtgaacttcacccaggaggagtgggctttgttggatccttcccagaagaatctctatagagacgtgatgcaggaaaccttcaggaatctggcttccataggaaacaaaggggaagaccagagcattgaagatcagtacaaaaattcttcaagaaatctaagatagtaatgaactagtccgtaacttgaaagtatttcgatttcttggctttatatatcttgtggaaaggacgagtaaacacccaaggccgtcagtcc

SEQ ID NO: 1061 - DNA, 971 bp, Homo sapiens
  source 1..971: mol_type = genomic DNA
accgccaccatgtcgggacaccccggaagctgggaaatgaactcggttgcctttgaggatgtggctgtgaacttcacccaggaggagtgggctttgttggatccttcccagaagaatctctatagagacgtgatgcaggaaaccttcaggaatctggcttccataggaaacaaaggggaagaccagagcattgaagatcagtacaaaaattcttcaagaaatctaagttcatttcagatacatcagagaaatcacactggagagaaaccctatgaatgtatggaatgtgggaaagccttaggtttttcccgttctcttaatagacataaaaggattcacactggagaaaaacgctatgaatgtaagcaatgtgggaaagccttcagtcgttccagtcaccttcgtgaccatgaaagaactcatactggagagaaaccctatgaatgtaagcactgtgggaaagccttccgttactccaattgccttcattaccatgaaagaactcacactggagagaaaccttatgtgtgcatggaatgtggcaaagctttcagttgtctcagttccttgcaaggacatataaaggctcatgctggtgaagaaccctatccatgtaagcaatgtgggaaagccttcagatacgccagttcccttcagaaacacgagaaaactcatattgcacagaaaccctatgtatgtaacaattgtggtaaaggcttcagatgttccagttcccttcgtgaccatgaaaggactcatactggagagaaaccctatgaatgtcagaaatgtggcaaagcctttagtcgtgctagtaccctttggaagcataaaaaaactcatactggagaaaagccctataaatgtaaaaaaatgtagtaatgaactagtccgtaacttgaaagtatttcgatttcttggctttatatatcttgtggaaaggacgagtatataactcggctatgtcttgc

SEQ ID NO: 1062 - DNA, 335 bp, Homo sapiens
  source 1..335: mol_type = genomic DNA
accgccaccatgtcgggacaccccggaagctgggaaatgaactcggttgcctttgaggatgtggctgtgaacttcacccaggaggagtgggctttgttggatccttcccagaagaatctctatagagacgtgatgcaggaaaccttcaggaatctggcttccataggaaacaaaggggaagaccagagcattgaagatcagtacaaaaattcttcaagaaatctaagatgtactggttcatagtaatgaactagtccgtaacttgaaagtatttcgatttcttggctttatatatcttgtggaaaggacgaaaggcacagagttacagcacgatg

SEQ ID NO: 1063 - DNA, 1157 bp, Homo sapiens
  source 1..1157: mol_type = genomic DNA
accgccaccatgtcgggacaccccggaagctgggaaatgaactcggttgcctttgaggatgtggctgtgaacttcacccaggaggagtgggctttgttggatccttcccagaagaatctctatagagacgtgatgcaggaaaccttcaggaatctggcttccataggaaacaaaggggaagaccagagcattgaagatcagtacaaaaattcttcaagaaatctaaggcacatcatatctcattctggaaacaacccatatgggtgtgaggaatgcggaaagaagccatgtacatgtaaacaatgtcagaaaacttccctttctgtcacaagggttcacagagacacagtaatgcacactggaaatggacattatggttgtacaatatgtgagaaagtttttaatattcccagttcatttcagatacatcagagaaatcacactggagagaaaccctatgaatgtatggaatgtgggaaagccttaggtttttcccgttctcttaatagacataaaaggattcacactggagaaaaacgctatgaatgtaagcaatgtgggaaagccttcagtcgttccagtcaccttcgtgaccatgaaagaactcatactggagagaaaccctatgaatgtaagcactgtgggaaagccttccgttactccaattgccttcattaccatgaaagaactcacactggagagaaaccttatgtgtgcatggaatgtggcaaagctttcagttgtctcagttccttgcaaggacatataaaggctcatgctggtgaagaaccctatccatgtaagcaatgtgggaaagccttcagatacgccagttcccttcagaaacacgagaaaactcatattgcacagaaaccctatgtatgtaacaattgtggtaaaggcttcagatgttccagttcccttcgtgaccatgaaaggactcatactggagagaaaccctatgaatgtcagaaatgtggcaaagcctttagtcgtgctagtaccctttggaagcataaaaaaactcatactggagaaaagccctataaatgtaaaaaaatgtagtaatgaactagtccgtaacttgaaagtatttcgatttcttggctttatatatcttgtggaaaggacgaattggcacgcggtttaacgggatc

SEQ ID NO: 1064 - DNA, 1160 bp, Homo sapiens
  source 1..1160: mol_type = genomic DNA
accgccaccatgccacgctccttcctggtgaagagcaagaaggctcacacctaccaccagccccgtgtgcaggaagatgaaccgctctggcctcctgcccttaccccggtgcccagagaccaggctccaagcaacagccctgtccttagcactctattcccaaaccagtgcctggactggaccaacctcaaacgagagccggagctggagcaggaccagaacttggccaggatggccccggcaccagagggccccattgtgctgtcccgaccccaggatggggactctccactgtccgactcacccccattctacaagcctagcttctcctgggacaccttggccacaacctatggccacagctaccggcaggccccctccaccatgcagtcagccttcctggagcactccgtcagcctgtacggcagtcctcttgtgcccagcactgagcccgccttggacttcagcctccgctactccccaggcatggatgcgtaccactgtgtgaagtgcaacaaggtcttctccacccctcacgggctcgaagtgcatgtgcgacgctcccatagtgggacccggcccttcgcctgtgacatctgcggcaaaaccttcggccacgctgtgagcctggagcagcacacgcacgtccactcccaggggatcccggccgggtccagtcctgagcctgcacctgaccccccggggcctcatttcctccggcaggagcgcagcttcgagtgccgcatgtgcggcaaggccttcaagcgctcgtccacgctgtccacccacctgctcatccactcagacacgcggccctacccctgccagttctgcggcaagcgtttccaccagaagtccgacatgaagaagcacacctacatccacacaggtgagaagccgcacaagtgccaggtgtgcggaaaggccttcagccagagctccaacctcatcacccacagccgcaagcacacaggcttcaagcccttcagctgtgagctgtgcaccaaaggcttccagcgcaaggtggacctgcggcggcaccgcgagagccagcacaatctcaagtagtaatgaactagtccgtaacttgaaagtatttcgatttcttggctttatatatcttgtggaaaggacgaacagcagggttgctctatggacca

SEQ ID NO: 1065 - DNA, 1094 bp, Homo sapiens
  source 1..1094: mol_type = genomic DNA
accgccaccatgccacgctccttcctggtgaagagcaagaaggctcacacctaccaccagccccgtgtgcaggaagatgaaccgctctggcctcctgcccttaccccggtgcccagagaccaggctccaagcaacagccctgtccttagcactctattcccaaaccagtgcctggactggaccaacctcaaacgagagccggagctggagcaggaccagaacttggccaggatggccccggcaccagagggccccattgtgctgtcccgaccccaggatggggactctccactgtccgactcacccccattctacaagcctagcttctcctgggacaccttggccacaacctatggccacagctaccggcaggccccctccaccatgcagtcagccttcctggagcactccgtcagcctgtacggcagtcctcttgtgcccagcactgagcccgccttggacttcagcctccgctactccccaggcatggatgcgtaccactgtgtgaagtgcaacaaggtcttctccacccctcacgggctcgaagtgcatgtgcgacgctcccatagtgggacccggcccttcgcctgtgacatctgcggcaaaaccttcggccacgctgtgagcctggagcagcacacgcacgtccactcccaggagcgcagcttcgagtgccgcatgtgcggcaaggccttcaagcgctcgtccacgctgtccacccacctgctcatccactcagacacgcggccctacccctgccagttctgcggcaagcgtttccaccagaagtccgacatgaagaagcacacctacatccacacaggtgagaagccgcacaagtgccaggtgtgcggaaaggccttcagccagagctccaacctcatcacccacagccgcaagcacacaggcttcaagcccttcagctgtgagctgtgcaccaaaggcttccagcgcaaggtggacctgcggcggcaccgcgagagccagcacaatctcaagtagtaatgaactagtccgtaacttgaaagtatttcgatttcttggctttatatatcttgtggaaaggacgacacccgggagctcggattcgtagt

SEQ ID NO: 1066 - DNA, 956 bp, Homo sapiens
  source 1..956: mol_type = genomic DNA
accgccaccatgccacgctccttcctggtgaagagcaagaaggctcacacctaccaccagccccgtgtgcaggaagatgaaccgctctggcctcctgcccttaccccggtgcccagagaccaggctccaagcaacagccctgtccttagcactctattcccaaaccagtgcctggactggaccaacctcaaacgagagccggagctggagcaggaccagaacttggccaggatggccccggcaccagagggccccattgtgctgtcccgaccccaggatggggactctccactgtccgactcacccccattctacaagcctagcttctcctgggacaccttggccacaacctatggccacagctaccggcaggccccctccaccatgcagtcagccttcctggagcactccgtcagcctgtacggcagtcctcttgtgcccagcactgagcccgccttggacttcagcctccgctactccccaggcatggatgcgtaccactgtgtgaagtgcaacaaggagcgcagcttcgagtgccgcatgtgcggcaaggccttcaagcgctcgtccacgctgtccacccacctgctcatccactcagacacgcggccctacccctgccagttctgcggcaagcgtttccaccagaagtccgacatgaagaagcacacctacatccacacaggtgagaagccgcacaagtgccaggtgtgcggaaaggccttcagccagagctccaacctcatcacccacagccgcaagcacacaggcttcaagcccttcagctgtgagctgtgcaccaaaggcttccagcgcaaggtggacctgcggcggcaccgcgagagccagcacaatctcaagtagtaatgaactagtccgtaacttgaaagtatttcgatttcttggctttatatatcttgtggaaaggacgacactgtcgcccaggaagtgttcat

SEQ ID NO: 1067 - DNA, 1274 bp, Homo sapiens
  source 1..1274: mol_type = genomic DNA
accgccaccatggcagaaatccacaatggaggggaactctgtgactttatggaaaatggagaaatcttcagtgaacactcatgccttaatgcacacatgggaactgaaaatacaggggacacttatgactgtgatgagtatggagaaaactttcccatgttacacaacagtgcccctgctggagagacactttctgtgttgaatcagtgcagaaaagccttcagcctgccaccaaatgttcaccagagaacgtggataggagacaaatcctttgaatacagtgactgtgaggaagcctttgttgatcagtcacatcttcaggcaaataggataactcacaatggagaaacactctatgaacagaagcaatgtgggagagcttttacttactccacaagccatgctgtgtctgttaaaatgcatactgtagaaaaaccctacgaatgtaaggaatgtggaaaattctttagatattcttcatatcttaatagtcacatgcgaacccatactggggagaaaccctatgaatgtaaggaatgtgggaaatgcttcactgtttcttcacacctagttgaacatgtaagaattcatactggagagaaaccttatcaatgtaaggaatgtggaagagccttcgctgggcgctcaggccttactaaacatgtacgaatacacactggagagaagccctatgaatgtaacgaatgtgggaaagcctacaataggttttatctactaactgaacattttaaaactcacacagaggagaagccctttgaatgtaaggtatgtggaaaatccttcagaagctcttcatgccttaagaatcactttagaattcacactggaataaaaccctataaatgtaaggagtgtgggaaagcattcactgtttcctcaagcttacataatcatgtaaaaatccatactggagagaagccctatgaatgtaaggactgtgggaaagcctttgctacatcttcacaactcattgaacatataagaactcacactggagagaaaccgtatatatgtaaggaatgtgggaaaaccttccgtgcttcttcacatctacagaaacatgttagaattcacactggagagaaaccctatatatgtaacgaatgtgggaaagcctacaatagattttatttacttactaaacatttaaaaacacactagtaatgaactagtccgtaacttgaaagtatttcgatttcttggctttatatatcttgtggaaaggacgagtagtaacaacccataagttgctg

SEQ ID NO: 1068 - DNA, 926 bp, Homo sapiens
  source 1..926: mol_type = genomic DNA
accgccaccatgttcccgtcttggccaacatgccttgaattggaacgctacctacagacggagccccggaggatctcagagacctttggtgaggacttggactgtttcctccacgcttcccctcccccgtgcattgaggaaagcttccgtcgcttagaccccctgctgctccccgtggaagcggccatctgtgagaagagctcggcagtggacatcttgctctctcgggacaagttgctatctgagacctgcctcagcctccagccggccagctcttctctagacagctacacagccgtcaaccaggcccagctcaacgcagtgacctcattaacgcccccatcgtcccctgagctcagccgccatctggtcaaaacctcacaaactctctctgccgtggatggcacggtgacgttgaaactggtggccaagaaggctgctctcagctccgtaaaggtgggaggggtcgcaacagctgcagcagccgtgacggctgcgggggccgttaagagtggacagagcgacagtgaccaaggagggctgggggctgaagcatgtcccgaaaacaagaagagggttcaccgctgtcagtttaacgggtgccggaaagtttatacaaaaagctcccacttaaaggcccaccagaggactcacacaggtgagaagccttataagtgctcatgggagggatgtgagtggcgttttgcacgaagcgatgagctcacgaggcactacaggaaacacacaggtgcaaagcccttcaaatgcaaccactgcgacaggtgtttttccaggtctgaccatcttgccctccacatgaagagacatatctagtaatgaactagtccgtaacttgaaagtatttcgatttcttggctttatatatcttgtggaaaggacgagtagggactggcatcccgtgaacg

SEQ ID NO: 1069 - DNA, 1010 bp, Homo sapiens
  source 1..1010: mol_type = genomic DNA
accgccaccatggacgtgttggctagttatagtatattccaggagctacaacttgtccacgacaccggctacttctcagctttaccatccctggaggagacctggcagcagacatgccttgaattggaacgctacctacagacggagccccggaggatctcagagacctttggtgaggacttggactgtttcctccacgcttcccctcccccgtgcattgaggaaagcttccgtcgcttagaccccctgctgctccccgtggaagcggccatctgtgagaagagctcggcagtggacatcttgctctctcgggacaagttgctatctgagacctgcctcagcctccagccggccagctcttctctagacagctacacagccgtcaaccaggcccagctcaacgcagtgacctcattaacgcccccatcgtcccctgagctcagccgccatctggtcaaaacctcacaaactctctctgccgtggatggcacggtgacgttgaaactggtggccaagaaggctgctctcagctccgtaaaggtgggaggggtcgcaacagctgcagcagccgtgacggctgcgggggccgttaagagtggacagagcgacagtgaccaaggagggctgggggctgaagcatgtcccgaaaacaagaagagggttcaccgctgtcagtttaacgggtgccggaaagtttatacaaaaagctcccacttaaaggcccaccagaggactcacacaggtgagaagccttataagtgctcatgggagggatgtgagtggcgttttgcacgaagcgatgagctcacgaggcactacaggaaacacacaggtgcaaagcccttcaaatgcaaccactgcgacaggtgtttttccaggtctgaccatcttgccctccacatgaagagacatatctagtaatgaactagtccgtaacttgaaagtatttcgatttcttggctttatatatcttgtggaaaggacgaacgaatactggtgatacatcagca

SEQ ID NO: 1070 - DNA, 911 bp, Homo sapiens
  source 1..911: mol_type = genomic DNA
accgccaccatgacatgccttgaattggaacgctacctacagacggagccccggaggatctcagagacctttggtgaggacttggactgtttcctccacgcttcccctcccccgtgcattgaggaaagcttccgtcgcttagaccccctgctgctccccgtggaagcggccatctgtgagaagagctcggcagtggacatcttgctctctcgggacaagttgctatctgagacctgcctcagcctccagccggccagctcttctctagacagctacacagccgtcaaccaggcccagctcaacgcagtgacctcattaacgcccccatcgtcccctgagctcagccgccatctggtcaaaacctcacaaactctctctgccgtggatggcacggtgacgttgaaactggtggccaagaaggctgctctcagctccgtaaaggtgggaggggtcgcaacagctgcagcagccgtgacggctgcgggggccgttaagagtggacagagcgacagtgaccaaggagggctgggggctgaagcatgtcccgaaaacaagaagagggttcaccgctgtcagtttaacgggtgccggaaagtttatacaaaaagctcccacttaaaggcccaccagaggactcacacaggtgagaagccttataagtgctcatgggagggatgtgagtggcgttttgcacgaagcgatgagctcacgaggcactacaggaaacacacaggtgcaaagcccttcaaatgcaaccactgcgacaggtgtttttccaggtctgaccatcttgccctccacatgaagagacatatctagtaatgaactagtccgtaacttgaaagtatttcgatttcttggctttatatatcttgtggaaaggacgattgttggtattacaagttgacaag

SEQ ID NO: 1071 - DNA, 953 bp, Homo sapiens
  source 1..953: mol_type = genomic DNA
accgccaccatggacgtgctccccatgtgcagcatcttccaggagctccagatcgtgcacgagaccggctacttctcggcgctgccgtctctggaggagtactggcaacagacctgcctagagctggaacgttacctccagagcgagccctgctatgtttcagcctcagaaatcaaatttgacagccaggaagatctgtggaccaaaatcattctggctcgggagaaaaaggaggaatccgaactgaagatatcttccagtcctccagaggacactctcatcagcccgagcttttgttacaacttagagaccaacagcctgaactcagatgtcagcagcgaatcctctgacagctccgaggaactttctcccacggccaagtttacctccgaccccattggcgaagttttggtcagctcgggaaaattgagctcctctgtcacctccacgcctccatcttctccggaactgagcagggaaccttctcaactgtggggttgcgtgcccggggagctgccctcgccagggaaggtgcgcagcgggacttcggggaagccaggtgacaagggaaatggcgatgcctcccccgacggcaggaggagggtgcaccggtgccactttaacggctgcaggaaagtttacaccaaaagctcccacttgaaagcacaccagcggacgcacacaggagaaaagccttacagatgctcatgggaagggtgtgagtggcgttttgcaagaagtgatgagttaaccaggcacttccgaaagcacaccggggccaagccttttaaatgctcccactgtgacaggtgtttttccaggtctgaccacctggccctgcacatgaagaggcacctctagtaatgaactagtccgtaacttgaaagtatttcgatttcttggctttatatatcttgtggaaaggacgaattggtgtggtcggagggctttgc

SEQ ID NO: 1072 - DNA, 815 bp, Homo sapiens
  source 1..815: mol_type = genomic DNA
accgccaccatggacgtgctccccatgtgcagcatcttccaggagctccagatcgtgcacgagaccggctacttctcggcgctgccgtctctggaggagtactggcaacagacctgcctagagctggaacgttacctccagagcgagccctgctatgtttcagcctcagaaatcaaatttgacagccaggaagatctgtggaccaaaatcattctggctcgggagaaaaaggaggaatccgaactgaagatatcttccagtcctccagaggacactctcatcagcccgagcttttgttacaacttagagaccaacagcctgaactcagatgtcagcagcgaatcctctgacagctccgaggaactttctcccacggccaagtttacctccgaccccattggcgaagttttggtcagctcgggaaaattgagctcctctgtcacctccacgcctccatcttctccggaactgagcagggaaccttctcaactgtggggttgcgtgcccggggagctgccctcgccagggaaggtgcgcagcgggacttcggggaagccaggtgacaagggaaatggcgatgcctcccccgacggcaggaggagggtgcaccggtgccactttaacggctgcaggaaagtttacaccaaaagctcccacttgaaagcacaccagcggacgcacacaggtgtttttccaggtctgaccacctggccctgcacatagtaatgaactagtccgtaacttgaaagtatttcgatttcttggctttatatatcttgtggaaaggacgaagttgtggacaaactcggatgtga

SEQ ID NO: 1073 - DNA, 1475 bp, Homo sapiens
  source 1..1475: mol_type = genomic DNA
accgccaccatggctacaagggtgctgagcatgagcgcccgcctgggacccgtgccccagccgccggcgccgcaggacgagccggtgttcgcgcagctcaagccggtgctgggcgccgcgaatccggcccgcgacgcggcgctcttccccggcgaggagctgaagcacgcgcaccaccgcccgcaggcgcagcccgcgcccgcgcaggccccgcagccggcccagccgcccgccaccggcccgcggctgcctccagaggacctggtccagacaagatgtgaaatggagaagtatctgacacctcagcttcctccagttcctataattccagagcataaaaagtatagacgagacagtgcctcagtcgtagaccagttcttcactgacactgaagggttaccttacagtatcaacatgaacgtcttcctccctgacatcactcacctgagaactggcctctacaaatcccagagaccgtgcgtaacacacatcaagacagaacctgttgccattttcagccaccagagtgaaacgactgcccctcctccggccccgacccaggccctccctgagttcaccagtatattcagctcacaccagaccgcagctccagaggtgaacaatattttcatcaaacaagaacttcctacaccagatcttcatctttctgtccctacccagcagggccacctgtaccagctactgaatacaccggatctagatatgcccagttctacaaatcagacagcagcaatggacactcttaatgtttctatgtcagctgccatggcaggccttaacacacacacctctgctgttccgcagactgcagtgaaacaattccagggcatgcccccttgcacatacacaatgccaagtcagtttcttccacaacaggccacttactttcccccgtcaccaccaagctcagagcctggaagtccagatagacaagcagagatgctccagaatttaaccccacctccatcctatgctgctacaattgcttctaaactggcaattcacaatccaaatttacccaccaccctgccagttaactcacaaaacatccaacctgtcagatacaatagaaggagtaaccccgatttggagaaacgacgcatccactactgcgattaccctggttgcacaaaagtttataccaagtcttctcatttaaaagctcacctgaggactcacactggtgaaaagccatacaagtgtacctgggaaggctgcgactggaggttcgcgcgatcggatgagctgacccgccactaccggaagcacacaggcgccaagcccttccagtgcggggtgtgcaaccgcagcttctcgcgctctgaccacctggccctgcatatgaagaggcaccagaactagtaatgaactagtccgtaacttgaaagtatttcgatttcttggctttatatatcttgtggaaaggacgagggttatccgctcgtcggaagtta

SEQ ID NO: 1074 - DNA, 1202 bp, Homo sapiens
  source 1..1202: mol_type = genomic DNA
accgccaccatggagaagtatctgacacctcagcttcctccagttcctataattccagagcataaaaagtatagacgagacagtgcctcagtcgtagaccagttcttcactgacactgaagggttaccttacagtatcaacatgaacgtcttcctccctgacatcactcacctgagaactggcctctacaaatcccagagaccgtgcgtaacacacatcaagacagaacctgttgccattttcagccaccagagtgaaacgactgcccctcctccggccccgacccaggccctccctgagttcaccagtatattcagctcacaccagaccgcagctccagaggtgaacaatattttcatcaaacaagaacttcctacaccagatcttcatctttctgtccctacccagcagggccacctgtaccagctactgaatacaccggatctagatatgcccagttctacaaatcagacagcagcaatggacactcttaatgtttctatgtcagctgccatggcaggccttaacacacacacctctgctgttccgcagactgcagtgaaacaattccagggcatgcccccttgcacatacacaatgccaagtcagtttcttccacaacaggccacttactttcccccgtcaccaccaagctcagagcctggaagtccagatagacaagcagagatgctccagaatttaaccccacctccatcctatgctgctacaattgcttctaaactggcaattcacaatccaaatttacccaccaccctgccagttaactcacaaaacatccaacctgtcagatacaatagaaggagtaaccccgatttggagaaacgacgcatccactactgcgattaccctggttgcacaaaagtttataccaagtcttctcatttaaaagctcacctgaggactcacactggtgaaaagccatacaagtgtacctgggaaggctgcgactggaggttcgcgcgatcggatgagctgacccgccactaccggaagcacacaggcgccaagcccttccagtgcggggtgtgcaaccgcagcttctcgcgctctgaccacctggccctgcatatgaagaggcaccagaactagtaatgaactagtccgtaacttgaaagtatttcgatttcttggctttatatatcttgtggaaaggacgaagggacaaactgatattccggaaa

SEQ ID NO: 1075 - DNA, 1541 bp, Homo sapiens
  source 1..1541: mol_type = genomic DNA
accgccaccatgaggcagccacctggcgagtctgacatggctgtcagcgacgcgctgctcccatctttctccacgttcgcgtctggcccggcgggaagggagaagacactgcgtcaagcaggtgccccgaataaccgctggcgggaggagctctcccacatgaagcgacttcccccagtgcttcccggccgcccctatgacctggcggcggcgaccgtggccacagacctggagagcggcggagccggtgcggcttgcggcggtagcaacctggcgcccctacctcggagagagaccgaggagttcaacgatctcctggacctggactttattctctccaattcgctgacccatcctccggagtcagtggccgccaccgtgtcctcgtcagcgtcagcctcctcttcgtcgtcgccgtcgagcagcggccctgccagcgcgccctccacctgcagcttcacctatccgatccgggccgggaacgacccgggcgtggcgccgggcggcacgggcggaggcctcctctatggcagggagtccgctccccctccgacggctcccttcaacctggcggacatcaacgacgtgagcccctcgggcggcttcgtggccgagctcctgcggccagaattggacccggtgtacattccgccgcagcagccgcagccgccaggtggcgggctgatgggcaagttcgtgctgaaggcgtcgctgagcgcccctggcagcgagtacggcagcccgtcggtcatcagcgtcagcaaaggcagccctgacggcagccacccggtggtggtggcgccctacaacggcgggccgccgcgcacgtgccccaagatcaagcaggaggcggtctcttcgtgcacccacttgggcgctggaccccctctcagcaatggccaccggccggctgcacacgacttccccctggggcggcagctccccagcaggactaccccgaccctgggtcttgaggaagtgctgagcagcagggactgtcaccctgccctgccgcttcctcccggcttccatccccacccggggcccaattacccatccttcctgcccgatcagatgcagccgcaagtcccgccgctccattaccaagagctcatgccacccggttcctgcatgccagaggagcccaagccaaagaggggaagacgatcgtggccccggaaaaggaccgccacccacacttgtgattacgcgggctgcggcaaaacctacacaaagagttcccatctcaaggcacacctgcgaacccacacaggtgagaaaccttaccactgtgactgggacggctgtggatggaaattcgcccgctcagatgaactgaccaggcactaccgtaaacacacggggcaccgcccgttccagtgccaaaaatgcgaccgagcattttccaggtcggaccacctcgccttacacatgaagaggcatttttagtaatgaactagtccgtaacttgaaagtatttcgatttcttggctttatatatcttgtggaaaggacgaccattccgcgtgaagtgaactcgg

SEQ ID NO: 1076 - DNA, 2237 bp, Homo sapiens
  source 1..2237: mol_type = genomic DNA
accgccaccatggaaagcggtgcagttctgctggaatccaaatcctccccatttaacctactgcatgagatgcatgagcttcgcctcctgggtcacctgtgtgacgtgacagtcagcgtggagtatcagggtgtccgcaaagacttcatggcccacaaggcagtgctggctgccaccagcaagttttttaaggaagtgttccttaatgagaagagtgtggatggtactaggactaatgtctacttaaatgaagtgcaggttgctgactttgcttcatttcttgagtttgtctacactgcaaaggtacaggtggaagaagatcgggtgcagcgaatgctggaagtggctgaaaagctgaaatgtttggatttatcagaaacttgttttcaattaaagaaacagatgttagagtcagtacttttggagttgcaaaatttctcagagtctcaggaggtggaggtgagcagtggctcccaagttagtgctgctcctgcccccagggcaagtgtggccaccgatggccctcaccccagtggtctcacggattccttggactacccaggagagagagccagcaatggcatgtcttcagatttgccaccgaagaagtccaaggacaaactagacaagaagaaagaggtagttaaacctccctaccctaaaatcaggagagctagtggaaggctggctgggaggaaggtctttgtggagatccctaaaaagaaatatacgagaagactccgagagcagcagaaaactgctgagggtgatgtgggggactacaggtgtccccaggaccaaagcccggacagggtgggcacggagatggagcaggtttccaaaaatgagggttgccaggcaggtgctgagttggaggaattgtcaaagaaagcagggccggaggaggaagaggaggaggaggaggaggacgaagaaggggagaagaagaagagcaactttaagtgcagcatttgcgagaaggcgtttctgtatgagaagagcttcctgaagcacagcaagcaccgccacggcgtggccaccgaggtggtgtaccgctgcgacacctgcggccagaccttcgccaaccgctgcaacctgaagagccaccagcgccacgtgcacagcagcgagcgccatttcccatgcgagctgtgcgggaagaagttcaagcgcaagaaggacgtgaagcggcacgtgctgcaggtgcatgagggcggcggcgagcggcaccgctgcggccagtgcggcaagggcctgagttccaagacagcgctgcggctgcacgagcgcacacacacgggagaccggccctacggctgcaccgagtgcggcgccaggttctcgcagccgtccgcgctcaagacgcacatgagaattcatacaggggaaaaaccttttgtctgtgatgaatgtggtgcaagattcactcagaaccacatgctgatttatcataaaaggtgtcacacaggtgaaagaccttttatgtgtgaaacatgtggcaagagttttgcttctaaggagtacttaaaacaccacaatagaatccatactggatccaaaccctttaaatgtgaagtatgtttcaggacttttgcccagcggaattcactgtaccagcatattaaagtccacacaggggagcgtccctactgctgtgaccagtgcggcaagcagttcacccagctcaacgccctccagcgccaccgccgcatccacacaggggagaggccattcatgtgcaatgcgtgcggacggacattcaccgacaagtccactcttcggcggcacacctcaatacacgataagaatactccatggaagtctttccttgtcattgtagatggctcgcccaagaacgatgacggacacaagactgaacagcctgacgaagagtatgtgtcatccaagctttcggataaattgctgtcttttgcagaaaatggccatttccacaacctggctgcagtccaagacactgtacctaccatgcaggagaacagttctgctgacacagcctgcaaggcagatgactccgtggtgtcccaggacaccctcctggccaccaccatcagtgagcttagcgagctgaccccacagacagactcgatgcccacacagcttcactctttgagcaacatggaatagtaatgaactagtccgtaacttgaaagtatttcgatttcttggctttatatatcttgtggaaaggacgacaccaccttcacagatctctacgt

SEQ ID NO: 1077 - DNA, 1169 bp, Homo sapiens
  source 1..1169: mol_type = genomic DNA
accgccaccatggcgctgagtgaacccatcctgccgtccttctccactttcgccagcccgtgccgcgagcgcggcctgcaggagcgctggccgcgcgccgaacccgagtccggcggcaccgacgacgacctcaacagcgtgctggacttcatcctgtccatggggctggatggcctgggcgccgaggccgccccggagccgccgccgccgcccccgccgcctgcgttctattaccccgaacccggcgcgcccccgccctacagcgcccccgcgggtggcctggtgtctgagctgctgcgacccgagctggatgcgccgctggggcccgcactgcacggccgctttctgctggcgccgcccggccgcctggtcaaggccgagccccctgaagcggacggcggcggcggctacggctgcgcccccgggctgacccgtggaccgcgcggcctcaagcgcgagggcgccccgggcccggcggcttcgtgcatgcgaggtcccgggggccgccccccgccgccgcccgacacaccgccgctcagccccgacggccccgcgcgcctgcccgcgcccggtccgcgcgcctccttcccgccgcctttcggtggccctggtttcggcgcgcccgggcccggcctgcattacgcgccgcctgcgcccccagccttcggtctcttcgacgacgcggccgccgccgcggcagccctgggcctggcgccccccgccgcccgcggtctcctcacgccgcctgcgtccccgctggagctgctggaggccaagccaaagcgcggccgccgctcttggccccgcaaacgcaccgccactcacacctgcagctacgcgggctgcggcaagacctacaccaagagttcgcatctgaaggcgcatctgcgcacgcacacaggtgagaagccctaccactgcaactgggacggctgcggctggaagtttgcgcgctcagacgagctcacgcgccactaccgaaagcacacgggccaccggccattccagtgccatctgtgcgatcgtgccttctcgcgctccgatcacctggcgctgcacatgaaacggcacatgtagtaatgaactagtccgtaacttgaaagtatttcgatttcttggctttatatatcttgtggaaaggacgaggactttcaactttacagatcgtg

SEQ ID NO: 1078 - DNA, 1190 bp, Homo sapiens
  source 1..1190: mol_type = genomic DNA
accgccaccatggccacagccgagaccgccttgccctccatcagcacactgaccgccctgggccccttcccggacacacaggatgacttcctcaagtggtggcgctccgaagaggcgcaggacatgggcccgggtcctcctgaccccacggagccgcccctccacgtgaagtctgaggaccagcccggggaggaagaggacgatgagaggggcgcggacgccacctgggacctggatctcctcctcaccaacttctcgggcccggagcccggtggcgcgccccagacctgcgctctggcgcccagcgaggcctccggggcgcaatatccgccgccgcccgagactctgggcgcatatgctggcggcccggggctggtggctgggcttttgggttcggaggatcactcgggttgggtgcgccctgccctgcgagcccgggctcccgacgccttcgtgggcccagccctggctccagccccggcccccgagcccaaggcgctggcgctgcaaccggtgtacccggggcccggcgccggctcctcgggtggctacttcccgcggaccgggctttcagtgcctgcggcgtcgggcgccccctacgggctactgtccgggtaccccgcgatgtacccggcgcctcagtaccaagggcacttccagctcttccgcgggctccagggacccgcgcccggtcccgccacgtccccctccttcctgagttgtttgggacccgggacggtgggcactggactcggggggactgcagaggatccaggtgtgatagccgagaccgcgccatccaagcgaggccgacgttcgtgggcgcgcaagaggcaggcagcgcacacgtgcgcgcacccgggttgcggcaagagctacaccaagagctcccacctgaaggcgcatctgcgcacgcacacaggggagaagccatacgcctgcacgtgggaaggctgcggctggagattcgcgcgctcggacgagctgacccgccactaccggaaacacacggggcagcgccccttccgctgccagctctgcccacgtgctttttcgcgctctgaccacctggccttgcacatgaagcgccacctttagtaatgaactagtccgtaacttgaaagtatttcgatttcttggctttatatatcttgtggaaaggacgatccagaatagttgactaagctcat

SEQ ID NO: 1079 - DNA, 836 bp, Homo sapiens
  source 1..836: mol_type = genomic DNA
accgccaccatgtccgcggccgcctacatggacttcgtggctgcccagtgtctggtttccatttcgaaccgcgctgcggtgccggagcatggggtcgctccggacgccgagcggctgcgactacctgagcgcgaggtgaccaaggagcacggtgacccgggggacacctggaaggattactgcacactggtcaccatcgccaagagcttgttggacctgaacaagtaccgacccatccagaccccctccgtgtgcagcgacagtctggaaagtccagatgaggatatgggatccgacagcgacgtgaccaccgaatctgggtcgagtccttcccacagcccggaggagagacaggatcctggcagcgcgcccagcccgctctccctcctccatcctggagtggctgcgaaggggaaacacgcctccgaaaagaggcacaagtgcccctacagtggctgtgggaaagtctatggaaaatcctcccatctcaaagcccattacagagtgcatacaggtgaacggccctttccctgcacgtggccagactgccttaaaaagttctcccgctcagacgagctgacccgccactaccggacccacactggggaaaagcagttccgctgtccgctgtgtgagaagcgcttcatgaggagtgaccacctcacaaagcacgcccggcggcacaccgagttccaccccagcatgatcaagcgatcgaaaaaggcgctggccaacgctttgtagtaatgaactagtccgtaacttgaaagtatttcgatttcttggctttatatatcttgtggaaaggacgaaagatatagccaatgtacacaaca

SEQ ID NO: 1080 - DNA, 788 bp, Homo sapiens
  source 1..788: mol_type = genomic DNA
accgccaccatggtcgatatggataaactcataaacaacttggaggtccaacttaattcagaaggtggctcaatgcaggtattcaagcaggtcactgcttctgttcggaacagagatccccctgagatagaatacagaagtaatatgacttctccaacactcctggatgccaaccccatggagaacccagcactgtttaatgacatcaagattgagcccccagaagaacttttggctagtgatttcagcctgccccaagtggaaccagttgacctctcctttcacaagcccaaggctcctctccagcctgctagcatgctacaagctccaatacgtccccccaagccacagtcttctccccagacccttgtggtgtccacgtcaacatctgacatgagcacttcagcaaacattcctactgttctgaccccaggctctgtcctgacctcctctcagagcactggtagccagcagatcttacatgtcattcacactatcccctcagtcagtctgccaaataagatgggtggcctgaagaccatcccagtggtagtgcagtctctgcccatggtgtatactactttgcctgcagatgggggccctgcagccattacagtcccactcattggaggagatggtaaaaatgctggatcaggagcacaaaggccaaggtggatgttctcacatctggactagtaatgaactagtccgtaacttgaaagtatttcgatttcttggctttatatatcttgtggaaaggacgaatgcgtcggttaatctattctcat

SEQ ID NO: 1081 - DNA, 1181 bp, Homo sapiens
  source 1..1181: mol_type = genomic DNA
accgccaccatggtcgatatggataaactcataaacaacttggaggtccaacttaattcagaaggtggctcaatgcaggtattcaagcaggtcactgcttctgttcggaacagagatccccctgagatagaatacagaagtaatatgacttctccaacactcctggatgccaaccccatggagaacccagcactgtttaatgacatcaagattgagcccccagaagaacttttggctagtgatttcagcctgccccaagtggaaccagttgacctctcctttcacaagcccaaggctcctctccagcctgctagcatgctacaagctccaatacgtccccccaagccacagtcttctccccagacccttgtggtgtccacgtcaacatctgacatgagcacttcagcaaacattcctactgttctgaccccaggctctgtcctgacctcctctcagagcactggtagccagcagatcttacatgtcattcacactatcccctcagtcagtctgccaaataagatgggtggcctgaagaccatcccagtggtagtgcagtctctgcccatggtgtatactactttgcctgcagatgggggccctgcagccattacagtcccactcattggaggagatggtaaaaatgctggatcagtgaaagttgaccccacctccatgtctccactggaaattccaagtgacagtgaggagagtacaattgagagtggatcctcagccttgcagagtctgcagggactacagcaagaaccagcagcaatggcccaaatgcagggagaagagtcgcttgacttgaagagaagacggattcaccaatgtgactttgcaggatgcagcaaagtgtacaccaaaagctctcacctgaaagctcaccgcagaatccatacaggagagaagccttataaatgcacctgggatggctgctcctggaaatttgctcgctcagatgagctcactcgccatttccgcaagcacacaggcatcaagccttttcggtgcacagactgcaaccgcagcttttctcgttctgaccacctgtccctgcatcgccgtcgccatgacaccatgtagtaatgaactagtccgtaacttgaaagtatttcgatttcttggctttatatatcttgtggaaaggacgacgcgggttaattccctccgttccc

SEQ ID NO: 1082 - DNA, 860 bp, Homo sapiens
  source 1..860: mol_type = genomic DNA
accgccaccatgagcctcccggaggacggcatgagttctggacacttcaggagtcctcagctagtgacatggtcggtcactgcttctgttcggaacagagatccccctgagatagaatacagaagtaatatgacttctccaacactcctggatgccaaccccatggagaacccagcactgtttaatgacatcaagattgagcccccagaagaacttttggctagtgatttcagcctgccccaagtggaaccagttgacctctcctttcacaagcccaaggctcctctccagcctgctagcatgctacaagctccaatacgtccccccaagccacagtcttctccccagacccttgtggtgtccacgtcaacatctgacatgagcacttcagcaaacattcctactgttctgaccccaggctctgtcctgacctcctctcagagcactggtagccagcagatcttacatgtcattcacactatcccctcagtcagtctgccaaataagatgggtggcctgaagaccatcccagtggtagtgcagtctctgcccatggtgtatactactttgcctgcagatgggggccctgcagccattacagtcccactcattggaggagatggtaaaaatgctggatcagtgaaagttgaccccacctccatgtctccactggaaattccaagtgacagtgaggagagtacaattgagagtggatcctcagccttgcagagtctgcagggactacagcaagagagagaagccttatagtaatgaactagtccgtaacttgaaagtatttcgatttcttggctttatatatcttgtggaaaggacgactcaaggactaaccgagacgttgc

SEQ ID NO: 1083 - DNA, 875 bp, Homo sapiens
  source 1..875: mol_type = genomic DNA
accgccaccatggtcgatatggataaactcataaacaacttggaggtccaacttaattcagaaggtggctcaatgcaggtattcaagcaggtcactgcttctgttcggaacagagatccccctgagatagaatacagaagtaatatgacttctccaacactcctggatgccaaccccatggagaacccagcactgtttaatgacatcaagattgagcccccagaagaacttttggctagtgatttcagcctgccccaagtggaaccagttgacctctcctttcacaagcccaaggctcctctccagcctgctagcatgctacaagctccaatacgtccccccaagccacagtcttctccccagacccttgtggtgtccacgtcaacatctgacatgagcacttcagcaaacattcctactgttctgaccccaggctctgtcctgacctcctctcagagcactggtagccagcagatcttacatgtcattcacactatcccctcagtcagtctgccaaataagatgggtggcctgaagaccatcccagtggtagtgcagtctctgcccatggtgtatactactttgcctgcagatgggggccctgcagccattacagtcccactcattggaggagatggtaaaaatgctggatcagtgaaagttgaccccacctccatgtctccactggaaattccaagtgacagtgaggagagtacaattgagagtggatcctcagccttgcagagtctgcagggactacagcaagagagagaagccttatagtaatgaactagtccgtaacttgaaagtatttcgatttcttggctttatatatcttgtggaaaggacgaagagacggagctgaatagacgcaa

SEQ ID NO: 1084 - DNA, 2081 bp, Homo sapiens
  source 1..2081: mol_type = genomic DNA
accgccaccatggcagcggcggtgctgatggaccgggttcagagttgtgtgaccttcgaggatgtgttcgtgtacttctctcgggaggagtgggaactccttgaggaggcacagagattcctgtaccgtgatgtgatgctggagaactttgcacttgtggctacactaggtttttggtgtgaagcagaacatgaggcaccttctgagcagagcgtttctgtagaaggagtgtcacaggtcaggactgctgagtcaggtcttttccagaaagcacacccatgtgagatgtgtgacccactcttgaaagacattttgcacctggctgaacaccagggatcacaccttacacagaaactgtgcacacgtgggctgtgtaggagaagattctcgttcagtgcaaacttttaccagcaccagaagcaacataatggagagaattgcttcagaggggatgatggaggggcctcatttgtgaagagctgtacagtccacatgttagggagatcctttacgtgcagggaggaagggatggacttaccagatagctctggccttttccagcaccagaccacttacaatagggtgagtccatgcagaaggactgaatgcatggagtctttcccacacagctccagtctcaggcaacaccaaggagactatgatggacagatgcttttcagttgcggtgatgaagggaaagccttcctggacacctttactcttcttgacagccagatgactcatgctgaggtgagacccttcagatgcctaccatgtggaaatgtgttcaaggagaaatcagctcttattaatcacagaaaaatccacagtggagaaatatctcatgtgtgtaaggagtgtggaaaagccttcattcacttgcaccacctaaaaatgcaccagaaatttcacactggaaaaagacactatacatgcagtgaatgtgggaaggccttcagccgcaaggacacacttgttcagcatcagagagttcacactggagaaagatcttatgactgcagtgaatgtggaaaagcctacagcagaagctcccaccttgttcagcaccagagaattcacacaggagaaaggccttataagtgcaacaaatgtgggaaagcctttagccgtaaagacacacttgttcagcaccagagatttcatactggagaaaggccttatgagtgcagtgaatgtggaaaattctttagccaaagctcccaccttattgagcactggagaattcataccggggcaaggccctatgaatgcatagaatgtggaaaattctttagccataactctagcctcattaaacatcggagagtccacacaggagcaagatcctacgtgtgcagcaaatgtgggaaggcctttggctgcaaagacacacttgttcagcaccagataattcacactggagcaaggccttatgagtgcagtgaatgtgggaaggccttcagccgtaaagacacacttgtgcaacaccaaaaaatccacactggagaaaggccttatgagtgtggtgaatgtggtaaattcttcagccatagctccaaccttattgtacaccagagaattcacactggagcaaagccttatgagtgcaatgaatgtgggaaatgctttagccacaactccagcctcattttgcaccagagagttcacacaggagcaaggccttatgtgtgcagtgaatgtgggaaggcttacattagtagctcccaccttgttcaacacaagaaagttcacactggagcaagaccttatgagtgcagtgaatgtgggaaattctttagccgcaactctggcctcattctgcaccagagggttcacactggagaaaagccttacgtatgcagcgaatgtgggaaagcctatagcagaagctcccatcttgttcgtcaccagaaagctcacactggagaaagagctcacgagtgcaacagttttggtggccctttagctgcatctcttaaacttgtttagtaatgaactagtccgtaacttgaaagtatttcgatttcttggctttatatatcttgtggaaaggacgagcatttgaaactcctcagatggtg

SEQ ID NO: 1085 - DNA, 2222 bp, Homo sapiens
  source 1..2222: mol_type = genomic DNA
accgccaccatggcagcggcggtgctgatggaccgggttcagagttgtgtgaccttcgaggatgtgttcgtgtacttctctcgggaggagtgggaactccttgaggaggcacagagattcctgtaccgtgatgtgatgctggagaactttgcacttgtggctacactagctttcattttcccagtcccatgcagttgcgcagttggagggggcagaaaaccttgggtgcctgacagggcagacatcactgcagccacagtaaaggagacctacagagggcatggccctgctgaatgggagctggaagagggtttttggtgtgaagcagaacatgaggcaccttctgagcagagcgtttctgtagaaggagtgtcacaggtcaggactgctgagtcaggtcttttccagaaagcacacccatgtgagatgtgtgacccactcttgaaagacattttgcacctggctgaacaccagggatcacaccttacacagaaactgtgcacacgtgggctgtgtaggagaagattctcgttcagtgcaaacttttaccagcaccagaagcaacataatggagagaattgcttcagaggggatgatggaggggcctcatttgtgaagagctgtacagtccacatgttagggagatcctttacgtgcagggaggaagggatggacttaccagatagctctggccttttccagcaccagaccacttacaatagggtgagtccatgcagaaggactgaatgcatggagtctttcccacacagctccagtctcaggcaacaccaaggagactatgatggacagatgcttttcagttgcggtgatgaagggaaagccttcctggacacctttactcttcttgacagccagatgactcatgctgaggtgagacccttcagatgcctaccatgtggaaatgtgttcaaggagaaatcagctcttattaatcacagaaaaatccacagtggagaaatatctcatgtgtgtaaggagtgtggaaaagccttcattcacttgcaccacctaaaaatgcaccagaaatttcacactggaaaaagacactatacatgcagtgaatgtgggaaggccttcagccgcaaggacacacttgttcagcatcagagagttcacactggagaaagatcttatgactgcagtgaatgtggaaaagcctacagcagaagctcccaccttgttcagcaccagagaattcacacaggagaaaggccttataagtgcaacaaatgtgggaaagcctttagccgtaaagacacacttgttcagcaccagagatttcatactggagaaaggccttatgagtgcagtgaatgtggaaaattctttagccaaagctcccaccttattgagcactggagaattcataccggggcaaggccctatgaatgcatagaatgtggaaaattctttagccataactctagcctcattaaacatcggagagtccacacaggagcaagatcctacgtgtgcagcaaatgtgggaaggcctttggctgcaaagacacacttgttcagcaccagataattcacactggagcaaggccttatgagtgcagtgaatgtgggaaggccttcagccgtaaagacacacttgtgcaacaccaaaaaatccacactggagaaaggccttatgagtgtggtgaatgtggtaaattcttcagccatagctccaaccttattgtacaccagagaattcacactggagcaaagccttatgagtgcaatgaatgtgggaaatgctttagccacaactccagcctcattttgcaccagagagttcacacaggagcaaggccttatgtgtgcagtgaatgtgggaaggcttacattagtagctcccaccttgttcaacacaagaaagttcacactggagcaagaccttatgagtgcagtgaatgtgggaaattctttagccgcaactctggcctcattctgcaccagagggttcacactggagaaaagccttacgtatgcagcgaatgtgggaaagcctatagcagaagctcccatcttgttcgtcaccagaaagctcacactggagaaagagctcacgagtgcaacagttttggtggccctttagctgcatctcttaaacttgtttagtaatgaactagtccgtaacttgaaagtatttcgatttcttggctttatatatcttgtggaaaggacgaggctcgagcccttctgagcgaagt

SEQ ID NO: 1086 - DNA, 1955 bp, Homo sapiens
  source 1..1955: mol_type = genomic DNA
accgccaccatgctggagaactttgcacttgtggctacactaggtttttggtgtgaagcagaacatgaggcaccttctgagcagagcgtttctgtagaaggagtgtcacaggtcaggactgctgagtcaggtcttttccagaaagcacacccatgtgagatgtgtgacccactcttgaaagacattttgcacctggctgaacaccagggatcacaccttacacagaaactgtgcacacgtgggctgtgtaggagaagattctcgttcagtgcaaacttttaccagcaccagaagcaacataatggagagaattgcttcagaggggatgatggaggggcctcatttgtgaagagctgtacagtccacatgttagggagatcctttacgtgcagggaggaagggatggacttaccagatagctctggccttttccagcaccagaccacttacaatagggtgagtccatgcagaaggactgaatgcatggagtctttcccacacagctccagtctcaggcaacaccaaggagactatgatggacagatgcttttcagttgcggtgatgaagggaaagccttcctggacacctttactcttcttgacagccagatgactcatgctgaggtgagacccttcagatgcctaccatgtggaaatgtgttcaaggagaaatcagctcttattaatcacagaaaaatccacagtggagaaatatctcatgtgtgtaaggagtgtggaaaagccttcattcacttgcaccacctaaaaatgcaccagaaatttcacactggaaaaagacactatacatgcagtgaatgtgggaaggccttcagccgcaaggacacacttgttcagcatcagagagttcacactggagaaagatcttatgactgcagtgaatgtggaaaagcctacagcagaagctcccaccttgttcagcaccagagaattcacacaggagaaaggccttataagtgcaacaaatgtgggaaagcctttagccgtaaagacacacttgttcagcaccagagatttcatactggagaaaggccttatgagtgcagtgaatgtggaaaattctttagccaaagctcccaccttattgagcactggagaattcataccggggcaaggccctatgaatgcatagaatgtggaaaattctttagccataactctagcctcattaaacatcggagagtccacacaggagcaagatcctacgtgtgcagcaaatgtgggaaggcctttggctgcaaagacacacttgttcagcaccagataattcacactggagcaaggccttatgagtgcagtgaatgtgggaaggccttcagccgtaaagacacacttgtgcaacaccaaaaaatccacactggagaaaggccttatgagtgtggtgaatgtggtaaattcttcagccatagctccaaccttattgtacaccagagaattcacactggagcaaagccttatgagtgcaatgaatgtgggaaatgctttagccacaactccagcctcattttgcaccagagagttcacacaggagcaaggccttatgtgtgcagtgaatgtgggaaggcttacattagtagctcccaccttgttcaacacaagaaagttcacactggagcaagaccttatgagtgcagtgaatgtgggaaattctttagccgcaactctggcctcattctgcaccagagggttcacactggagaaaagccttacgtatgcagcgaatgtgggaaagcctatagcagaagctcccatcttgttcgtcaccagaaagctcacactggagaaagagctcacgagtgcaacagttttggtggccctttagctgcatctcttaaacttgtttagtaatgaactagtccgtaacttgaaagtatttcgatttcttggctttatatatcttgtggaaaggacgacgcaatctggtgtgtatgatcgta

SEQ ID NO: 1087 - DNA, 500 bp, Homo sapiens
  source 1..500: mol_type = genomic DNA
accgccaccatgtctcaggtgacatttagtgatgtggctatagacttctctcatgaagagtgggcatgcctagattctgctcagagggacttatacaaggatgtgatggtccagaattatgagaacctggtctctgtagcaggtctttccgtaactaagccatatgtgatcatgttattggaggatggaaaagagccctggatgatggagaaaaaactgtcaaaagcttacccatttcctttatcacactctgttcctgcttctgtgaactttggattctctgctctatttgagcattgttcagaagtcactgaaatatttgagttgtcagaactatgtgttttctgggtgcttcatttcttatccaattctcctaattccactgtagaagcttttttcaagaagtagtaatgaactagtccgtaacttgaaagtatttcgatttcttggctttatatatcttgtggaaaggacgaacggcatgcagaattctatacatg

SEQ ID NO: 1088 - DNA, 497 bp, Homo sapiens
  source 1..497: mol_type = genomic DNA
accgccaccatgtctcaggtgacatttagtgatgtggctatagacttctctcatgaagagtgggcatgcctagattctgctcagagggacttatacaaggatgtgatggtccagaattatgagaacctggtctctgtaggtctttccgtaactaagccatatgtgatcatgttattggaggatggaaaagagccctggatgatggagaaaaaactgtcaaaagcttacccatttcctttatcacactctgttcctgcttctgtgaactttggattctctgctctatttgagcattgttcagaagtcactgaaatatttgagttgtcagaactatgtgttttctgggtgcttcatttcttatccaattctcctaattccactgtagaagcttttttcaagaagtagtaatgaactagtccgtaacttgaaagtatttcgatttcttggctttatatatcttgtggaaaggacgatgagtgctgtgtgaacggctaatg

SEQ ID NO: 1089 - DNA, 1304 bp, Homo sapiens
  source 1..1304: mol_type = genomic DNA
accgccaccatgtctcaggtgacatttagtgatgtggctatagacttctctcatgaagagtgggcatgcctagattctgctcagagggacttatacaaggatgtgatggtccagaattatgagaacctggtctctgtagcaggtctttccgtaactaagccatatgtgatcatgttattggaggatggaaaagagccctggatgatggagaaaaaactgtcaaaagattgggaatcaagatgggaaaacaaggaattatcaacaaagaaggatatttatgatgaagattcaccccaaccagtaacaatggaaaaagttgtaaaacaaagttatgaattttcaaattctaataagaatttggaatatacagaatgcgacacatttagaagcacctttcattcaaagtctactctttctgaaccacaaaacaattctgctgaagggaattcacacaaatatgatatattaaagaagaatttatcaaaaaagtcagttataaaaagtgagagaataaatggtggaaagaaacttttaaattctaataaaagtggggcagccttcaaccagagcaaatctcttacccttccccagacttgtaatagagagaaaatctatacatgcagtgaatgtgggaaagcctttggcaaacagtcaatcctcagtcgccactggagaattcatacaggagagaagccctatgaatgtcgtgaatgtgggaagacttttagccatggttcatcccttacacgacatcagataagccatagtggagagaaaccttacaaatgcattgaatgtgggaaggcctttagccatggctcatcacttactaaccatcagagcactcacacgggagagaaaccgtatgaatgtatgaactgtggaaagtcttttagtcgtgtgtcccttctcattcagcatctaagaattcatacgcaagaaaaacgctatgagtgtcgtatatgtggaaaggccttcattcatagttcgtctctcattcaccatcagaaaagccatactggagagaagccttatgaatgtagagaatgtgggaaagctttctgctgtagctcacaccttactcaacatcaaagaattcacagtatgaagaaaaaatatgaatgcaacaaatgtctcaaggtctttagtagcttctcatttcttgttcaacatcagagtattcatactgaagaaaaaccgtttgaagtttagtaatgaactagtccgtaacttgaaagtatttcgatttcttggctttatatatcttgtggaaaggacgagacaccttaagtgcgcgtgcgtca

SEQ ID NO: 1090 - DNA, 1433 bp, Homo sapiens
  source 1..1433: mol_type = genomic DNA
accgccaccatgtctcagcgtcagtacccagagtgttacctggcaccaaatggatgcttagtaagtaattgtggagtgaataagatgagtaatgaagaactggtggggcagaatcatggcatggaaggtgaagcttgcacaggaggggatgtgacatttagtgatgtggctatagacttctctcatgaagagtgggcatgcctagattctgctcagagggacttatacaaggatgtgatggtccagaattatgagaacctggtctctgtaggtctttccgtaactaagccatatgtgatcatgttattggaggatggaaaagagccctggatgatggagaaaaaactgtcaaaagattgggaatcaagatgggaaaacaaggaattatcaacaaagaaggatatttatgatgaagattcaccccaaccagtaacaatggaaaaagttgtaaaacaaagttatgaattttcaaattctaataagaatttggaatatacagaatgcgacacatttagaagcacctttcattcaaagtctactctttctgaaccacaaaacaattctgctgaagggaattcacacaaatatgatatattaaagaagaatttatcaaaaaagtcagttataaaaagtgagagaataaatggtggaaagaaacttttaaattctaataaaagtggggcagccttcaaccagagcaaatctcttacccttccccagacttgtaatagagagaaaatctatacatgcagtgaatgtgggaaagcctttggcaaacagtcaatcctcagtcgccactggagaattcatacaggagagaagccctatgaatgtcgtgaatgtgggaagacttttagccatggttcatcccttacacgacatcagataagccatagtggagagaaaccttacaaatgcattgaatgtgggaaggcctttagccatggctcatcacttactaaccatcagagcactcacacgggagagaaaccgtatgaatgtatgaactgtggaaagtcttttagtcgtgtgtcccttctcattcagcatctaagaattcatacgcaagaaaaacgctatgagtgtcgtatatgtggaaaggccttcattcatagttcgtctctcattcaccatcagaaaagccatactggagagaagccttatgaatgtagagaatgtgggaaagctttctgctgtagctcacaccttactcaacatcaaagaattcacagtatgaagaaaaaatatgaatgcaacaaatgtctcaaggtctttagtagcttctcatttcttgttcaacatcagagtattcatactgaagaaaaaccgtttgaagtttagtaatgaactagtccgtaacttgaaagtatttcgatttcttggctttatatatcttgtggaaaggacgaagactcctaattccacgactcaac

SEQ ID NO: 1091 - DNA, 3395 bp, Homo sapiens
  source 1..3395: mol_type = genomic DNA
accgccaccatggccacccaggtaatggggcagtcttctggaggaggagggctgtttaccagcagtggcaacattggaatggccctgcctaacgacatgtatgacttgcatgacctttccaaagctgaactggccgcacctcagcttattatgctggcaaatgtggccttaactggggaagtaaatggcagctgctgtgattacctggtcggtgaagaaagacagatggcagaactgatgccggttggggataacaacttttcagatagtgaagaaggagaaggacttgaagagtctgctgatataaaaggtgaacctcatggactggaaaacatggaactgagaagtttggaactcagcgtcgtagaacctcagcctgtatttgaggcatcaggtgctccagatatttacagttcaaataaagatcttccccctgaaacacctggagcggaggacaaaggcaagagctcgaagaccaaaccctttcgctgtaagccatgccaatatgaagcagaatctgaagaacagtttgtgcatcacatcagagttcacagtgctaagaaattttttgtggaagagagtgcagagaagcaggcaaaagccagggaatctggctcttccactgcagaagagggagatttctccaagggccccattcgctgtgaccgctgcggctacaatactaatcgatatgatcactatacagcacacctgaaacaccacaccagagctggggataatgagcgagtctacaagtgtatcatttgcacatacacaacagtgagcgagtatcactggaggaaacatttaagaaaccattttccaaggaaagtatacacatgtggaaaatgcaactatttttcagacagaaaaaacaattatgttcagcatgttagaactcatacaggagaacgcccatataaatgtgaactttgtccttactcaagttctcagaagactcatctaactagacatatgcgtactcattcaggtgagaagccatttaaatgtgatcagtgcagttatgtggcctctaatcaacatgaagtaacccgccatgcaagacaggttcacaatgggcctaaacctcttaattgcccacactgtgattacaaaacagcagatagaagcaacttcaaaaaacatgtagagctacatgtgaacccacggcagttcaattgccctgtatgtgactatgcagcttccaagaagtgtaatctacagtatcacttcaaatctaagcatcctacttgtcctaataaaacaatggatgtctcaaaagtgaaactaaagaaaaccaaaaaacgagaggctgacttgcctgataatattaccaatgaaaaaacagaaatagaacaaacaaaaataaaaggggatgtggctggaaagaaaaatgaaaagtccgtcaaagcagagaaaagagatgtctcaaaagagaaaaagccttctaataatgtgtcagtgatccaggtgactaccagaactcgaaaatcagtaacagaggtgaaagagatggatgtgcatacaggaagcaattcagaaaaattcagtaaaactaagaaaagcaaaaggaagctggaagttgacagccattctttacatggtcctgtgaatgatgaggaatcttcaacaaaaaagaaaaagaaggtagaaagcaaatccaaaaataatagtcaggaagtgccaaagggtgacagcaaagtggaggagaataaaaagcaaaatacttgcatgaaaaaaagtacaaagaagaaaactctgaaaaataaatcaagtaagaaaagcagtaagcctcctcagaaggaacctgttgagaagggatctgctcagatggaccctcctcagatggggcctgctcccacagaggcggttcagaaggggcccgttcaggtggagccgccacctcccatggagcatgctcagatggagggtgcccagatacggcctgctcctgacgagcctgttcagatggaggtggttcaggaggggcctgctcagaaggagctgctgcctcccgtggagcctgctcagatggtgggtgcccaaattgtacttgctcacatggagctgcctcctcccatggagactgctcagacggaggttgcccaaatggggcctgctcccatggaacctgctcagatggaggttgcccaggtagaatctgctcccatgcaggtggtccagaaggagcctgttcagatggagctgtctcctcccatggaggtggtccagaaggagcctgttcagatagagctgtctcctcccatggaggtggtccagaaggaacctgttaagatagagctgtctcctcccatagaggtggtccagaaggagcctgttcagatggagttgtctcctcccatgggggtggttcagaaggagcctgctcagagggagccacctcctcccagagagcctccccttcacatggagccaatttccaaaaagcctcctctccgaaaagataaaaaggaaaagtctaacatgcagagtgaaagggcacggaaggagcaagtccttattgaagttggcttagtgcctgttaaagatagctggcttctaaaggaaagtgtaagcacagaggatctctcaccaccatcaccaccactgccaaaggaaaatttaagagaagaggcatcaggagaccaaaaattactcaacacaggtgaaggaaataaagaagcccctcttcagaaagtaggagcagaagaggcagatgagagcctacctggtcttgctgctaatatcaacgaatctacccatatttcatcctctggacaaaacttgaatacgccagagggtgaaactttaaatggtaaacatcagactgacagtatagtttgtgaaatgaaaatggacactgatcagaacacaagagagaatctcactggtataaattcaacagttgaagaaccagtttcaccaatgcttcccccttcagcagtagaagaacgtgaagcagtgtccaaaactgcactggcatcacctcctgctacaatggcagcaaatgagtctcaggaaattgatgaagatgaaggcatccacagccatgaaggaagtgacctaagtgacaacatgtcagagggtagtgatgattctggattgcatggggctcggccagttccacaagaatctagcagaaaaaatgcaaaggaagccttggcagtcaaagcggctaagggagattttgtttgtatcttctgtgatcgttctttcagaaagggaaaagattacagcaaacacctcaatcgccatttggttaatgtgtactatcttgaagaagcagctcaagggcaggagtagtaatgaactagtccgtaacttgaaagtatttcgatttcttggctttatatatcttgtggaaaggacgaaaatgcagcattaggtagggcgga

SEQ ID NO: 1092 - DNA, 1808 bp, Homo sapiens
  source 1..1808: mol_type = genomic DNA
accgccaccatgctggagaactacagccacctggtctcaatggggtatccagtttccaaaccagatgtcatctccaagttggaacaaggagaagagccatggatcataaagggagacatatcaaattggatctatccagatgaatatcaggcagatgggagacaagacaggaagagtaaccttcacaactcccagtcatgtattttggggacagtttccttccatcataagatactgaaaggagtcacaagggatggttcattgtgctccattttaaaagtctgtcaaggtgatggtcagctgcagagatttctagagaatcaagacaaactcttcaggcaggtcacatttgttaacagcaaaacagtgactgaggcatcagggcataaatataatccactggggaaaatatttcaagagtgcatagaaacagatatatcaatacagagattccataaatatgatgcttttaaaaagaacttaaaaccaaatattgacctaccgagttgttataagagcaattcaagaaaaaaacctgatcagagttttggaggtggaaaatcatctagccagagtgagcccaattctaatcttgagaagattcacaatggagtaataccttttgatgataatcagtgtggaaacgtttttagaaatacacaatcccttattcaatatcagaatgtggaaactaaagagaaaagctgtgtatgtgttacatgtggaaaagcctttgctaagaagtcacaactcattgtacatcaaagaattcatactggaaagaaaccatatgattgtggtgcatgcggaaaagccttcagtgagaagtttcatcttgttgtacatcagagaactcatactggggagaaaccttatgattgttctgaatgtggaaaagccttctctcagaaatcgtcccttattatacatcagagagttcacactggggaaaaaccctatgaatgtagtgaatgcgggaaagccttctcccagaaatcacccctcattatacatcagagaatacatactggggaaaaaccctatgaatgtagagagtgtgggaaggccttttcccagaagtcacagctgattatacaccacagagctcatactggagagaagccgtatgagtgtaccgaatgtgggaaagccttctgtgagaagtcccacctcattatacataaaagaattcacactggtgagaaaccctacaaatgtgctcaatgtgaggaagccttcagcaggaagacagaactcattacacatcagttagttcatactggggaaaaaccttatgaatgtactgaatgtggaaagacattctcccgcaagtcacagctcatcatacatcagagaacacatactggagaaaaaccctataaatgtagtgaatgtggcaaagccttctgccagaagtcacatctcattggacatcagagaattcacacaggagaaaaaccttatatatgtactgaatgtgggaaagccttctctcagaagtcccaccttccgggacaccagcgaattcatacaggagagaaaccttacatatgtgctgaatgtggaaaggccttttctcagaagtcagaccttgttttacatcagaggattcatactggggaaagaccctatcaatgtgctatatgtgggaaggccttcatccagaagtcacaactaactgtacaccagagaattcacacagtggtaaaatcatagtaatgaactagtccgtaacttgaaagtatttcgatttcttggctttatatatcttgtggaaaggacgaattatgcccatgtgctcaggagct

SEQ ID NO: 1093 - DNA, 1964 bp, Homo sapiens
  source 1..1964: mol_type = genomic DNA
accgccaccatggtgcctgctgagacttcttcatctggccttttggaagagcaaaaaatgatgaagtcccaggggttagtatcattcaaggatgtggctgtggatttcacccaggaggagtggcagcaacttgacccttctcagaggaccctgtacagggatgtgatgctggagaactacagccacctggtctcaatggggtatccagtttccaaaccagatgtcatctccaagttggaacaaggagaagagccatggatcataaagggagacatatcaaattggatctatccagatgaatatcaggcagatgggagacaagacaggaagagtaaccttcacaactcccagtcatgtattttggggacagtttccttccatcataagatactgaaaggagtcacaagggatggttcattgtgctccattttaaaagtctgtcaaggtgatggtcagctgcagagatttctagagaatcaagacaaactcttcaggcaggtcacatttgttaacagcaaaacagtgactgaggcatcagggcataaatataatccactggggaaaatatttcaagagtgcatagaaacagatatatcaatacagagattccataaatatgatgcttttaaaaagaacttaaaaccaaatattgacctaccgagttgttataagagcaattcaagaaaaaaacctgatcagagttttggaggtggaaaatcatctagccagagtgagcccaattctaatcttgagaagattcacaatggagtaataccttttgatgataatcagtgtggaaacgtttttagaaatacacaatcccttattcaatatcagaatgtggaaactaaagagaaaagctgtgtatgtgttacatgtggaaaagcctttgctaagaagtcacaactcattgtacatcaaagaattcatactggaaagaaaccatatgattgtggtgcatgcggaaaagccttcagtgagaagtttcatcttgttgtacatcagagaactcatactggggagaaaccttatgattgttctgaatgtggaaaagccttctctcagaaatcgtcccttattatacatcagagagttcacactggggaaaaaccctatgaatgtagtgaatgcgggaaagccttctcccagaaatcacccctcattatacatcagagaatacatactggggaaaaaccctatgaatgtagagagtgtgggaaggccttttcccagaagtcacagctgattatacaccacagagctcatactggagagaagccgtatgagtgtaccgaatgtgggaaagccttctgtgagaagtcccacctcattatacataaaagaattcacactggtgagaaaccctacaaatgtgctcaatgtgaggaagccttcagcaggaagacagaactcattacacatcagttagttcatactggggaaaaaccttatgaatgtactgaatgtggaaagacattctcccgcaagtcacagctcatcatacatcagagaacacatactggagaaaaaccctataaatgtagtgaatgtggcaaagccttctgccagaagtcacatctcattggacatcagagaattcacacaggagaaaaaccttatatatgtactgaatgtgggaaagccttctctcagaagtcccaccttccgggacaccagcgaattcatacaggagagaaaccttacatatgtgctgaatgtggaaaggccttttctcagaagtcagaccttgttttacatcagaggattcatactggggaaagaccctatcaatgtgctatatgtgggaaggccttcatccagaagtcacaactaactgtacaccagagaattcacacagtggtaaaatcatagtaatgaactagtccgtaacttgaaagtatttcgatttcttggctttatatatcttgtggaaaggacgatgaacgtttcttgcacgtcctccc

SEQ ID NO: 1094 - DNA, 1055 bp, Homo sapiens
  source 1..1055: mol_type = genomic DNA
accgccaccatgagttgccaagcttttacttcggctgatacctttatacctctgaattctgacgcctctgcaactctgcctctgataatgcatcacagtgctgccgagtgtctaccagtctccaaccatgccaccaatgtgatgtctacagtcccatctattttgtctttgatccaaactcctaaatgtttgtgcacacatttctcggtgacaacgttgggaaacacagcaacaggacttcattattctgttccttcctgtcattatggaaaccagccatcaacctatggagtgatggcaggtagtttaaccccttgtctttataaatttcctgaccacaccttgagtcatggatttcctcctatacaccagcctcttctggcagaggaccccacagctgctgatttcaagcaggaactcaggcggaaaagtaaattggtggaagagccaatagacatggattctccagaaatcagagaacttgaaaagtttgccaatgaatttaaagtgagacgaattaaattaggatacacccagacaaatgttggggaggccctggcagctgtgcatggctctgaattcagtcaaacaacaatctgccgatttgaaaatctgcagctcagctttaaaaatgcatgcaaactgaaagcaatattatccaaatggctggaggaagctgagcaagtaggagctttgtacaatgaaaaagtgggagcaaatgaaaggaaaagaaaacgaagaacaactataagcattgctgctaaagatgctctggagagacactttggagaacagaataaaccttcttctcaagagatcatgaggatggctgaagaactgaatctggagaaagaagtagtaagagtttggttttgcaaccggaggcagagagaaaaacgggtgaaaacaagtctgaatcagagtttattttctatttctaaggaacatcttgagtgcagatagtaatgaactagtccgtaacttgaaagtatttcgatttcttggctttatatatcttgtggaaaggacgagcctgcttcgggccatacttacca

SEQ ID NO: 1095 - DNA, 977 bp, Homo sapiens
  source 1..977: mol_type = genomic DNA
accgccaccatgagttgccaagcttttacttcggctgatacctttatacctctgaattctgacgcctctgcaactctgcctctgataatgcatcacagtgctgccgagtgtctaccagtctccaaccatgccaccaatgtgatgtctacagcaacaggacttcattattctgttccttcctgtcattatggaaaccagccatcaacctatggagtgatggcaggtagtttaaccccttgtctttataaatttcctgaccacaccttgagtcatggatttcctcctatacaccagcctcttctggcagaggaccccacagctgctgatttcaagcaggaactcaggcggaaaagtaaattggtggaagagccaatagacatggattctccagaaatcagagaacttgaaaagtttgccaatgaatttaaagtgagacgaattaaattaggatacacccagacaaatgttggggaggccctggcagctgtgcatggctctgaattcagtcaaacaacaatctgccgatttgaaaatctgcagctcagctttaaaaatgcatgcaaactgaaagcaatattatccaaatggctggaggaagctgagcaagtaggagctttgtacaatgaaaaagtgggagcaaatgaaaggaaaagaaaacgaagaacaactataagcattgctgctaaagatgctctggagagacactttggagaacagaataaaccttcttctcaagagatcatgaggatggctgaagaactgaatctggagaaagaagtagtaagagtttggttttgcaaccggaggcagagagaaaaacgggtgaaaacaagtctgaatcagagtttattttctatttctaaggaacatcttgagtgcagatagtaatgaactagtccgtaacttgaaagtatttcgatttcttggctttatatatcttgtggaaaggacgataccgctggagtactaagcacttt

SEQ ID NO: 1096 - DNA, 1763 bp, Homo sapiens
  source 1..1763: mol_type = genomic DNA
accgccaccatggactcagtggcctctgaggatgtggctgtgaacttcacacttgaggagtgggctttgctggatccttcccagaagaaactctacagagatgtgatgcgggaaacctttagaaacctggcctgtgtaggaaaaaaatgggaagaccagagcattgaagattggtacaaaaatcaggggagaattttaagaaatcatatggaagagggactcagtgaaagtaaagaatatgatcaatgtggagaagccttcagtcagattctcaatcttaatctgaacaagaaaattcctactatagtaagaccatgtgaatgtagtttgtgtgggaaagtcttcatgcatcattcatcccttagtaggcacatcagatctcaccttggacacaaaccatatgactatcaggaatatggagagaaaccatataaatgtaagcagtgtgggaaagccttcagttcttgtcaatcctttcgaagacatgaaagaactcacactggtgagaaaccctatgcatgtccggaatgtgggaaagccttcatttctctcccaagtgttcgaagacacatgattaagcacactggagatggaccatataaatgtcaggaatgtgggaaagcctttgatcgcccaagtttatttcagatacatgaaagaactcacactggagagaaaccctatgaatgtcaggaatgtgcaaaagctttcatttctcttccaagttttcaaagacacatgattaggcacactggagatggaccttataaatgtcaggaatgtggaaaagcctttgaccgccccagtttatttcgaatacatgaaagaactcatactggagagaaaccccatgaatgtaaacagtgtgggaaggccttcatttctttcacaaattttcaaagtcatatgattaggcacactggggatggaccttataaatgtaaagtatgtgggagagcctttatttttcccagttatgttcgaaagcatgaaagaactcatactggggagaaaccctatgaatgtaataaatgtggtaaaaccttcagttcttccagtaatgttcgaacacatgaaaggactcacactggagagaagccctatgaatgtaaggaatgcgggaaagccttcatttctctcccaagtgtccgaagacacatgataaagcacactggagatggaccttataaatgtcaggtatgtggtagagcctttgactgtcccagttcatttcaaatacacgaaagaactcacactggagagaaaccctatgaatgtcaggtatgtgggaaagccttcatttctcttaaaaggattagaaaacatatgatactgcacactggagatggaccttataaatgtcaggtatgtggtaaagcctttgactgtcctagttctgtccgaacacatgaaagaactcatactggagaaaaaccctatgaatgtaaagaatgtgggaaagcattcaattatgccagttccattagaatacatgaaagaactcataccggagaaaaaccctatgaatgtaagcaatgtggaaaaacgttcagttattccagttcctttcaaagacatgaaagagctcataatggagataaaccttacgtaaagaatgtgggaaagctttcatttatcacacaaccttcgaatacctgtgaaaatgaatagtaatgaactagtccgtaacttgaaagtatttcgatttcttggctttatatatcttgtggaaaggacgacgatgctatttgcgaggaggtagc

SEQ ID NO: 1097 - DNA, 2165 bp, Homo sapiens
  source 1..2165: mol_type = genomic DNA
accgccaccatggaagcacgttctatgctggttccaccccaggcatctgtgtgcttcgaggatgtggctatggcattcacacaggaggagtgggaacagctggacctggcccagaggacactgtaccgagaggtgacactggagacctgggagcatattgtctccctggactggaaagctacccttgaggagaataggttgaattctgaaaaagatcgagctagggaagaactatcccaccacgtggaagtgtacaggagtggaccggaggagccaccctctttggtattaggaaaagtgcaagatcagagcaaccagttaagggaacaccaggagaactccttgaggttcatggtactcacctcagagagactgtttgctcaaagggaacattgtgagcttgaacttgggggaggttattctctaccttctactttaagccttctacctacaacattacctacaagtacaggtttccctaagcccaactcacaagttaaagagttgaaacaaaattcagctttcattaatcatgagaaaaatggagcagatgggaagcactgtgagagtcatcagtgtgctagagctttctgtcagagtatttacttgagtaaacttggaaacgttgaaacaggaaagaaaaacccttatgaatatattgtcagtggtgactctctcaactatggttcctccctttgttttcatggtagaactttttcagtgaagaaaagtgatgactgtaaggattatggaaacctcttcagtcacagtgtgtctctgaatgaacagaagccagtgcattttgggaaaagtcagtatgagtgtgatgagtgcagggaaacctgttctgagagtctgtgccttgtacaaacagaaagaagtggccctggagagacccccttcagatgtgaggaacgctgtgctgccttccccatggcctcatctttttctgactgtaacatcattcagactacagagaagccatctgtgtgtaatcagtgtggaaaatctttcagctgttgtaagctcatacaccagagaacacacactggagaaaagcccttcgaatgtactcagtgtgggaaatcttttagccagagctatgaccttgtcatacatcagaggacacacactggagagaagccctatgagtgtgacctgtgtgggaaatccttcacccagagatccaaacttattacacatcagcgaattcacactggagaaaaaccgtatcagtgtattgaatgcagaaaatccttcaggtggaactctaacctcattgtacatcagagaattcatactggagagaaaccgtatgagtgcactcactgtggaaagtccttcagccaaagctatgagttagttacacataaaagaacgcacactggagaaaaacccttcaaatgtactcagtgtgggaaatctttcagccagaagtatgaccttgttgtacatcagaggacacacactggagagaagccctatgagtgcaacctgtgtgggaaatccttctcccagagttccaaacttattacgcatcagcgaattcacactggagaaaaaccgtatcagtgtattgaatgtgggaaatccttcagatggaactctaacctcgtcatacatcagagaattcatactggagagaaaccgtacgattgcactcactgtggaaagtccttcagccaaagctatcagttagttgcacataaaagaactcacactggagaaaagccctatgaatgtaacgagtgtggaaaagccttcaatcgaagcactcagctcatcaggcatctgcaaattcacactggggagaagccgtacaaatgcaatcagtgcaataaagcctttgcaaggagctcctaccttgtgatgcatcagagaactcacactggtgagaaaccttttgagtgtagtcagtgtgggaaagccttttcagggagctctaaccttctttcccatcacagaattcattctggagagaaaccctatgaatgtagtgactgtgggaaatccttccggcagcaatctcaacttgtagtgcatcggcggacacatactggagagaaaccttagtaatgaactagtccgtaacttgaaagtatttcgatttcttggctttatatatcttgtggaaaggacgatagtaggttgcgtaagccgtccca

SEQ ID NO: 1098 - DNA, 329 bp, Homo sapiens
  source 1..329: mol_type = genomic DNA
accgccaccatggaagcacgttctatgctggttccaccccaggcatctgtgtgcttcgaggatgtggctatggcattcacacaggaggagtgggaacagctggacctggcccagaggacactgtaccgagaggtgacactggagacctgggagcatattgtctccctggctggagcaagaagaggacctgtgcagggcagagcaggaggccccccgagactggaaagctacccttagtaatgaactagtccgtaacttgaaagtatttcgatttcttggctttatatatcttgtggaaaggacgaggttacgtacccggacatgtaagc

SEQ ID NO: 1099 - DNA, 395 bp, Homo sapiens
  source 1..395: mol_type = genomic DNA
accgccaccatggaagcacgttctatgctggttccaccccaggcatctgtgtgcttcgaggatgtggctatggcattcacacaggaggagtgggaacagctggacctggcccagaggacactgtaccgagaggtgacactggagacctgggagcatattgtctccctggggcttttcctttccaaatctgatgtgatctctcagctggagcaagaagaggacctgtgcagggcagagcaggaggccccccgaggaacgaggcccagcaaaaagcagagacggtacagggccagaaggatctagtaatgaactagtccgtaacttgaaagtatttcgatttcttggctttatatatcttgtggaaaggacgacggcgccgatcttgcgaaggtgca

SEQ ID NO: 1100 - DNA, 1310 bp, Homo sapiens
  source 1..1310: mol_type = genomic DNA
accgccaccatggcagaaatgaaccctgcacagggtcatgtggtttttgaagacgtggccatatatttctcccaggaggagtgggggcatctcgatgaggctcagagattgctgtaccgtgatgtgatgctggagaatttggcccttttgtcctcactaggttgttgccatggagctgaggatgaggaggcacctttagagccaggtgtttctgtaggagtgtcacaggtcatggctccaaagccctgtctatctacccagaatacccagccctgtgagacatgtagctcacttctgaaggacattctgcgtctggctgagcatgacggaacacaccccgagcagggactgtacacgtgtccagcacatcttcaccagcaccaaaaggagcagattagagagaaactttctagaggggatggaggaagaccgacatttgtgaagaaccacagagttcacatggcagggaagaccttcttgtgcagtgaatgtgggaaagcctttagccacaaacataaactttctgaccatcagaaaatccacactggagaaagaacttataagtgcagcaaatgtgggatattgtttatggaaaggtccacactcaatagacatcagagaactcacactggagaaaggccttatgagtgcaatgaatgtgggaaagcctttctttgtaagtctcaccttgttcgtcaccagacaatccactctggagaaaggccttatgagtgcagtgaatgtgggaaattgtttatgtggagttccacactcattacacatcagagggttcacactggaaagaggccttatggttgcagtgaatgtgggaagttctttaagtgcaactcaaacctctttaggcattacagaattcatacaggaaaaaggtcttatggttgcagtgaatgtgggaaattctttatggaaaggtctacactcagtagacatcagagagttcacactggagaaaggccttatgagtgcaatgaatgtgggaaattcttcagcttgaaatccgtcctcattcaacaccaaagagttcacactggagaacggccttatgaatgcagtgagtgtgggaaggccttccttacaaagtcccacctcatttgtcatcagacagttcacactgcagcaaagcagtgcagtgaatgtgggaaattctttaggtataactctacacttctcagacatcagaaagtccacactggatagtaatgaactagtccgtaacttgaaagtatttcgatttcttggctttatatatcttgtggaaaggacgaccagtaccagcacgtctacaagct

SEQ ID NO: 1101 - DNA, 2612 bp, Homo sapiens
  source 1..2612: mol_type = genomic DNA
accgccaccatgcaggtggaccctcctcttcacgggcctccaaatgactttctcatttttcaaatcattcctctgcactcactttctataatgccccggtttctctggattctgtgcttctccatggaggaaactcaaggagaactgacaagttcttgtggttctaaaaccatggccaatgtatctttggcatttagggatgtgtccatagacctctcccaagaggagtgggagtgcctggacgctgtgcagagggacttgtacaaggatgtgatgttggagaactacagcaacctggtctcactgggatataccattcctaagccagatgtgattactttattggagcaagagaaagagccctggatagtaatgagggaagggacaaggaattggttcacagatttggaatacaagtatattaccaagaatttgctttcagaaaagaatgtttgcaaaatctatttatctcaattgcagacaggggaaaaaagtaaaaacaccatccatgaggacaccattttcagaaatggtttgcagtgtaaacatgaatttgagagacaagagagacatcagatgggatgcgttagtcaaatgctaatccaaaaacaaatatctcatcctctacatccaaaaattcatgctagagagaaatcatatgaatgtaaggaatgtagaaaggcctttagacaacagtcataccttattcaacatctgagaattcacactggtgagagaccctataaatgtatggaatgtggaaaggccttttgtcgagtgggagaccttagagtacatcacacaatccatgctggggagagaccctatgaatgtaaagaatgtgggaaggcctttagacttcattatcaccttactgaacatcagagaatacattctggtgtgaaaccctacgagtgtaaggaatgtgggaaagcctttagtcgtgttagagaccttagagtacatcagacaattcatgctggagagagaccttatgaatgtaaagaatgtgggaaggcctttagacttcattatcaactaactgaacatcaaagaattcatactggtgagaggccttatgaatgtaaggtttgtggcaagacctttagggtacaacgacatattagtcaacatcagaaaattcatactggtgtcaaaccctataaatgtaatgaatgtgggaaggcctttagtcatggctcataccttgttcaacatcagaaaattcatactggtgaaaaaccctacgaatgtaaagaatgtggtaagtcctttagttttcatgcagaacttgctcgacatcgtagaattcatactggtgagaaaccctatgaatgtagagaatgtggaaaagcctttcgtcttcaaacggaacttactcggcatcatagaactcatactggtgagaaaccctatgaatgtaaggaatgtgggaaggcctttatttgtggttatcaacttactttacatctgagaactcacaccggtgagattccctatgaatgtaaggaatgtggaaaaaccttcagtagtcgctatcatctcactcaacactacagaattcatactggtgagaaaccctacatatgtaacgaatgtggaaaagcctttcgtcttcaaggagaacttacccgacatcacagaattcatacatgtgagaaaccctatgaatgtaaggaatgtgggaaggcttttattcatagcaatcaatttatttcacaccagcgaattcacaccagtgagagcacctacatatgtaaagaatgtgggaagatttttagtcgtcgctataatcttactcaacattttaaaattcatactggtgaaaaaccctacatatgtaatgaatgtgggaaagcctttcgatttcaaacagaacttactcagcatcacagaattcatactggtgaaaaaccctataaatgtacagaatgtgggaaggcctttattcgtagcactcatctcacgcaacatcacagaattcatactggtgagaaaccctacgaatgtacggaatgtgggaagacgtttagtcggcactatcatcttactcaacatcacagaggccatactggtgagaagccctacatatgtaatgaatgtgggaatgcttttatttgcagttatcgacttacattacatcaaagaattcacactggtgagcttccatatgaatgtaaggaatgtggaaagacctttagtcgtcggtatcatcttactcaacattttagacttcatactggtgagaaaccttatagctgtaaagaatgtgggaatgcctttcgtcttcaagcagaacttactcgacatcacatagttcacacgggtgagaaaccctataaatgtaaagaatgtgggaaagccttcagtgttaattcagaacttactcgacatcacagaattcatactggtgaaaaaccctatcaatgtaaagaatgtggaaaagcctttattcgtagtgatcaacttactttacatcagagaaatcatattagtgaggaagtcctatgcataatgtagtaatgaactagtccgtaacttgaaagtatttcgatttcttggctttatatatcttgtggaaaggacgaaaacgctactgaggacgctccata

SEQ ID NO: 1102 - DNA, 2534 bp, Homo sapiens
  source 1..2534: mol_type = genomic DNA
accgccaccatgcagccccggtttctctggattctgtgcttctccatggaggaaactcaaggagaactgacaagttcttgtggttctaaaaccatggccaatgtatctttggcatttagggatgtgtccatagacctctcccaagaggagtgggagtgcctggacgctgtgcagagggacttgtacaaggatgtgatgttggagaactacagcaacctggtctcactgggatataccattcctaagccagatgtgattactttattggagcaagagaaagagccctggatagtaatgagggaagggacaaggaattggttcacagatttggaatacaagtatattaccaagaatttgctttcagaaaagaatgtttgcaaaatctatttatctcaattgcagacaggggaaaaaagtaaaaacaccatccatgaggacaccattttcagaaatggtttgcagtgtaaacatgaatttgagagacaagagagacatcagatgggatgcgttagtcaaatgctaatccaaaaacaaatatctcatcctctacatccaaaaattcatgctagagagaaatcatatgaatgtaaggaatgtagaaaggcctttagacaacagtcataccttattcaacatctgagaattcacactggtgagagaccctataaatgtatggaatgtggaaaggccttttgtcgagtgggagaccttagagtacatcacacaatccatgctggggagagaccctatgaatgtaaagaatgtgggaaggcctttagacttcattatcaccttactgaacatcagagaatacattctggtgtgaaaccctacgagtgtaaggaatgtgggaaagcctttagtcgtgttagagaccttagagtacatcagacaattcatgctggagagagaccttatgaatgtaaagaatgtgggaaggcctttagacttcattatcaactaactgaacatcaaagaattcatactggtgagaggccttatgaatgtaaggtttgtggcaagacctttagggtacaacgacatattagtcaacatcagaaaattcatactggtgtcaaaccctataaatgtaatgaatgtgggaaggcctttagtcatggctcataccttgttcaacatcagaaaattcatactggtgaaaaaccctacgaatgtaaagaatgtggtaagtcctttagttttcatgcagaacttgctcgacatcgtagaattcatactggtgagaaaccctatgaatgtagagaatgtggaaaagcctttcgtcttcaaacggaacttactcggcatcatagaactcatactggtgagaaaccctatgaatgtaaggaatgtgggaaggcctttatttgtggttatcaacttactttacatctgagaactcacaccggtgagattccctatgaatgtaaggaatgtggaaaaaccttcagtagtcgctatcatctcactcaacactacagaattcatactggtgagaaaccctacatatgtaacgaatgtggaaaagcctttcgtcttcaaggagaacttacccgacatcacagaattcatacatgtgagaaaccctatgaatgtaaggaatgtgggaaggcttttattcatagcaatcaatttatttcacaccagcgaattcacaccagtgagagcacctacatatgtaaagaatgtgggaagatttttagtcgtcgctataatcttactcaacattttaaaattcatactggtgaaaaaccctacatatgtaatgaatgtgggaaagcctttcgatttcaaacagaacttactcagcatcacagaattcatactggtgaaaaaccctataaatgtacagaatgtgggaaggcctttattcgtagcactcatctcacgcaacatcacagaattcatactggtgagaaaccctacgaatgtacggaatgtgggaagacgtttagtcggcactatcatcttactcaacatcacagaggccatactggtgagaagccctacatatgtaatgaatgtgggaatgcttttatttgcagttatcgacttacattacatcaaagaattcacactggtgagcttccatatgaatgtaaggaatgtggaaagacctttagtcgtcggtatcatcttactcaacattttagacttcatactggtgagaaaccttatagctgtaaagaatgtgggaatgcctttcgtcttcaagcagaacttactcgacatcacatagttcacacgggtgagaaaccctataaatgtaaagaatgtgggaaagccttcagtgttaattcagaacttactcgacatcacagaattcatactggtgaaaaaccctatcaatgtaaagaatgtggaaaagcctttattcgtagtgatcaacttactttacatcagagaaatcatattagtgaggaagtcctatgcataatgtagtaatgaactagtccgtaacttgaaagtatttcgatttcttggctttatatatcttgtggaaaggacgacactcatgtctacacaacgttgcc

SEQ ID NO: 1103 - DNA, 2234 bp, Homo sapiens
  source 1..2234: mol_type = genomic DNA
accgccaccatggtgaagctcgcgaaggcaggtaaaaatcaaggtgaccccaagaaaatggctcctcctccaaaggaggtagaagaagatagtgaagatgaggaaatgtcagaagatgaagaagatgatagcagtggagaagaggtcgtcatacctcagaagaaaggcaagaaggctgctgcaacctcagcaaagaaggtggtcgtttccccaacaaaaaaggttgcagttgccacaccagccaagaaagcagctgtcactccaggcaaaaaggcagcagcaacacctgccaagaagacagttacaccagccaaagcagttaccacacctggcaagaagggagccacaccaggcaaagcattggtagcaactcctggtaagaagggtgctgccatcccagccaagggggcaaagaatggcaagaatgccaagaaggaagacagtgatgaagaggaggatgatgacagtgaggaggatgaggaggatgacgaggacgaggatgaggatgaagatgaaattgaaccagcagcgatgaaagcagcagctgctgcccctgcctcagaggatgaggacgatgaggatgacgaagatgatgaggatgacgatgacgatgaggaagatgactctgaagaagaagctatggagactacaccagccaaaggaaagaaagctgcaaaagttgttcctgtgaaagccaagaacgtggctgaggatgaagatgaagaagaggatgatgaggacgaggatgacgacgacgacgaagatgatgaagatgatgatgatgaagatgatgaggaggaggaagaagaggaggaggaagagcctgtcaaagaagcacctggaaaacgaaagaaggaaatggccaaacagaaagcagctcctgaagccaagaaacagaaagtggaaggcacagaaccgactacggctttcaatctctttgttggaaacctaaactttaacaaatctgctcctgaattaaaaactggtatcagcgatgtttttgctaaaaatgatcttgctgttgtggatgtcagaattggtatgactaggaaatttggttatgtggattttgaatctgctgaagacctggagaaagcgttggaactcactggtttgaaagtctttggcaatgaaattaaactagagaaaccaaaaggaaaagacagtaagaaagagcgagatgcgagaacacttttggctaaaaatctcccttacaaagtcactcaggatgaattgaaagaagtgtttgaagatgctgcggagatcagattagtcagcaaggatgggaaaagtaaagggattgcttatattgaatttaagacagaagctgatgcagagaaaacctttgaagaaaagcagggaacagagatcgatgggcgatctatttccctgtactatactggagagaaaggtcaaaatcaagactatagaggtggaaagaatagcacttggagtggtgaatcaaaaactctggttttaagcaacctctcctacagtgcaacagaagaaactcttcaggaagtatttgagaaagcaacttttatcaaagtaccccagaaccaaaatggcaaatctaaagggtatgcatttatagagtttgcttcattcgaagacgctaaagaagctttaaattcctgtaataaaagggaaattgagggcagagcaatcaggctggagttgcaaggacccaggggatcacctaatgccagaagccagccatccaaaactctgtttgtcaaaggcctgtctgaggataccactgaagagacattaaaggagtcatttgacggctccgttcgggcaaggatagttactgaccgggaaactgggtcctccaaagggtttggttttgtagacttcaacagtgaggaggatgccaaagctgccaaggaggccatggaagacggtgaaattgatggaaataaagttaccttggactgggccaaacctaagggtgaaggtggcttcgggggtcgtggtggaggcagaggcggctttggaggacgaggtggtggtagaggaggccgaggaggatttggtggcagaggccggggaggctttggagggcgaggaggcttccgaggaggcagaggaggaggaggtgaccacaagccacaaggaaagaagacgaagtttgaatagtaatgaactagtccgtaacttgaaagtatttcgatttcttggctttatatatcttgtggaaaggacgagtagtgtttgtcttaacttatgcc

SEQ ID NO: 1104 - DNA, 1988 bp, Homo sapiens
  source 1..1988: mol_type = genomic DNA
accgccaccatggcccatgcattggtgacgttcagggatgtggctatagacttctctcagaaggaatgggagtgcctggacactacccagaggaaattgtacagagatgtgatgttggagaattataataacttggtctcactgggtttgttatccaggcataagaccaagaaattatcttcagaaaaggacattcatgaaatcagtttatccaaagagagtataatagaaaaaagtaaaactcttcgtctgaaaggatccatttttagaaatgagtggcagaacaaaagtgagtttgagggtcaacagggacttaaagaaagatctatcagtcaaaagaaaatcgtctctaaaaaaatgtcaactgatagaaaacgtccctcttttactctgaatcagagaattcacaatagtgagaaaagctgtgactcacacttggttcaacatgggaaaatagattctgatgtgaaacatgattgtaaagaatgtgggagtacttttaataatgtctatcagcttactctccatcagaaaattcatactggtgaaaaatcctgtaaatgtgagaaatgtgggaaagtttttagtcatagctatcaacttactctgcatcagagatttcatactggtgagaaaccctatgaatgtcaagaatgtgggaagacctttactctttacccacaacttaatcgacatcagaaaattcacactggtaaaaaaccctatatgtgtaagaaatgtgataagggtttttttagtagattagaacttactcaacataaaagaattcatactggtaagaaatcttatgaatgtaaagaatgtggaaaagtttttcaacttattttctactttaaagaacatgagagaattcatacaggtaagaaaccctatgaatgtaaggagtgtgggaaagcttttagtgtatgcggacaacttacccgtcatcagaaaattcatactggtgtaaaaccctacgaatgtaaggaatgtggaaagacctttagacttagtttttaccttactgaacacagaagaactcatgcaggtaagaaaccttatgaatgtaaggagtgtgggaaatcatttaatgtgcgtggacagcttaatcggcataaaacaatccatactggtataaaaccttttgcatgtaaggtgtgtgagaaggcttttagttatagtggtgacctcagagtacattctagaattcatactggagagaaaccatatgaatgtaaggaatgcgggaaagcctttatgcttcgttcagtccttactgaacatcagagacttcatactggtgtgaagccctacgaatgtaaggaatgtgggaagacctttcgagttcgttctcaaattagtctacataagaaaattcatactgatgtgaagccctacaaatgtgtacgatgtgggaagacctttagatttggtttctaccttactgaacaccagagaattcacactggtgaaaagccctataaatgtaaagaatgtggaaaggcctttattcgtagagggaatcttaaagaacatctgaaaattcattctggtttaaaaccctatgactgtaaagaatgtgggaagtcctttagtcggcgtgggcagttcactgaacatcagaaaattcatacgggtgtaaaaccatacaaatgtaaagaatgtgggaaggcctttagtcgtagtgtagaccttagaatacatcaaagaattcatactggtgagaaaccctatgagtgtaaacaatgtgggaaggcctttagacttaattcacaccttactgaacatcagagaattcacactggtgagaaaccctatgagtgtaaggtatgtagaaaggcctttagacaatattcacatctttatcaacatcagaaaactcataatgtaatttagtaatgaactagtccgtaacttgaaagtatttcgatttcttggctttatatatcttgtggaaaggacgatcacatacgctttcaaggccgacc

SEQ ID NO: 1105 - DNA, 2084 bp, Homo sapiens
  source 1..2084: mol_type = genomic DNA
accgccaccatggcccatgcattggtgacgttcagggatgtggctatagacttctctcagaaggaatgggagtgcctggacactacccagaggaaattgtacagagatgtgatgttggagaattataataacttggtctcactgggatattctggctcaaagccagatgtgattaccttactggagcaagggaaagagccctgcgtggtggcgagggatgtgacaggaagacagtgccccggtttgttatccaggcataagaccaagaaattatcttcagaaaaggacattcatgaaatcagtttatccaaagagagtataatagaaaaaagtaaaactcttcgtctgaaaggatccatttttagaaatgagtggcagaacaaaagtgagtttgagggtcaacagggacttaaagaaagatctatcagtcaaaagaaaatcgtctctaaaaaaatgtcaactgatagaaaacgtccctcttttactctgaatcagagaattcacaatagtgagaaaagctgtgactcacacttggttcaacatgggaaaatagattctgatgtgaaacatgattgtaaagaatgtgggagtacttttaataatgtctatcagcttactctccatcagaaaattcatactggtgaaaaatcctgtaaatgtgagaaatgtgggaaagtttttagtcatagctatcaacttactctgcatcagagatttcatactggtgagaaaccctatgaatgtcaagaatgtgggaagacctttactctttacccacaacttaatcgacatcagaaaattcacactggtaaaaaaccctatatgtgtaagaaatgtgataagggtttttttagtagattagaacttactcaacataaaagaattcatactggtaagaaatcttatgaatgtaaagaatgtggaaaagtttttcaacttattttctactttaaagaacatgagagaattcatacaggtaagaaaccctatgaatgtaaggagtgtgggaaagcttttagtgtatgcggacaacttacccgtcatcagaaaattcatactggtgtaaaaccctacgaatgtaaggaatgtggaaagacctttagacttagtttttaccttactgaacacagaagaactcatgcaggtaagaaaccttatgaatgtaaggagtgtgggaaatcatttaatgtgcgtggacagcttaatcggcataaaacaatccatactggtataaaaccttttgcatgtaaggtgtgtgagaaggcttttagttatagtggtgacctcagagtacattctagaattcatactggagagaaaccatatgaatgtaaggaatgcgggaaagcctttatgcttcgttcagtccttactgaacatcagagacttcatactggtgtgaagccctacgaatgtaaggaatgtgggaagacctttcgagttcgttctcaaattagtctacataagaaaattcatactgatgtgaagccctacaaatgtgtacgatgtgggaagacctttagatttggtttctaccttactgaacaccagagaattcacactggtgaaaagccctataaatgtaaagaatgtggaaaggcctttattcgtagagggaatcttaaagaacatctgaaaattcattctggtttaaaaccctatgactgtaaagaatgtgggaagtcctttagtcggcgtgggcagttcactgaacatcagaaaattcatacgggtgtaaaaccatacaaatgtaaagaatgtgggaaggcctttagtcgtagtgtagaccttagaatacatcaaagaattcatactggtgagaaaccctatgagtgtaaacaatgtgggaaggcctttagacttaattcacaccttactgaacatcagagaattcacactggtgagaaaccctatgagtgtaaggtatgtagaaaggcctttagacaatattcacatctttatcaacatcagaaaactcataatgtaatttagtaatgaactagtccgtaacttgaaagtatttcgatttcttggctttatatatcttgtggaaaggacgacgaaggagtattgagacagcgggc

SEQ ID NO: 1106 - DNA, 1985 bp, Homo sapiens
  source 1..1985: mol_type = genomic DNA
accgccaccatggccgaggcagcgctagtgattacgccgcagggccatgtgacctttgaggatattgctgtgtacttctcccaggaggagtggggcctccttgatgaagctcaaaggtgcctgtatcatgatgtgatgctggagaacttttcgcttatggcctcagtaggttgtttgcatggaatagaggctgaggaggccccttctgagcagactctttctgcgcaaggagtgtcacaggccaggactccaaagctaggtccttccatcccaaatgctcattcttgtgagatgtgtatcctggtcatgaaagacattttgtacctcagtgagcatcaggggacacttccctggcagaaaccttatacgtctgtggccagtgggaaatggttttcatttggttctaacctgcaacagcaccagaaccaggacagtggagagaaacacatcagaaaggaggagagcagtgccttgcttctgaatagctgcaaaattcctctgtcagacaatcttttcccatgcaaagatgttgagaaggattttccaaccatcctgggccttctccaacaccagaccacccacagcagacaagagtatgcacatagaagcagggagacctttcaacaaagacgttacaaatgtgagcaagttttcaatgagaaagttcatgttactgagcatcagagagtccacactggagaaaaagcttataagcgtagggaatatgggaaatccttgaactctaaatacttatttgttgaacaccagagaacccataatgcagaaaagccttatgtgtgcaatatatgtgggaaatcattcctccataaacaaacactcgttgggcaccagcagagaattcacactagagaaaggtcttatgtgtgcatcgaatgtgggaaatccttgagctccaaatactcacttgtggaacaccagagaacccataatggagaaaagccttatgtgtgcaatgtatgtgggaaatcattccgccacaaacaaacatttgttggccatcagcagagaatccacactggagagaggccttatgtgtgtatggaatgtgggaaatcttttattcattcctatgaccgcattcgacaccagagagttcacactggagaaggggcttatcagtgcagtgaatgtgggaaatccttcatatacaaacagtcacttcttgatcaccatagaatccacacgggagaaaggccttatgagtgcaaagaatgtgggaaggccttcattcacaaaaaaagacttcttgagcaccagagaattcatactggagaaaagccttatgtgtgcatcatatgtgggaaatcatttatccgctcgtctgactacatgcgacaccagagaattcacactggagaaagggcttatgaatgcagtgactgtgggaaagccttcatctccaaacaaacacttcttaagcatcacaaaatccacactagagaaaggccttatgaatgcagtgaatgtggaaaaggcttctaccttgaggttaaacttcttcagcaccaaagaatccatactagagaacaactttgtgagtgcaatgaatgtggaaaagtcttcagccaccaaaaaagacttcttgagcaccagaaagttcacactggcgaaaagccctgtgagtgcagtgaatgtgggaaatgctttagacaccgcaccagcctcattcaacaccagaaagttcacagtggagagaggccttataactgcactgcatgtgagaaggcctttatctataaaaacaaacttgttgagcatcagcgaatccacaccggagaaaagccgtatgaatgtggtaaatgtgggaaagccttcaacaaaagatattcccttgtcaggcaccagaaggtacatataacagaagagccctagtaatgaactagtccgtaacttgaaagtatttcgatttcttggctttatatatcttgtggaaaggacgacgctatttacgactagaccgtgga

SEQ ID NO: 1107 - DNA, 1739 bp, Homo sapiens
  source 1..1739: mol_type = genomic DNA
accgccaccatgaacctgactgagggtcccctggcgatggcagaaatggaccctacacagggccgtgtggtctttgaggacgtggccatatatttctcccaggaggagtgggggcaccttgatgaggctcagagattgctgtaccgtgatgtgatgctggagaatttggcccttttgtcctcactaggttcttggcatggagctgaggatgaggaggcaccttcacagcaaggtttttctgtaggagtgtcagaggttacagcttcaaagccctgtctgtccagccagaaggtccaccctagtgagacatgtggcccacccttgaaagacattctgtgcctggttgagcacaatggaattcatcctgagcaacacatatatatttgtgaggcagagctttttcagcacccaaagcagcaaattggagaaaatctttccagaggggatgattggataccttcatttgggaagaaccacagagttcacatggcagaggagatcttcacatgcatggagggctggaaggacttaccagccacctcatgccttctccagcaccagggccctcaaagcgagtggaagccatacagggacacagaggacagagaagcctttcagactggacaaaatgattacaaatgtagtgaatgtgggaaaaccttcacctgcagctattcatttgttgagcaccagaaaatccacacaggagaaaggtcttatgaatgtaacaaatgtgggaaattctttaagtacagtgccaatttcatgaaacatcagacagttcacactagtgaaaggacttatgagtgcagagaatgtggaaaatcctttatgtacaactaccgactcatgagacataagcgagttcacactggagaaaggccttatgagtgcaacacatgtgggaaattctttcggtacagctccacatttgttagacatcagagagttcacaccggagaaaggccgtatgagtgcagggaatgtgggaaattctttatggacagctccacactcattaaacatcagagagttcacaccggagaaagaccttataagtgcaatgattgtgggaaattttttaggtatatctccacactcattagacatcagagaattcacactggagaaaggccttatgagtgcagtgtatgtggggaattgtttaggtacaactccagccttgttaaacattggagaaatcacactggagaaaggccttataaatgcagtgaatgtgggaaatcatttaggtaccactgcaggctcattagacaccagagagtccacacgggagaaaggccttatgagtgcagcgaatgcgggaaattctttcgttacaactccaacctcattaaacattggagaaatcacactggagaaaggccttacgagtgcagagagtgtgggaaagcctttagccacaagcatatacttgttgagcaccagaaaatccacagtggagaaagaccttatgagtgcagcgaatgccagaaggcctttattagaaagtctcacctggttcatcaccagaaaatccacagtgaagagaggcttgtgtgctccatgaatgtggggaattctttagctaaaactccaacctcattaaacatcagagatttcacaatggagaaagtttaccattagtaatgaactagtccgtaacttgaaagtatttcgatttcttggctttatatatcttgtggaaaggacgatatgtgagtcctgtgtggcagcag

SEQ ID NO: 1108 - DNA, 1703 bp, Homo sapiens
  source 1..1703: mol_type = genomic DNA
accgccaccatgaacctgactgagggccgtgtggtctttgaggacgtggccatatatttctcccaggaggagtgggggcaccttgatgaggctcagagattgctgtaccgtgatgtgatgctggagaatttggcccttttgtcctcactaggttcttggcatggagctgaggatgaggaggcaccttcacagcaaggtttttctgtaggagtgtcagaggttacagcttcaaagccctgtctgtccagccagaaggtccaccctagtgagacatgtggcccacccttgaaagacattctgtgcctggttgagcacaatggaattcatcctgagcaacacatatatatttgtgaggcagagctttttcagcacccaaagcagcaaattggagaaaatctttccagaggggatgattggataccttcatttgggaagaaccacagagttcacatggcagaggagatcttcacatgcatggagggctggaaggacttaccagccacctcatgccttctccagcaccagggccctcaaagcgagtggaagccatacagggacacagaggacagagaagcctttcagactggacaaaatgattacaaatgtagtgaatgtgggaaaaccttcacctgcagctattcatttgttgagcaccagaaaatccacacaggagaaaggtcttatgaatgtaacaaatgtgggaaattctttaagtacagtgccaatttcatgaaacatcagacagttcacactagtgaaaggacttatgagtgcagagaatgtggaaaatcctttatgtacaactaccgactcatgagacataagcgagttcacactggagaaaggccttatgagtgcaacacatgtgggaaattctttcggtacagctccacatttgttagacatcagagagttcacaccggagaaaggccgtatgagtgcagggaatgtgggaaattctttatggacagctccacactcattaaacatcagagagttcacaccggagaaagaccttataagtgcaatgattgtgggaaattttttaggtatatctccacactcattagacatcagagaattcacactggagaaaggccttatgagtgcagtgtatgtggggaattgtttaggtacaactccagccttgttaaacattggagaaatcacactggagaaaggccttataaatgcagtgaatgtgggaaatcatttaggtaccactgcaggctcattagacaccagagagtccacacgggagaaaggccttatgagtgcagcgaatgcgggaaattctttcgttacaactccaacctcattaaacattggagaaatcacactggagaaaggccttacgagtgcagagagtgtgggaaagcctttagccacaagcatatacttgttgagcaccagaaaatccacagtggagaaagaccttatgagtgcagcgaatgccagaaggcctttattagaaagtctcacctggttcatcaccagaaaatccacagtgaagagaggcttgtgtgctccatgaatgtggggaattctttagctaaaactccaacctcattaaacatcagagatttcacaatggagaaagtttaccattagtaatgaactagtccgtaacttgaaagtatttcgatttcttggctttatatatcttgtggaaaggacgacctcagttaagtaagcccgtatgc

SEQ ID NO: 1109 - DNA, 1148 bp, Homo sapiens
  source 1..1148: mol_type = genomic DNA
accgccaccatgcccaggtccttcctggtcaagaaggtcaaacttgacgcgttctcttcggccgacctggagagcgcctacggacgcgcccgcagcgacctcggcgcgccactgcacgataaagggtacctcagcgactacgtggggccctcgtccgtctacgatggcgacgccgaggctgcgctgctcaaagggccgtcgccggagcccatgtacgcagcagctgtgcgtggagagctgggtccggcggctgcagggtctgcgccgccgcccaccccgcgcccggagctggccaccgctgcgggcggctacatcaacggcgacgcggccgtcagcgagggctacgcggcggacgccttcttcatcaccgacgggcgctcgcggcgtaaggcttccaatgccggcgctgccgccgctccctccacagcctcggcggcggcccccgacggcgacgccggaggcgggggcggggcgggcgggcgcagcttgggatccgggccggggggccggggcggcacgcgcgcgggggcaggcaccgaggcgcgcgcggggccaggggccgcaggtgctggcggccggcacgcgtgcggcgagtgcggcaaaacatacgccacgtcgtcgaacctgagccgccacaagcagacgcaccgcagcctggacagccagctggcgcggcgctgcccgacgtgcggcaaggtgtacgtgtccatgccggccatggccatgcacctgctcacgcacgacctgcgccacaagtgcggcgtgtgcggcaaagccttctcgcggccctggctgctgcagggccacatgcgctcgcacaccggcgagaaacccttcggctgcgcgcactgcggcaaggccttcgccgaccgctccaacctgcgcgcgcacatgcagacgcattcggccttcaagcacttccagtgcaagcgctgcaagaagagcttcgcgctcaagtcctatctcaacaagcactacgagtcggcctgcttcaagggcggcgccggaggccccgcggctcctgcgccgccacagctcagccctgtgcaggcctagtaatgaactagtccgtaacttgaaagtatttcgatttcttggctttatatatcttgtggaaaggacgattctaaccgaatcaacttaaagcg

SEQ ID NO: 1110 - DNA, 2678 bp, Homo sapiens
  source 1..2678: mol_type = genomic DNA
accgccaccatggacctcccggcgctgctccccgccccgactgcgcgcggagggcaacatggcggcggccccggcccgctccgccgagccccagcgccgctcggcgcgagccccgcgcgccgccgcctgctactggtgcggggccctgaagatggcgggcccggggcgcggcccggggaggcctccgggccaagcccgccgcccgccgaggacgacagcgacggcgactctttcttggtgctgctggaagtgccgcacggcggcgctgccgccgaggctgccggatcacaggaggccgagcctggctcccgtgtcaacctggcgagccgccccgagcagggccccagcggcccggccgccccccccggccctggcgtagccccggcgggcgccgtcaccatcagcagccaggacctgctggtgcgtctcgaccgcggcgtcctcgcgctgtctgcgccgcccggccccgcaaccgcgggcgccgccgctccccgccgcgcgccccaggcctccggccccagcacgcccggctaccgctgccccgagccgcagtgcgcgctggccttcgccaagaagcaccagctcaaggtgcacctgctcacgcacggcggcggtcagggccggcggcccttcaagtgcccactggagggctgtggttgggccttcacaacgtcctacaagctcaagcggcacctgcagtcgcacgacaagctgcggcccttcggctgtccagtgggcggctgtggcaagaagttcactacggtctataacctcaaggcgcacatgaagggccacgagcaggagagcctgttcaagtgcgaggtgtgcgccgagcgcttccccacgcacgccaagctcagctcccaccagcgcagccacttcgagcccgagcgcccttacaagtgtgactttcccggctgtgagaagacatttatcacagtgagtgccctgttttcccataaccgagcccacttcagggaacaagagctcttttcctgctcctttcctgggtgcagcaagcagtatgataaagcctgtcggctgaaaattcacctgcggagccatacaggtgaaagaccatttatttgtgactctgacagctgtggctggaccttcaccagcatgtccaaacttctaaggcacagaaggaaacatgacgatgaccggaggtttacctgccctgtcgagggctgtgggaaatcattcaccagagcagagcatctgaaaggccacagcataacccacctaggcacaaagccgttcgagtgtcctgtggaaggatgttgcgcgaggttctccgctcgtagcagtctgtacattcactctaagaaacacgtgcaggatgtgggtgctccgaaaagccgttgcccagtttctacctgcaacagactcttcacctccaagcacagcatgaaggcgcacatggtcagacagcacagccggcgccaagatctcttacctcagctagaagctccgagttctcttactcccagcagtgaactcagcagcccaggccaaagtgagctcactaacatggatcttgctgcactcttctctgacacacctgccaatgctagtggttctgcaggtgggtcggatgaggctctgaactccggaatcctgactattgacgtcacttctgtgagctcctctctgggagggaacctccctgctaataatagctccctagggccgatggaacccctggtcctggtggcccacagtgatattcccccaagcctggacagccctctggttctcgggacagcagccacggttctgcagcagggcagcttcagtgtggatgacgtgcagactgtgagtgcaggagcattaggctgtctggtggctctgcccatgaagaacttgagtgacgacccactggctttgacctccaatagtaacttagcagcacatatcaccacaccgacctcttcgagcaccccccgagaaaatgccagtgtcccggaactgctggctccaatcaaggtggagccggactcgccttctcgcccaggagcagttgggcagcaggaaggaagccatgggctgccccagtccacgttgcccagtccagcagagcagcacggtgcccaggacacagagctcagtgcaggcactggcaacttctatttggaaagtgggggctcagcaagaactgattaccgagccattcaactagccaaggaaaaaaagcagagaggagcggggagcaatgcaggagcctcacagtctactcagagaaaaataaaagaaggcaaaatgagtcctccccatttccatgcaagccagaacagttggttgtgtgggagcctcgtggtgcccagcggaggacggccaggaccagctccagcagctggggtgcagtgcggggcgcagggcgtccaggtccagctggtgcaggatgacccctccggcgaaggtgtcctgccctcggcccgcggcccagccaccttcctccccttcctcactgtggacctgcccgtctacgtcctccaggaggtgctcccctcatctggaggccctgctggaccggaggccacccagttcccaggaagcactatcaacctgcaggatctgcagtagtaatgaactagtccgtaacttgaaagtatttcgatttcttggctttatatatcttgtggaaaggacgaatcccataactggcgtttgtagag

SEQ ID NO: 1111 - DNA, 2234 bp, Homo sapiens
  source 1..2234: mol_type = genomic DNA
accgccaccatggacctcccggcgctgctccccgccccgactgcgcgcggagggcaacatggcggcggccccggcccgctccgccgagccccagcgccgctcggcgcgagccccgcgcgccgccgcctgctactggtgcggggccctgaagatggcgggcccggggcgcggcccggggaggcctccgggccaagcccgccgcccgccgaggacgacagcgacggcgactctttcttggtgctgctggaagtgccgcacggcggcgctgccgccgaggctgccggatcacaggaggccgagcctggctcccgtgtcaacctggcgagccgccccgagcagggccccagcggcccggccgccccccccggccctggcgtagccccggcgggcgccgtcaccatcagcagccaggacctgctggtgcgtctcgaccgcggcgtcctcgcgctgtctgcgccgcccggccccgcaaccgcgggcgccgccgctccccgccgcgcgccccaggcctccggccccagcacgcccggctaccgctgccccgagccgcagtgcgcgctggccttcgccaagaagcaccagctcaaggtgcacctgctcacgcacggcggcggtcagggccggcggcccttcaagtgcccactggagggctgtggttgggccttcacaacgtcctacaagctcaagcggcacctgcagtcgcacgacaagctgcggcccttcggctgtccagtgggcggctgtggcaagaagttcactacggtctataacctcaaggcgcacatgaagggccacgagcaggagagcctgttcaagtgcgaggtgtgcgccgagcgcttccccacgcacgccaagctcagctcccaccagcgcagccacttcgagcccgagcgcccttacaagtgtgactttcccggctgtgagaagacatttatcacagtgagtgccctgttttcccataaccgagcccacttcagggaacaagagctcttttcctgctcctttcctgggtgcagcaagcagtatgataaagcctgtcggctgaaaattcacctgcggagccatacaggtgaaagaccatttatttgtgactctgacagctgtggctggaccttcaccagcatgtccaaacttctaaggcacagaaggaaacatgacgatgaccggaggtttacctgccctgtcgagggctgtgggaaatcattcaccagagcagagcatctgaaaggccacagcataacccacctaggcacaaagccgttcgagtgtcctgtggaaggatgttgcgcgaggttctccgctcgtagcagtctgtacattcactctaagaaacacgtgcaggatgtgggtgctccgaaaagccgttgcccagtttctacctgcaacagactcttcacctccaagcacagcatgaaggcgcacatggtcagacagcacagccggcgccaagatctcttacctcagctagaagctccgagttctcttactcccagcagtgaactcagcagcccaggccaaagtgagctcactaacatggatcttgctgcactcttctctgacacacctgccaatgctagtggttctgcaggtgggtcggatgaggctctgaactccggaatcctgactattgacgtcacttctgtgagctcctctctgggagggaacctccctgctaataatagctccctagggccgatggaacccctggtcctggtggcccacagtgatattcccccaagcctggacagccctctggttctcgggacagcagccacggttctgcagcagggcagcttcagtgtggatgacgtgcagactgtgagtgcaggagcattaggctgtctggtggctctgcccatgaagaacttgagtgacgacccactggctttgacctccaatagtaacttagcagcacatatcaccacaccgacctcttcgagcaccccccgagaaaatgccagtgtcccggaactgctggctccaatcaaggtggagccggactcgccttctcgcccaggagcagttgggcagcaggaaggaagccatgggctgccccagtccacgttgcccagtccagcagagcagcacggtgcccaggacacagagctcagtgcaggcactggcaacttctatttggtatagtaatgaactagtccgtaacttgaaagtatttcgatttcttggctttatatatcttgtggaaaggacgacgcttgctcacatcggaagaacct

SEQ ID NO: 1112 - DNA, 1025 bp, Homo sapiens
  source 1..1025: mol_type = genomic DNA
accgccaccatgccgcgctccttcctggtaaagaagatcaaaggggacggcttccagtgcagcggggtgccggcccccacctaccaccccttggagacagcctacgtgctgcctggcgcccgggggcctcccggggacaacgggtacgccccgcaccgcctgcccccgagcagctacgatgcggaccagaagccgggcctggagctggccccggccgagcccgcgtacccgccggcggcgccggaggagtacagcgaccccgaaagcccgcagtcgagcctgtcggcgcgctacttccgaggggaggcggcagtgaccgacagctactccatggacgccttcttcatctcggacgggcgctcgcggcggcggcggggcgggggcggcggggacgcggggggctcgggagacgcggggggcgccggggggcgcgcggggcgcgcgggggcgcaggcgggcggcgggcaccggcacgcgtgcgccgagtgcggcaagacctacgccacgtcgtcgaacctgagccgccacaagcagacgcaccgcagcctggacagccagctggcgcgcaaatgcccgacgtgcggcaaggcctacgtgtccatgcccgcgctcgccatgcacctgctcacgcacaacctgcgccacaagtgcggcgtctgcggcaaggccttctcgcggccctggctgctgcagggtcacatgcgctcgcacaccggcgaaaagccgttcggctgcgcgcactgcggcaaggccttcgccgaccgctccaacctgcgcgcgcacatgcagacgcactcggccttcaagcactaccgctgccgccagtgcgacaagagcttcgcgctcaagtcctacctccacaagcactgcgaggcggcctgcgccaaggcggccgagccacccccgccgacccccgccggcccggccagctagtaatgaactagtccgtaacttgaaagtatttcgatttcttggctttatatatcttgtggaaaggacgactgcgaaggaataaaggctttgcc

SEQ ID NO: 1113 - DNA, 1238 bp, Homo sapiens
  source 1..1238: mol_type = genomic DNA
accgccaccatgagctccttcgacctgccggcgccctccccacctcgctgcagcccccagttccccagcatcggccaggagccccccgagatgaacctctactatgagaacttcttccacccacagggcgtgcccagccctcagcggccctccttcgaggggggcggcgagtatggggccacccccaacccctacctctggttcaacgggcccaccatgaccccgccaccctacctgcccggccccaacgccagccccttcctgccccaggcctatggagtgcagaggccgctgctgcccagcgtgtcggggcttggggggagcgacctgggctggctgcccatcccctcgcaggaggagctgatgaagctggtgcggccaccctattcctactcggctctcatcgccatggccatccacggggcacccgacaagcgcctcactctcagccagatctaccagtacgtggccgacaacttccccttctacaacaagagcaaggccggctggcagaactccatccgccacaacctgtcgctcaacgactgcttcaagaaggtgccccgcgacgaggacgacccgggcaaagggaattactggaccctggaccccaactgtgagaaaatgttcgacaatggaaatttccgcaggaaaaggaagagaaaatcagatgtttcctctagcacagcctccttggccttagagaagacagagagcagtctcccggtggacagccccaagaccacggagcctcaggacatcttggatggagcctcaccagggggcaccaccagctccccagagaagcggccctcccctcccccatcaggcgccccttgccttaacagcttcctttcctctatgacagcctatgtgagcggggggagccccacgagccaccccttggtcacaccaggactgagccctgagcccagtgacaagacggggcagaactcactgaccttcaactccttctccccgctcaccaacctcagcaaccacagcggtgggggtgactgggcgaaccccatgcccaccaacatgctcagctatggaggatctgtgctcagccaattcagccctcacttctacaacagtgtcaacaccagtggtgtcctctaccccagggagggcaccgaggtctagtaatgaactagtccgtaacttgaaagtatttcgatttcttggctttatatatcttgtggaaaggacgattctacctaaagatgccctagcca

SEQ ID NO: 1114 - DNA, 1364 bp, Homo sapiens
  source 1..1364: mol_type = genomic DNA
accgccaccatggccctctactgcggcgacaacttcggagtgtattcgcagcccggcctgcccccgcccgccgccaccgccgccgccccgggcgcccccccggcagccagggcgccttacgggctggccgactacgccgcgccgccggccgccgccgccaacccctacctgtggctcaacgggcccggcgtgggaggcccgccctccgccgccgccgcagccgccgccgcgtacctgggcgctccgccgccgccgccgccccccggggccgcggccgggccctttctgcagccaccgcctgccgccggcaccttcggctgctctcagcggcccttcgcgcagcccgcgcccgccgcgcccgcctcgcccgccgcgcccgcggggcccggggagctgggctggctgtccatggccagccgcgaggacctgatgaagatggtgcggccgccctactcgtattcggcgctcatcgccatggccattcagagcgcgcccgagcgcaaactcactctcagccacatctaccagttcgtcgccgatagcttccccttctaccagcgcagcaaggccggctggcagaactccatccgccacaacctgtcgctcaacgactgcttcaagaaggtgccccgcgacgaggacgacccaggaaagggtaattattggactcttgatccgaactgcgagaaaatgtttgacaatgggaacttccgtcggaagcgaaagcgccgctctgaggccagcaatggctccacagtggctgctgggacatcaaagtccgaagaagggctctcctcaggattggggtctggagtgggtgggaagccagaagaagagagcccctccactctgctgaggccttcccactccccagagcctccggagggcaccaagagtactgcctcatctcctggaggacccatgctcacctccaccccttgtctcaacactttcttcagcagcctcagctccttgagtgtcagcagcagtgtgagtacccagcgggctctccctggcagccgccacctagggatccagggggcccagctgccctccagcggcgtgttctccccgacctccatctcagaggcctcagcagacaccttgcaactgagcaatagcaccagcaatagcaccggccagagatcttcctattacagccctttccctgccagcaccagcggggggcaaagcagccccttcagcagccctttccacaactttagcatggtgaacagcctcatctacccccgagagggctccgaggtgtagtaatgaactagtccgtaacttgaaagtatttcgatttcttggctttatatatcttgtggaaaggacgatgttcaaggagcgcccacaggaaa

SEQ ID NO: 1115 - DNA, 1058 bp, Homo sapiens
  source 1..1058: mol_type = genomic DNA
accgccaccatggccacctactgcgacgacctgggcccctcctcggccccgcccggccaggcccaggccaccgcgcaccccccgggctatgagccaggggatctgggcgcggtgggcgggggccccctcctgtgggtgaacgcgccagcgctcagccccaagtcctacgcttcgggtcccgggcctgcgccgccctacgcggccccgagctacggggctcccggcccgctcctcggcgccccgggcggcctggcgggcgccgacctcgcctggctgagcctctccggccagcaggagctgctgaggctggtgcggccgccctactcctactcggcgctcatcgccatggccatccagagcgcgccgctgcggaagctgacgctcagccagatctaccagtacgtggctggtaacttccctttctacaagcgcagcaaggcgggctggcagaactccatccgccacaacctgtcgctcaacgactgcttcaagaaggtgccccgcgacgaggacgacccaggtaaaggcaattactggaccctggaccccaactgcgagaagatgtttgacaacgggaacttccgaaggaagaggaagaggagagctgaagccagcgcggccgtgcgctcgggagccaggagcgtgggaggggccgaggcgccagcgctggagcccccgagcgcggcttgcctggacctgcaggcctcgccctctccatccgcacccgaggccgccacctgcttctccggtttcgcttctgctatgagcgctctggctggcggccttggcaccttccccgggggcctggcgggcgacttttctttcgggaggcggccaccgacagtcgccacccacgctccccagacccttaacccctcccctggcttcgcccctggccaccagaccgcggccgccggcttccgcctcagtcacctcctctacagccgggaagggaccgaagtttagtaatgaactagtccgtaacttgaaagtatttcgatttcttggctttatatatcttgtggaaaggacgattcagcgggactctccggcagcta

SEQ ID NO: 1116 - DNA, 1475 bp, Homo sapiens
  source 1..1475: mol_type = genomic DNA
accgccaccatgtacgagagtgtagaagtggggggtcccacccctaatcccttcctagtggtggatttttataaccagaaccgggcctgtttgctcccagagaaggggctccccgccccgggtccgtactccaccccgctccggactccgctttggaatggctcaaaccactccattgagacccagagcagcagttctgaagagatagtgcccagccctccctcgccaccccctctaccccgcatctacaagccttgctttgtctgtcaggacaagtcctcaggctaccactatggggtcagcgcctgtgagggctgcaagggcttcttccgccgcagcatccagaagaacatggtgtacacgtgtcaccgggacaagaactgcatcatcaacaaggtgacccggaaccgctgccagtactgccgactgcagaagtgctttgaagtgggcatgtccaaggagtctgtgagaaacgaccgaaacaagaagaagaaggaggtgcccaagcccgagtgctctgagagctacacgctgacgccggaggtgggggagctcattgagaaggtgcgcaaagcgcaccaggaaaccttccctgccctctgccagctgggcaaatacactacgaacaacagctcagaacaacgtgtctctctggacattgacctctgggacaagttcagtgaactctccaccaagtgcatcattaagactgtggagttcgccaagcagctgcccggcttcaccaccctcaccatcgccgaccagatcaccctcctcaaggctgcctgcctggacatcctgatcctgcggatctgcacgcggtacacgcccgagcaggacaccatgaccttctcggacgggctgaccctgaaccggacccagatgcacaacgctggcttcggccccctcaccgacctggtctttgccttcgccaaccagctgctgcccctggagatggatgatgcggagacggggctgctcagcgccatctgcctcatctgcggagaccgccaggacctggagcagccggaccgggtggacatgctgcaggagccgctgctggaggcgctaaaggtctacgtgcggaagcggaggcccagccgcccccacatgttccccaagatgctaatgaagattactgacctgcgaagcatcagcgccaagggggctgagcgggtgatcacgctgaagatggagatcccgggctccatgccgcctctcatccaggaaatgttggagaactcagagggcctggacactctgagcggacagccggggggtggggggcgggacgggggtggcctggcccccccgccaggcagctgtagccccagcctcagccccagctccaacagaagcagcccggccacccactccccgtagtaatgaactagtccgtaacttgaaagtatttcgatttcttggctttatatatcttgtggaaaggacgaagtgctggccatggttgccctgta

SEQ ID NO: 1117 - DNA, 1538 bp, Homo sapiens
  source 1..1538: mol_type = genomic DNA
accgccaccatgatgtcacagacaatgacacaagccggtgtctcattccgacacagcgtccgagctgcacaatgtcacacccgggtgccaaacacttggccccgcgcgacccggccctacgcctcctgccgccgctctccgcgtctccgggggaggtggcccggttcggccgggcagggggctggcgggcgagccccgcgggcgggctggcgagcgggtgatgtcacgggcagcgccattgagacccagagcagcagttctgaagagatagtgcccagccctccctcgccaccccctctaccccgcatctacaagccttgctttgtctgtcaggacaagtcctcaggctaccactatggggtcagcgcctgtgagggctgcaagggcttcttccgccgcagcatccagaagaacatggtgtacacgtgtcaccgggacaagaactgcatcatcaacaaggtgacccggaaccgctgccagtactgccgactgcagaagtgctttgaagtgggcatgtccaaggagtctgtgagaaacgaccgaaacaagaagaagaaggaggtgcccaagcccgagtgctctgagagctacacgctgacgccggaggtgggggagctcattgagaaggtgcgcaaagcgcaccaggaaaccttccctgccctctgccagctgggcaaatacactacgaacaacagctcagaacaacgtgtctctctggacattgacctctgggacaagttcagtgaactctccaccaagtgcatcattaagactgtggagttcgccaagcagctgcccggcttcaccaccctcaccatcgccgaccagatcaccctcctcaaggctgcctgcctggacatcctgatcctgcggatctgcacgcggtacacgcccgagcaggacaccatgaccttctcggacgggctgaccctgaaccggacccagatgcacaacgctggcttcggccccctcaccgacctggtctttgccttcgccaaccagctgctgcccctggagatggatgatgcggagacggggctgctcagcgccatctgcctcatctgcggagaccgccaggacctggagcagccggaccgggtggacatgctgcaggagccgctgctggaggcgctaaaggtctacgtgcggaagcggaggcccagccgcccccacatgttccccaagatgctaatgaagattactgacctgcgaagcatcagcgccaagggggctgagcgggtgatcacgctgaagatggagatcccgggctccatgccgcctctcatccaggaaatgttggagaactcagagggcctggacactctgagcggacagccggggggtggggggcgggacgggggtggcctggcccccccgccaggcagctgtagccccagcctcagccccagctccaacagaagcagcccggccacccactccccgtagtaatgaactagtccgtaacttgaaagtatttcgatttcttggctttatatatcttgtggaaaggacgaaattaggtcgtcacatgaggaaac

SEQ ID NO: 1118 - DNA, 1199 bp, Homo sapiens
  source 1..1199: mol_type = genomic DNA
accgccaccatggccagcaacagcagctcctgcccgacacctgggggcgggcacctcaatgggtacccggtgcctccctacgccttcttcttcccccctatgctgggtggactctccccgccaggcgctctgaccactctccagcaccagcttccagttagtggatatagcacaccatccccagccactgtgagaaacgaccgaaacaagaagaagaaggaggtgcccaagcccgagtgctctgagagctacacgctgacgccggaggtgggggagctcattgagaaggtgcgcaaagcgcaccaggaaaccttccctgccctctgccagctgggcaaatacactacgaacaacagctcagaacaacgtgtctctctggacattgacctctgggacaagttcagtgaactctccaccaagtgcatcattaagactgtggagttcgccaagcagctgcccggcttcaccaccctcaccatcgccgaccagatcaccctcctcaaggctgcctgcctggacatcctgatcctgcggatctgcacgcggtacacgcccgagcaggacaccatgaccttctcggacgggctgaccctgaaccggacccagatgcacaacgctggcttcggccccctcaccgacctggtctttgccttcgccaaccagctgctgcccctggagatggatgatgcggagacggggctgctcagcgccatctgcctcatctgcggagaccgccaggacctggagcagccggaccgggtggacatgctgcaggagccgctgctggaggcgctaaaggtctacgtgcggaagcggaggcccagccgcccccacatgttccccaagatgctaatgaagattactgacctgcgaagcatcagcgccaagggggctgagcgggtgatcacgctgaagatggagatcccgggctccatgccgcctctcatccaggaaatgttggagaactcagagggcctggacactctgagcggacagccggggggtggggggcgggacgggggtggcctggcccccccgccaggcagctgtagccccagcctcagccccagctccaacagaagcagcccggccacccactccccgtagtaatgaactagtccgtaacttgaaagtatttcgatttcttggctttatatatcttgtggaaaggacgagataaggttgccgctaacaattaa

SEQ ID NO: 1119 - DNA, 1112 bp, Homo sapiens
  source 1..1112: mol_type = genomic DNA
accgccaccatgatttacacttgtcaccgagataagaactgtgttattaataaagtcaccaggaatcgatgccaatactgtcgactccagaagtgctttgaagtgggaatgtccaaagaatctgtcaggaatgacaggaacaagaaaaagaaggagacttcgaagcaagaatgcacagagagctatgaaatgacagctgagttggacgatctcacagagaagatccgaaaagctcaccaggaaactttcccttcactctgccagctgggtaaatacaccacgaattccagtgctgaccatcgagtccgactggacctgggcctctgggacaaattcagtgaactggccaccaagtgcattattaagatcgtggagtttgctaaacgtctgcctggtttcactggcttgaccatcgcagaccaaattaccctgctgaaggccgcctgcctggacatcctgattcttagaatttgcaccaggtataccccagaacaagacaccatgactttctcagacggccttaccctaaatcgaactcagatgcacaatgctggatttggtcctctgactgaccttgtgttcacctttgccaaccagctcctgcctttggaaatggatgacacagaaacaggccttctcagtgccatctgcttaatctgtggagaccgccaggaccttgaggaaccgacaaaagtagataagctacaagaaccattgctggaagcactaaaaatttatatcagaaaaagacgacccagcaagcctcacatgtttccaaagatcttaatgaaaatcacagatctccgtagcatcagtgctaaaggtgcagagcgtgtaattaccttgaaaatggaaattcctggatcaatgccacctctcattcaagaaatgctggagaattctgaaggacatgaacccttgaccccaagttcaagtgggaacacagcagagcacagtcctagcatctcacccagctcagtggaaaacagtggggtcagtcagtcaccactcgtgcaatagtaatgaactagtccgtaacttgaaagtatttcgatttcttggctttatatatcttgtggaaaggacgaatacataccgatctgttgtcccga

SEQ ID NO: 1120 - DNA, 1400 bp, Homo sapiens
  source 1..1400: mol_type = genomic DNA
accgccaccatgctagccctccccctccccccctgctggagcggggcgccgccgggggaggagggggaatcggctgcgggtccttggtgtttccagcacccagtttcccttcaagccgggtcgcgatgtacgactgtatggaaacgtttgccccgggtccgcgacggctgtacggggcggccgggcccggggccggcttgctgcgcagagccaccggcggctcctgtttcgccggacttgaatcttttgcctggccgcaacccgccagcctgcaatggcttctttcgccgaagcatccagaagaacatggtgtacacgtgtcaccgcgacaaaaactgtatcatcaacaaggtgaccaggaatcgctgccagtactgccggctacagaagtgcttcgaagtgggcatgtccaaggaagctgtgcgaaatgaccggaacaagaagaagaaagaggtgaaggaagaagggtcacctgacagctatgagctgagccctcagttagaagagctcatcaccaaggtcagcaaagcccatcaggagactttcccctcgctctgccagctgggcaagtataccacgaactccagtgcagaccaccgcgtgcagctggatctggggctgtgggacaagttcagtgagctggctaccaagtgcatcatcaagatcgtggagtttgccaagcggttgcctggctttacagggctcagcattgctgaccagatcactctgctcaaagctgcctgcctagatatcctgatgctgcgtatctgcacaaggtacaccccagagcaggacaccatgaccttctccgacgggctgaccctgaaccggacccagatgcacaatgccggcttcgggcccctcacagaccttgtctttgcctttgctgggcagctcctgcccctggagatggatgacaccgagacagggctgctcagcgccatctgcctcatctgcggagaccgcatggacctggaggagcccgaaaaagtggacaagctgcaggagccactgctggaagccctgaggctgtacgcccggcgccggcggcccagccagccctacatgttcccaaggatgctaatgaaaatcaccgacctccggggcatcagcactaagggagctgaaagggccattactctgaagatggagattccaggcccgatgcctcccttaatccgagagatgctggagaaccctgaaatgtttgaggatgactcctcgcagcctggtccccaccccaatgcctctagcgaggatgaggttcctgggggccagggcaaagggggcctgaagtccccagcctagtaatgaactagtccgtaacttgaaagtatttcgatttcttggctttatatatcttgtggaaaggacgagatctggcgcactattcgtctgaa

SEQ ID NO: 1121 - DNA, 1433 bp, Homo sapiens
  source 1..1433: mol_type = genomic DNA
accgccaccatgtacgactgtatggaaacgtttgccccgggtccgcgacggctgtacggggcggccgggcccggggccggcttgctgcgcagagccaccggcggctcctgtttcgccggacttgaatcttttgcctggccgcaacccgccagcctgcaatcggtggagacacagagcaccagctcagaggagatggtgcccagctcgccctcgccccctccgcctcctcgggtctacaagccatgcttcgtgtgcaatgacaagtcctctggctaccactatggggtcagctcttgtgaaggctgcaagggcttctttcgccgaagcatccagaagaacatggtgtacacgtgtcaccgcgacaaaaactgtatcatcaacaaggtgaccaggaatcgctgccagtactgccggctacagaagtgcttcgaagtgggcatgtccaaggaagctgtgcgaaatgaccggaacaagaagaagaaagaggtgaaggaagaagggtcacctgacagctatgagctgagccctcagttagaagagctcatcaccaaggtcagcaaagcccatcaggagactttcccctcgctctgccagctgggcaagtataccacgaactccagtgcagaccaccgcgtgcagctggatctggggctgtgggacaagttcagtgagctggctaccaagtgcatcatcaagatcgtggagtttgccaagcggttgcctggctttacagggctcagcattgctgaccagatcactctgctcaaagctgcctgcctagatatcctgatgctgcgtatctgcacaaggtacaccccagagcaggacaccatgaccttctccgacgggctgaccctgaaccggacccagatgcacaatgccggcttcgggcccctcacagaccttgtctttgcctttgctgggcagctcctgcccctggagatggatgacaccgagacagggctgctcagcgccatctgcctcatctgcggagaccgcatggacctggaggagcccgaaaaagtggacaagctgcaggagccactgctggaagccctgaggctgtacgcccggcgccggcggcccagccagccctacatgttcccaaggatgctaatgaaaatcaccgacctccggggcatcagcactaagggagctgaaagggccattactctgaagatggagattccaggcccgatgcctcccttaatccgagagatgctggagaaccctgaaatgtttgaggatgactcctcgcagcctggtccccaccccaatgcctctagcgaggatgaggttcctgggggccagggcaaagggggcctgaagtccccagcctagtaatgaactagtccgtaacttgaaagtatttcgatttcttggctttatatatcttgtggaaaggacgaccctttcaagtaggtgattcttcc

SEQ ID NO: 1122 - DNA, 1250 bp, Homo sapiens
  source 1..1250: mol_type = genomic DNA
accgccaccatggtgcccagctcgccctcgccccctccgcctcctcgggtctacaagccatgcttcgtgtgcaatgacaagtcctctggctaccactatggggtcagctcttgtgaaggctgcaagggcttctttcgccgaagcatccagaagaacatggtgtacacgtgtcaccgcgacaaaaactgtatcatcaacaaggtgaccaggaatcgctgccagtactgccggctacagaagtgcttcgaagtgggcatgtccaaggaagctgtgcgaaatgaccggaacaagaagaagaaagaggtgaaggaagaagggtcacctgacagctatgagctgagccctcagttagaagagctcatcaccaaggtcagcaaagcccatcaggagactttcccctcgctctgccagctgggcaagtataccacgaactccagtgcagaccaccgcgtgcagctggatctggggctgtgggacaagttcagtgagctggctaccaagtgcatcatcaagatcgtggagtttgccaagcggttgcctggctttacagggctcagcattgctgaccagatcactctgctcaaagctgcctgcctagatatcctgatgctgcgtatctgcacaaggtacaccccagagcaggacaccatgaccttctccgacgggctgaccctgaaccggacccagatgcacaatgccggcttcgggcccctcacagaccttgtctttgcctttgctgggcagctcctgcccctggagatggatgacaccgagacagggctgctcagcgccatctgcctcatctgcggagaccgcatggacctggaggagcccgaaaaagtggacaagctgcaggagccactgctggaagccctgaggctgtacgcccggcgccggcggcccagccagccctacatgttcccaaggatgctaatgaaaatcaccgacctccggggcatcagcactaagggagctgaaagggccattactctgaagatggagattccaggcccgatgcctcccttaatccgagagatgctggagaaccctgaaatgtttgaggatgactcctcgcagcctggtccccaccccaatgcctctagcgaggatgaggttcctgggggccagggcaaagggggcctgaagtccccagcctagtaatgaactagtccgtaacttgaaagtatttcgatttcttggctttatatatcttgtggaaaggacgactgcggccataatgtttcctatgg

SEQ ID NO: 1123 - DNA, 3467 bp, Homo sapiens
  source 1..3467: mol_type = genomic DNA
accgccaccatgagcttagaaaatgaagacaagcgagctcgcacccgatccaaggccctgcgaggacccccagagaccacagctgcagacctcagctgccccaccccaggatgcacaggctcagggcacgtccggggcaagtactccaggcaccgaagtttacagagctgccccctggccaagaagaggaagctggagggcgctgaggctgagcacctggtgtccaagaggaagtcacaccccctgaagctggctctggacgagggctatggtgtggacagcgacggcagtgaggacactgaggtgaaggacgcctctgtttcggatgaatcggaaggaactctggagggggccgaggctgagacgtcaggacaggacgagattcatcgccccgagacagctgaaggaaggagccccgtcaagtcccattttggatccaaccccatcggcagcgccactgcctcctccaagggcagctacagcagctaccagggaatcatcgcaacttctctcctgaacttgggtcaaattgctgaagagaccctggtggaagaggacttgggccaggcggccaagccaggtcctggcattgtgcacctgcttcaggaggctgcagagggagctgccagcgaggagggtgaaaagggcctcttcatccagccagaggatgccgaggaggtcgtcgaagtcaccaccgagcgctcccaggacctgtgtccccagtccctggaggatgcagccagtgaggagtccagcaagcagaaaggcatcctgagtcacgaagaggaggacgaggaggaggaggaggaggaagaggaggaggaggaggatgaagaagaggaagaggaagaggaggaggaagaggaagaggaggaggaggaagaggaagaggaggaggaagaggaagaggaagaggaggaggaggaggcagctcctgatgtgatctttcaggaagacacctctcacacctctgcccagaaggcccctgagctccggggcccagaatcacccagtcccaagcctgagtactctgttattgtggaggtccgctcggatgatgacaaggacgaggacacccactcccggaagtcaacagtcactgacgagtcggagatgcaggacatgatgacccggggaaacctgggcctcctggagcaggccatcgccctgaaggctgaacaggtgcgcacagtctgcgagccgggctgcccgcctgccgagcagagccagctgggcctgggagagccagggaaggcagcaaagcccctggacactgtgcggaagagttactacagtaaagatccttcaagagctgagaagcgtgagatcaagtgtccaacaccaggctgtgatggcactggccacgttaccgggttgtaccctcaccaccgcagcctttctggctgtccccacaaggataggatccccccagagatcttagccatgcatgagaacgtgctgaagtgccccactcctggctgcacaggccagggtcacgtgaacagcaaccgcaacacgcacagaagtttgtctgggtgtcccattgctgccgccgaaaaattagccaaatcccatgagaagcagcagccgcagacaggagatccttccaagagtagctccaattccgatcggatcctcaggcccatgtgcttcgtgaagcagctcgaggtccctccatatgggagctaccggcccaacgtggcccccgccacacccagggccaacttggccaaggagctggagaagttctccaaggtcacctttgactacgcaagtttcgatgctcaggtttttggcaaacgcatgcttgccccaaagattcagaccagcgaaacctcacctaaagcctttcaatgctttgactactcgcaggacgccgaggctgcacacatggctgccactgccatcctgaacctctccacgcgctgctgggagatgcctgagaacctcagcacgaagccacaggacctccccagcaagtctgtggatatcgaggtagacgaaaatggaaccctggacttgagcatgcacaaacaccgcaaacgagaaaatgctttccccagcagcagcagctgcagcagcagccccggtgtgaagtctcccgacgcctcccagcgccacagcagcaccagcgcccccagcagctccatgacctctccccagtccagccaggcctcccgccaggacgagtgggaccggcccctggactacaccaagcctagccgcctgagagaggaggaacctgaggagtcagagccagcagcccattcttttgcttcttctgaagcagatgaccaggaagtgtcggaagagaattttgaggagcggaagtatccgggggaagtcaccctgaccaactttaagctgaagtttctctccaaggacataaagaaggagctgctcacctgtcccacccctggctgtgacggcagcggccacatcaccgggaactacgcctcccaccgcagcctctctggttgccctcttgctgacaagagcctcagaaacctcatggctgcccactctgctgacctcaagtgccccacgcccggctgtgacggctctggccacatcacagggaactacgcttcacaccggagcttgtccggctgccctcgtgcaaagaaaagtggagtcaaggtggcacccaccaaggacgacaaggaggaccccgagctgatgaagtgcccagttccaggctgtgtggggctcggtcacatcagcgggaaatacgcctctcacaggagcgcatccggctgcccactggccgcccgcaggcagaaggaagggtccctcaatggctcgtcattctcctggaagtccctgaagaatgaaggaccgacctgccccaccccgggctgtgacggctctggccacgccaatgggagtttcctcacccaccggagtttgtcaggctgtcccagagcaacctttgctggaaagaagggaaaactgtcaggggatgaggtcctcagtccaaagttcaagactagcgacgtgttggagaatgatgaggagatcaagcagctgaaccaggagatccgagacctgaacgagtccaactcggagatggaggctgccatggtgcagctgcagtcccagatctcctccatggagaagaacctgaagaacatcgaggaggagaacaagctcattgaggagcagaatgaagccctgtttctggagctgtccggcctgagccaggccctcatccaaagtctcgccaatatccgccttccgcacatggagccaatatgcgaacagaatttcgatgcctatgtgagcaccctcaccgacatgtactccaaccaggacccggagaacaaggacctcctggagagcatcaagcaggctgtgaggggcatccaggtctagtaatgaactagtccgtaacttgaaagtatttcgatttcttggctttatatatcttgtggaaaggacgagtgctctggttaccgtacttatgt

SEQ ID NO: 1124 - DNA, 1595 bp, Homo sapiens
  source 1..1595: mol_type = genomic DNA
accgccaccctgcaggacccggcttccacgtgtgtcccggagccggcgtctcagcacacgctccgctccgggcctgggtgcctacagcagccagagcagcagggagtccgggacccgggcggcatctgggccaagttaggcgccgccgaggccagcgctgaacgtctccagggccggaggagccgcggggcgtccgggtctgagccgcagcaaatgggctccgacgtgcgggacctgaacgcgctgctgcccgccgtcccctccctgggtggcggcggcggctgtgccctgcctgtgagcggcgcggcgcagtgggcgccggtgctggactttgcgcccccgggcgcttcggcttacgggtcgttgggcggccccgcgccgccaccggctccgccgccacccccgccgccgccgcctcactccttcatcaaacaggagccgagctggggcggcgcggagccgcacgaggagcagtgcctgagcgccttcactgtccacttttccggccagttcactggcacagccggagcctgtcgctacgggcccttcggtcctcctccgcccagccaggcgtcatccggccaggccaggatgtttcctaacgcgccctacctgcccagctgcctcgagagccagcccgctattcgcaatcagggttacagcacggtcaccttcgacgggacgcccagctacggtcacacgccctcgcaccatgcggcgcagttccccaaccactcattcaagcatgaggatcccatgggccagcagggctcgctgggtgagcagcagtactcggtgccgcccccggtctatggctgccacacccccaccgacagctgcaccggcagccaggctttgctgctgaggacgccctacagcagtgacaatttataccaaatgacatcccagcttgaatgcatgacctggaatcagatgaacttaggagccaccttaaagggccacagcacagggtacgagagcgataaccacacaacgcccatcctctgcggagcccaatacagaatacacacgcacggtgtcttcagaggcattcaggatgtgcgacgtgtgcctggagtagccccgactcttgtacggtcggcatctgagaccagtgagaaacgccccttcatgtgtgcttacccaggctgcaataagagatattttaagctgtcccacttacagatgcacagcaggaagcacactggtgagaaaccataccagtgtgacttcaaggactgtgaacgaaggttttctcgttcagaccagctcaaaagacaccaaaggagacatacaggtgtgaaaccattccagtgtaaaacttgtcagcgaaagttctcccggtccgaccacctgaagacccacaccaggactcatacaggtgaaaagcccttcagctgtcggtggccaagttgtcagaaaaagtttgcccggtcagatgaattagtccgccatcacaacatgcatcagagaaacatgaccaaactccagctggcgctttagtaatgaactagtccgtaacttgaaagtatttcgatttcttggctttatatatcttgtggaaaggacgaggtacatttctgggtttgcacggt

SEQ ID NO: 1125 - DNA, 968 bp, Homo sapiens
  source 1..968: mol_type = genomic DNA
accgccaccatggagaagggttacagcacggtcaccttcgacgggacgcccagctacggtcacacgccctcgcaccatgcggcgcagttccccaaccactcattcaagcatgaggatcccatgggccagcagggctcgctgggtgagcagcagtactcggtgccgcccccggtctatggctgccacacccccaccgacagctgcaccggcagccaggctttgctgctgaggacgccctacagcagtgacaatttataccaaatgacatcccagcttgaatgcatgacctggaatcagatgaacttaggagccaccttaaagggccacagcacagggtacgagagcgataaccacacaacgcccatcctctgcggagcccaatacagaatacacacgcacggtgtcttcagaggcattcaggatgtgcgacgtgtgcctggagtagccccgactcttgtacggtcggcatctgagaccagtgagaaacgccccttcatgtgtgcttacccaggctgcaataagagatattttaagctgtcccacttacagatgcacagcaggaagcacactggtgagaaaccataccagtgtgacttcaaggactgtgaacgaaggttttctcgttcagaccagctcaaaagacaccaaaggagacatacaggtgtgaaaccattccagtgtaaaacttgtcagcgaaagttctcccggtccgaccacctgaagacccacaccaggactcatacaggtaaaacaagtgaaaagcccttcagctgtcggtggccaagttgtcagaaaaagtttgcccggtcagatgaattagtccgccatcacaacatgcatcagagaaacatgaccaaactccagctggcgctttagtaatgaactagtccgtaacttgaaagtatttcgatttcttggctttatatatcttgtggaaaggacgataggattgccgttgacatcagtac

SEQ ID NO: 1126 - DNA, 1655 bp, Homo sapiens
  source 1..1655: mol_type = genomic DNA
accgccaccctgcaggacccggcttccacgtgtgtcccggagccggcgtctcagcacacgctccgctccgggcctgggtgcctacagcagccagagcagcagggagtccgggacccgggcggcatctgggccaagttaggcgccgccgaggccagcgctgaacgtctccagggccggaggagccgcggggcgtccgggtctgagccgcagcaaatgggctccgacgtgcgggacctgaacgcgctgctgcccgccgtcccctccctgggtggcggcggcggctgtgccctgcctgtgagcggcgcggcgcagtgggcgccggtgctggactttgcgcccccgggcgcttcggcttacgggtcgttgggcggccccgcgccgccaccggctccgccgccacccccgccgccgccgcctcactccttcatcaaacaggagccgagctggggcggcgcggagccgcacgaggagcagtgcctgagcgccttcactgtccacttttccggccagttcactggcacagccggagcctgtcgctacgggcccttcggtcctcctccgcccagccaggcgtcatccggccaggccaggatgtttcctaacgcgccctacctgcccagctgcctcgagagccagcccgctattcgcaatcagggttacagcacggtcaccttcgacgggacgcccagctacggtcacacgccctcgcaccatgcggcgcagttccccaaccactcattcaagcatgaggatcccatgggccagcagggctcgctgggtgagcagcagtactcggtgccgcccccggtctatggctgccacacccccaccgacagctgcaccggcagccaggctttgctgctgaggacgccctacagcagtgacaatttataccaaatgacatcccagcttgaatgcatgacctggaatcagatgaacttaggagccaccttaaagggagttgctgctgggagctccagctcagtgaaatggacagaagggcagagcaaccacagcacagggtacgagagcgataaccacacaacgcccatcctctgcggagcccaatacagaatacacacgcacggtgtcttcagaggcattcaggatgtgcgacgtgtgcctggagtagccccgactcttgtacggtcggcatctgagaccagtgagaaacgccccttcatgtgtgcttacccaggctgcaataagagatattttaagctgtcccacttacagatgcacagcaggaagcacactggtgagaaaccataccagtgtgacttcaaggactgtgaacgaaggttttctcgttcagaccagctcaaaagacaccaaaggagacatacaggtgtgaaaccattccagtgtaaaacttgtcagcgaaagttctcccggtccgaccacctgaagacccacaccaggactcatacaggtaaaacaagtgaaaagcccttcagctgtcggtggccaagttgtcagaaaaagtttgcccggtcagatgaattagtccgccatcacaacatgcatcagagaaacatgaccaaactccagctggcgctttagtaatgaactagtccgtaacttgaaagtatttcgatttcttggctttatatatcttgtggaaaggacgatatagaaggtgcgtcaagatgcac

SEQ ID NO: 1127 - DNA, 1646 bp, Homo sapiens
  source 1..1646: mol_type = genomic DNA
accgccaccctgcaggacccggcttccacgtgtgtcccggagccggcgtctcagcacacgctccgctccgggcctgggtgcctacagcagccagagcagcagggagtccgggacccgggcggcatctgggccaagttaggcgccgccgaggccagcgctgaacgtctccagggccggaggagccgcggggcgtccgggtctgagccgcagcaaatgggctccgacgtgcgggacctgaacgcgctgctgcccgccgtcccctccctgggtggcggcggcggctgtgccctgcctgtgagcggcgcggcgcagtgggcgccggtgctggactttgcgcccccgggcgcttcggcttacgggtcgttgggcggccccgcgccgccaccggctccgccgccacccccgccgccgccgcctcactccttcatcaaacaggagccgagctggggcggcgcggagccgcacgaggagcagtgcctgagcgccttcactgtccacttttccggccagttcactggcacagccggagcctgtcgctacgggcccttcggtcctcctccgcccagccaggcgtcatccggccaggccaggatgtttcctaacgcgccctacctgcccagctgcctcgagagccagcccgctattcgcaatcagggttacagcacggtcaccttcgacgggacgcccagctacggtcacacgccctcgcaccatgcggcgcagttccccaaccactcattcaagcatgaggatcccatgggccagcagggctcgctgggtgagcagcagtactcggtgccgcccccggtctatggctgccacacccccaccgacagctgcaccggcagccaggctttgctgctgaggacgccctacagcagtgacaatttataccaaatgacatcccagcttgaatgcatgacctggaatcagatgaacttaggagccaccttaaagggagttgctgctgggagctccagctcagtgaaatggacagaagggcagagcaaccacagcacagggtacgagagcgataaccacacaacgcccatcctctgcggagcccaatacagaatacacacgcacggtgtcttcagaggcattcaggatgtgcgacgtgtgcctggagtagccccgactcttgtacggtcggcatctgagaccagtgagaaacgccccttcatgtgtgcttacccaggctgcaataagagatattttaagctgtcccacttacagatgcacagcaggaagcacactggtgagaaaccataccagtgtgacttcaaggactgtgaacgaaggttttctcgttcagaccagctcaaaagacaccaaaggagacatacaggtgtgaaaccattccagtgtaaaacttgtcagcgaaagttctcccggtccgaccacctgaagacccacaccaggactcatacaggtgaaaagcccttcagctgtcggtggccaagttgtcagaaaaagtttgcccggtcagatgaattagtccgccatcacaacatgcatcagagaaacatgaccaaactccagctggcgctttagtaatgaactagtccgtaacttgaaagtatttcgatttcttggctttatatatcttgtggaaaggacgaacgtcccaaacacggaattcgagt

SEQ ID NO: 1128 - DNA, 1010 bp, Homo sapiens
  source 1..1010: mol_type = genomic DNA
accgccaccatggagaagggttacagcacggtcaccttcgacgggacgcccagctacggtcacacgccctcgcaccatgcggcgcagttccccaaccactcattcaagcatgaggatcccatgggccagcagggctcgctgggtgagcagcagtactcggtgccgcccccggtctatggctgccacacccccaccgacagctgcaccggcagccaggctttgctgctgaggacgccctacagcagtgacaatttataccaaatgacatcccagcttgaatgcatgacctggaatcagatgaacttaggagccaccttaaagggagttgctgctgggagctccagctcagtgaaatggacagaagggcagagcaaccacagcacagggtacgagagcgataaccacacaacgcccatcctctgcggagcccaatacagaatacacacgcacggtgtcttcagaggcattcaggatgtgcgacgtgtgcctggagtagccccgactcttgtacggtcggcatctgagaccagtgagaaacgccccttcatgtgtgcttacccaggctgcaataagagatattttaagctgtcccacttacagatgcacagcaggaagcacactggtgagaaaccataccagtgtgacttcaaggactgtgaacgaaggttttctcgttcagaccagctcaaaagacaccaaaggagacatacaggtgtgaaaccattccagtgtaaaacttgtcagcgaaagttctcccggtccgaccacctgaagacccacaccaggactcatacaggtgaaaagcccttcagctgtcggtggccaagttgtcagaaaaagtttgcccggtcagatgaattagtccgccatcacaacatgcatcagagaaacatgaccaaactccagctggcgctttagtaatgaactagtccgtaacttgaaagtatttcgatttcttggctttatatatcttgtggaaaggacgatcaccgtcaagtagtcagtagatg

SEQ ID NO: 1129 - DNA, 1814 bp, Homo sapiens
  source 1..1814: mol_type = genomic DNA
accgccaccatgcaccagccgcctgagtccaccgccgcggccgccgccgctgcagacattagcgctaggaagatggcgcacccggcaatgttccctcgaaggggcagcggtagtggcagcgcctctgctctcaatgcagcaggtaccggcgtcggtagtaatgccacatcttccgaggattttccgcctccgtcgctgcttcagccgccgccccctgcagcatcttctacgtcgggaccacagcctccgcctccacaaagcctgaacctcctttcgcaggctcagctgcaggcacagcctcttgcgccaggcggaactcaaatgaaaaagaaaagtggcttccagataactagcgttactcctgctcagatctccgctagtatcagctctaacaacagtatagcagaggacactgagagctatgatgatctggatgaatctcacacggaagatctctcttcttcggagatccttgatgtgtcactttccagggctactgacttaggggagcccgaacgcagctcctcagaagagaccctaaataacttccaggaagccgagacacctggggcagtctctcccaaccagccccaccttcctcagcctcatttgcctcaccttccacaacagaatgttgtgatcaatgggaatgctcatccacaccacctccatcaccaccatcagattcatcatgggcaccacctccaacatggtcaccaccatccatctcatgttgctgtggccagtgcatccattactggtgggccaccctcaagcccagtatctagaaaactctctacaactggaagctctgacagtatcacaccagttgcaccaacttctgctgtatcatccagtggttcacctgcatctgtaatgactaatatgcgtgctccaagtactacaggtggaataggtataaattctgttactggcactagtacagtaaataatgttaacattactgctgtgggtagttttaatcctaatgtgacaagcagcatgcttggtaatgttaatataagtacaagcaatattcctagtgctgctggtgtgagtgttgggcctggagttaccagtggtgttaatgtgaatatcttgagtggcatgggcaatggtactatttcttcctctgctgctgttagcagtgttcctaatgcagctgcagggatgactgggggatcggtttcaagtcagcagcaacaaccaacagttaacacttcgaggttcagagttgtgaagttagattctagttctgagccctttaaaaaaggtagatggacttgcactgagttctatgaaaaagaaaatgctgtacctgctacagaaggtgtgctgataaataaagtggtggagactgtaaagcaaaatccgatagaagtgacttctgaaagggagagcactagtgggagttcagtgagcagtagtgtcagcacactgagtcactatacagagagtgtgggaagtggagagatgggagcccctactgtggtggtgcagcagcagcagcagcaacaacaacaacaacagcaacaaccagctctccaaggtgtgaccctccaacagatggattttggtagcactggtccacagagtattccagcagttagtataccacagagtatttctcagtcacagatctcacaagtacaattacagtctcaagaactgagctatcttaccatgaaggttgttttgcttattgtatatttgtgtatgtagtaatgaactagtccgtaacttgaaagtatttcgatttcttggctttatatatcttgtggaaaggacgaatggcgctccacgtctcaatgcac

SEQ ID NO: 1130 - DNA, 536 bp, Homo sapiens
  source 1..536: mol_type = genomic DNA
accgccaccatgaaatcccaatggtgtagaccagtggcgatggatctaggagtttaccaactgagacatttttcaatttctttcttgtcatccttgctggggactgaaaacgcttctgtgagacttgataatagctcctctggtgcaagtgtggtagctattgacaacaaaatcgagcaagctatggatctagtgaaaagccatttgatgtatgcggtcagagaagaagtggaggtcctcaaagagcaaatcaaagaactaatagagaaaaattcccagctggagcaggagaacaatctgctgaagacactggccagtcctgagcagcttgcccagtttcaggcccagctgcagactggctccccccctgccaccacccagccacagggcaccacacagccccccgcccagccagcatcgcagggctcaggaccaaccgcatagtaatgaactagtccgtaacttgaaagtatttcgatttcttggctttatatatcttgtggaaaggacgacggacaaatgacaaattcctacgc

SEQ ID NO: 1131 - DNA, 3323 bp, Homo sapiens
  source 1..3323: mol_type = genomic DNA
accgccaccatgcaccagccgcctgagtccaccgccgcggccgccgccgctgcagacattagcgctaggaagatggcgcacccggcaatgttccctcgaaggggcagcggtagtggcagcgcctctgctctcaatgcagcaggtaccggcgtcggtagtaatgccacatcttccgaggattttccgcctccgtcgctgcttcagccgccgccccctgcagcatcttctacgtcgggaccacagcctccgcctccacaaagcctgaacctcctttcgcaggctcagctgcaggcacagcctcttgcgccaggcggaactcaaatgaaaaagaaaagtggcttccagataactagcgttactcctgctcagatctccgctagtatcagctctaacaacagtatagcagaggacactgagagctatgatgatctggatgaatctcacacggaagatctctcttcttcggagatccttgatgtgtcactttccagggctactgacttaggggagcccgaacgcagctcctcagaagagaccctaaataacttccaggaagccgagacacctggggcagtctctcccaaccagccccaccttcctcagcctcatttgcctcaccttccacaacagaatgttgtgatcaatgggaatgctcatccacaccacctccatcaccaccatcagattcatcatgggcaccacctccaacatggtcaccaccatccatctcatgttgctgtggccagtgcatccattactggtgggccaccctcaagcccagtatctagaaaactctctacaactggaagctctgacagtatcacaccagttgcaccaacttctgctgtatcatccagtggttcacctgcatctgtaatgactaatatgcgtgctccaagtactacaggtggaataggtataaattctgttactggcactagtacagtaaataatgttaacattactgctgtgggtagttttaatcctaatgtgacaagcagcatgcttggtaatgttaatataagtacaagcaatattcctagtgctgctggtgtgagtgttgggcctggagttaccagtggtgttaatgtgaatatcttgagtggcatgggcaatggtactatttcttcctctgctgctgttagcagtgttcctaatgcagctgcagggatgactgggggatcggtttcaagtcagcagcaacaaccaacagttaacacttcgaggttcagagttgtgaagttagattctagttctgagccctttaaaaaaggtagatggacttgcactgagttctatgaaaaagaaaatgctgtacctgctacagaaggtgtgctgataaataaagtggtggagactgtaaagcaaaatccgatagaagtgacttctgaaagggagagcactagtgggagttcagtgagcagtagtgtcagcacactgagtcactatacagagagtgtgggaagtggagagatgggagcccctactgtggtggtgcagcagcagcagcagcaacaacaacaacaacagcaacaaccagctctccaaggtgtgaccctccaacagatggattttggtagcactggtccacagagtattccagcagttagtataccacagagtatttctcagtcacagatctcacaagtacaattacagtctcaagaactgagctatcagcaaaagcaaggtcttcagccagtacctctgcaagccactatgagtgctgcaactggtatccagccatcgcctgtaaatgtggttggtgtaacttcagctttaggtcagcagccttccatttccagtttggctcaaccccagctaccatattctcaggcggctcctccagtgcaaactccccttccaggggcaccaccaccccaacagttacagtatggacaacagcaaccaatggtttctacacagatggccccaggccatgtcaaatcagtgactcaaaatcctgcttcagagtatgtacaacagcagccaattcttcaaacagcaatgtcctccggacagcccagttctgcaggagtaggagcaggaacaacagtgattcctgtggctcagccacagggtatccagctgccagtgcagcccacagcagtcccagcacaacctgcaggggcatctgtccagcctgttggccaggctccggcagcagtgtctgctgtacctactggcagtcagattgcaaatattggtcagcaagcaaacatacctactgcagtgcagcagccctctacccaggttccaccttcagttattcagcagggtgctcctccatcttcgcaagtggttccacctgctcaaactgggattattcatcagggagttcaaactagtgctccaagccttcctcaacaattggttattgcatcccaaagttccttgttaactgtgcctccccagccacaaggagtagaaccagtagctcaaggaattgtttcacagcagttgcctgcagttagttctttgccctctgctagtagtatttctgttacaagtcaggttagttcaactggtccttctggaatgccttctgccccaacaaacttggttccaccacaaaatatagcacaaacccctgctacccaaaatggtaatttggttcaaagtgttagtcaacctcccttgatagcaactaatacaaatttgcctttggcacaacagataccactaagttctacccagttctccgcacaatcattagctcaggcaattggaagccaaattgaagatgccaggcgtgcagcggagccctccttagttggcttacctcagactatcagtggtgacagtgggggaatgtcagcagtttcagatgggagtagcagcagcctagcagcctctgcttctcttttcccgttgaaggtgctaccgctgacgacacccctggtggatggcgaggatgagagctcctctggtgcaagtgtggtagctattgacaacaaaatcgagcaagctatggatctagtgaaaagccatttgatgtatgcggtcagagaagaagtggaggtcctcaaagagcaaatcaaagaactaatagagaaaaattcccagctggagcaggagaacaatctgctgaagacactggccagtcctgagcagcttgcccagtttcaggcccagctgcagactggctccccccctgccaccacccagccacagggcaccacacagccccccgcccagccagcatcgcagggctcaggaccaaccgcatagtaatgaactagtccgtaacttgaaagtatttcgatttcttggctttatatatcttgtggaaaggacgagtagatcgcctggacggtcagtca

SEQ ID NO: 1132 - DNA, 362 bp, Homo sapiens
  source 1..362: mol_type = genomic DNA
accgccaccatggatctagtgaaaagccatttgatgtatgcggtcagagaagaagtggaggtcctcaaagagcaaatcaaagaactaatagagaaaaattcccagctggagcaggagaacaatctgctgaagacactggccagtcctgagcagcttgcccagtttcaggcccagctgcagactggctccccccctgccaccacccagccacagggcaccacacagccccccgcccagccagcatcgcagggctcaggaccaaccgcatagtaatgaactagtccgtaacttgaaagtatttcgatttcttggctttatatatcttgtggaaaggacgaatcattcggctccagtacctgtag

SEQ ID NO: 1133 - DNA, 506 bp, Homo sapiens
  source 1..506: mol_type = genomic DNA
accgccaccatgaacaccgaaatgtatcagacccccatggaggtggcggtctaccagctgcacaatttctccatctccttcttctcttctctgcttggaggggatgtggtttccgttaagctggacaacagtgcctccggagccagcgtggtggccatagacaacaagatcgaacaggccatggatctggtgaagaatcatctgatgtatgctgtgagagaggaggtggagatcctgaaggagcagatccgagagctggtggagaagaactcccagctagagcgtgagaacaccctgttgaagaccctggcaagcccagagcagctggagaagttccagtcctgtctgagccctgaagagccagctcccgaatccccacaagtgcccgaggcccctggtggttctgcggtgtagtaatgaactagtccgtaacttgaaagtatttcgatttcttggctttatatatcttgtggaaaggacgatgacacagcggaaggcagcattcc

SEQ ID NO: 1134 - DNA, 704 bp, Homo sapiens
  source 1..704: mol_type = genomic DNA
accgccaccatggcccagtccaagctcgattgccgctcacctgtcggcctcgactgctgcaactgctgcctggacctggcccatcggagtgggctccagcgaggcagcagcggggagaacaacaacccgggcagccctacagtgagcaactttcggcagctgcaggaaaagctggtctttgagaacctcaataccgacaagctcaacagcataatgcggcaggattcgctagagccggtgctgcgggacccctgctacctgatcaacgagggcatctgcaaccgcaacatcgaccagaccatgctctccatcctgctcttcttccacagtgcctccggagccagcgtggtggccatagacaacaagatcgaacaggccatggatctggtgaagaatcatctgatgtatgctgtgagagaggaggtggagatcctgaaggagcagatccgagagctggtggagaagaactcccagctagagcgtgagaacaccctgttgaagaccctggcaagcccagagcagctggagaagttccagtcctgtctgagccctgaagagccagctcccgaatccccacaagtgcccgaggcccctggtggttctgcggtgtagtaatgaactagtccgtaacttgaaagtatttcgatttcttggctttatatatcttgtggaaaggacgaatcatttgtgttgttacgttatta

SEQ ID NO: 1135 - DNA, 2444 bp, Homo sapiens
  source 1..2444: mol_type = genomic DNA
accgccaccatgtccaagatgccggccaagaagaagagctgcttccagatcaccagtgtcaccacggcccaggtggccactagcatcaccgaggacaccgagagcttggacgacccggacgagtcacgcacagaggacgtctcctccgagattttcgacgtctctcgggccacggattatggccctgaggaggtctgcgagcgcagctcttccgaagagacgcttaacaatgttggggatgcggagactcccgggaccgtctccccaaacctcctcctagatgggcagctggcagcggcggctgctgctcccgccaacggaggaggagtcgtttcggcccggagcgtgtctggggcgctcgccagtaccctggcggcggctgccacttcggcccccgcccccggagcacccggcggcccccagctcgcgggctcatccgccgggccagtgactgcagccccatctcagcctcccaccacatgtagttcccgttttcgcgtgatcaagctggaccacgggagcggagagccctatagacgcggccgatggacgtgtatggaatactatgagagggattcagacagcagcgtcctgactagatccggggattgcattagacacagcagtacttttgaccagactgcggagcgggacagcggcctgggcgccaccggagggtcggtggtggtagtagtggcctccatgcagggggcgcacgggcccgagtcgggaactgacagctccttgactgctgtgtcacagctacccccgtcggagaaaatgagccagcccactccggcccagccgcagagttttagcgttgggcagccacagccgccgccgccacccgtaggtggggctgtggctcaaagctcggctccgctgccgccgttcccgggagccgcgaccgggccgcagccaatgatggcagccgcgcagcccagccagccccagggagcggggcccgggggacagactctgccgccgacgaatgtaaccctggcgcagccggctatgtccctgcctccgcagccgggccctgcagtgggcgcccccgcggcgcagcagccccagcagttcgcgtatcctcagcctcagataccgcccggacatttgctgcccgtccagccctccggccagagtgagtacctgcagcagcacgtggccggcctgcagccgccaagccccgcgcagccctcgtccaccggcgccgcagcgagccccgccacggcggccacccttcccgtgggcaccggccagaatgcttcctcggtgggcgcgcagctcatgggcgcgtcttcccagcccagcgaagccatggccccccggacgggaccagcgcaaggcgggcaggtcgcgccttgtcagccgactggagtgcccccggctactgtgggaggcgtggtgcagccgtgcctcggtcctgccggggctgggcagccccagtccgtgcctccgccgcagatgggtggcagtggtccgctgtcagccgtacctggtggccctcacgccgtggtgcccggagttccaaacgtgcctgcagccgtgcccgctccaagcgtgcctagtgtgtctaccacttctgttactatgccaaatgtacccgcgcctctggcccagtcgcaacagctgagcagccatacgccagtcagcaggagcagcagcataatccagcatgttgggctgcccttagcgccaggcacacacagcgcaccaacaagtctaccacagtctgacctaagccagtttcaaactcagacccagcctttagtcgggcaagtcgacgatactagaagaaaatcagaacccctacctcaaccaccactttctctcattgctgaaaataagcctgttgtgaagccgcctgttgcagattccctggcaaacccccttcagttaacacctatgaacagtctggccacctctgtattcagcatagctattcctgttgatggtgatgaagacaggaatccttcaactgctttctaccaagcgttccatttgaacacgttaaaggaatcaaagagcctctgggatagtgcatctgggggaggtgttgtagccattgacaacaaaatagaacaagcaatggatctggtgaaaagccatttgatgtatgcagtaagagaagaagtggaagttttaaaggaacaaataaaagaattagttgaaagaaactctttacttgaacgagaaaatgcactgttaaaatctctttcaagcaatgatcaattatcccaactcccaacccaacaggccaatcctggtagcacttctcaacagcaagcagtgatagcacagcctccgcagccaacgcaacctccacagcagccgaatgtctcctcagcatagtaatgaactagtccgtaacttgaaagtatttcgatttcttggctttatatatcttgtggaaaggacgacctcctctccgaacctgcgctatg

SEQ ID NO: 1136 - DNA, 4553 bp, Homo sapiens
  source 1..4553: mol_type = genomic DNA
accgccaccatggcgccgctcctgggccgcaagcccttcccgctggtgaagccgttgcccggagaggagccgctcttcaccatcccgcacactcaggaggccttccgcacccgggaagagtatgaagcccgcttggaaaggtacagtgagcgcatttggacgtgcaagagtactggaagcagtcagctaacacacaaggaagcctgggaggaagaacaggaagttgctgagcttttgaaggaggagtttcctgcctggtatgagaagcttgttctggaaatggttcaccataacacagcctccttagagaagttagtagatactgcttggttggagatcatgaccaaatatgctgtgggagaagagtgtgacttcgaggttgggaaggagaaaatgctcaaggtgaagattgtgaagattcatcctttggagaaagtggatgaagaggccactgagaagaaatctgatggtgcctgtgattctccatcaagtgacaaagagaactccagtcagattgctcaggaccatcagaagaaggagacagttgtgaaagaggatgaaggaaggagagagagtattaatgacagagcacgtagatcgccacgaaaacttcctacttcattaaaaaaaggagaaaggaaatgggctcctccaaaatttctgcctcacaaatatgatgtgaaactacaaaatgaagataagatcatcagtaacgtgccagcagacagcttgattcgtacagagcgcccaccaaataaggagatagttcgatactttatacggcataatgcattacgagctggtactggtgaaaatgcaccttgggtcgtagaagatgaattggtgaagaaatactctctgcccagcaagttcagtgactttttacttgatccatacaagtatatgactctcaacccttctactaagaggaagaatactggatccccagacaggaagccctcaaagaaatccaagacagacaactcttctcttagttcaccactaaatcctaagttatggtgtcacgtacacttgaagaagtcattgagtggctcgccactcaaagtgaagaactcaaagaattccaaatctcctgaagaacatctagaagaaatgatgaagatgatgtcgcccaataagctgcacactaactttcacattcctaaaaaaggcccacctgccaagaaaccagggaagcacagtgacaagcctttgaaggcaaagggcagaagcaaaggcatcctgaatggacagaaatccacagggaattccaaatctcccaaaaaaggactgaagactcctaaaaccaaaatgaagcagatgactttgttggatatggccaaaggcacgcagaagatgacacgagccccacggaattctgggggtacacctaggacctctagtaaacctcataaacatctgcctcctgcagccctacacctcattgcatactacaaagaaaacaaagacagggaggacaagaggagcgccctgtcctgtgttatctccaaaacagctcgtcttctctctagtgaagatagagctcgtctcccagaagaattgcgaagtcttgttcaaaaacgctatgaacttctagagcacaaaaagaggtgggcttctatgtctgaagaacaacggaaagaatatttgaaaaagaaacgggaggagctgaaaaagaagttgaaggaaaaagccaaagaacgaagagagaaagaaatgcttgagagattagaaaaacagaagcggtatgaggaccaagagttaactggcaaaaaccttccagcattcagattggtggatacccctgaagggctgcccaacacgctgtttggggatgtggccatggtggtggaattcttgagctgttattctgggctacttttaccagatgctcagtatcctattactgctgtgtcccttatggaagccttgagtgcagataagggtggctttttataccttaacagggtgttggtcatcctcttacagaccctcctacaagatgagatagcagaagactatggtgaattgggaatgaagctgtcggaaatccccttgactctgcattctgtttcagagctggtgcggctctgcttgcgcagatctgatgttcaggaggaaagcgagggctcagacacagatgacaataaagattcagctgcatttgaggataatgaggtacaagatgagttcctagaaaagctggagacctctgaattttttgagctgacgtcagaggagaagctacagatcttgacagcactgtgccaccggatcctcatgacatactcagtgcaagaccacatggagaccagacagcagatgtctgcagagttgtggaaggaacggcttgctgtgttgaaggaagaaaatgataagaagagagcagagaaacagaaacggaaagaaatggaagccaaaaataaagaaaatggaaaagttgagaatgggttaggcaaaactgataggaaaaaagaaattgtgaagtttgagccccaagtagatacagaagctgaagacatgattagtgctgtgaagagcagaaggttgcttgccattcaagctaagaaggaacgggaaatccaggaaagagaaatgaaagtgaaactggaacgccaagctgaagaagaacgaatacggaagcacaaagcagctgctgagaaagctttccaggaagggattgccaaggccaaactagtcatgcgcaggactcctattggcacagatcgaaaccataatagatactggctcttctcagatgaagttccaggattattcattgaaaaaggctgggtacatgacagcattgactaccgattcaaccatcactgcaaagaccacacagtctctggtgatgaggattactgtcctcgcagtaagaaagcaaacttaggtaaaaatgcaagcatgaacacacaacatggaacagcaacagaagttgctgtagagacaaccacacccaaacaaggacagaacctatggtttttatgtgatagtcaaaaggagctggatgagttgctaaactgtcttcaccctcagggaataagagaaagtcaacttaaagagagactagagaagaggtaccaggacattattcactctattcatctagcacggaagccaaatttgggtctaaaatcttgtgatggcaaccaggagcttttaaacttccttcgtagtgatctcattgaagttgcaacaaggttacaaaaaggaggacttggatatgtggaagaaacatcagaatttgaagcccgggtcatttcattagagaaattgaaggattttggtgagtgtgtgattgcccttcaggccagtgtcataaagaaatttctccaaggcttcatggctcccaagcaaaagagaagaaaactccaaagtgaagattcagcaaaaactgaggaagtggatgaagagaagaaaatggtagaggaagcaaaggttgcatctgcactggagaaatggaagacagcaatccgggaagctcagactttctccaggatgcacgtgctgcttgggatgcttgatgcctgtatcaagtgggatatgtccgcagaaaatgctaggtgcaaagtttgtcgaaagaaaggtgaggatgacaaattgatcttgtgtgatgagtgtaataaagccttccacctgttttgtctgaggccggccctctatgaagtaccagatggtgagtggcagtgcccagcttgccagcccgctactgccaggcgcaactcccgtggcaggaactatactgaagagtctgcttctgaggacagtgaagatgatgagagtgatgaagaggaggaggaggaagaagaggaggaggaggaagaagattatgaggtggctggtttgcgattgagacctcgaaagaccatccggggcaagcacagcgtcatcccccctgcagcaaggtcaggccggcgcccgggtaagaagccacactctaccaggaggtctcagcccaaggcaccacctgtggatgatgctgaggtggatgagctggtgcttcagaccaagcggagctcccggaggcaaagcctggagctgcagaagtgtgaagagatcctccacaagatcgtgaagtaccgcttcagctggcccttcagggagcctgtgaccagagatgaggccgaggactactatgatgtgatcacgcaccccatggactttcagacagtgcagaacaaatgttcctgtgggagctaccgctctgtgcaggagtttcttactgacatgaagcaagtgtttaccaatgctgaggtttacaactgccgtggcagccatgtgctaagctgcatggtgaagacagaacagtgtctagtggctctgttgcataaacaccttcctggccacccatatgtccgcaggaagcgcaagaagtttcctgataggcttgctgaagatgaaggggacagtgagccagaggccgttggacagtccaggggacgaagacagaagaagtagtaatgaactagtccgtaacttgaaagtatttcgatttcttggctttatatatcttgtggaaaggacgaaagctaacaataggaaatggcatt

SEQ ID NO: 1137 - DNA, 908 bp, Homo sapiens
  source 1..908: mol_type = genomic DNA
accgccaccatgccgcgctccttcctggtcaagaagcatttcaacgcctccaaaaagccaaactacagcgaactggacacacatacagtgattatttccccgtatctctatgagagttactccatgcctgtcataccacaaccagagatcctcagctcaggagcatacagccccatcactgtgtggactaccgctgctccattccacgcccagctacccaatggcctctctcctctttccggatactcctcatctttggggcgagtgagtccccctcctccatctgacacctcctccaaggaccacagtggctcagaaagccccattagtgatgaagaggaaagactacagtccaagctttcagacccccatgccattgaagctgaaaagtttcagtgcaatttatgcaataagacctattcaactttttctgggctggccaaacataagcagctgcactgcgatgcccagtctagaaaatctttcagctgtaaatactgtgacaaggaatatgtgagcctgggcgccctgaagatgcatattcggacccacacattaccttgtgtttgcaagatctgcggcaaggcgttttccagaccctggttgcttcaaggacacattagaactcacacgggggagaagcctttttcttgccctcactgcaacagagcatttgcagacaggtcaaatctgagggctcatctgcagacccattctgatgtaaagaaataccagtgcaaaaactgctccaaaaccttctccagaatgtctctcctgcacaaacatgaggaatctggctgctgtgtagcacactagtaatgaactagtccgtaacttgaaagtatttcgatttcttggctttatatatcttgtggaaaggacgaacgcggtccgtagtcaggatccgc

SEQ ID NO: 1138 - DNA, 1592 bp, Homo sapiens
  source 1..1592: mol_type = genomic DNA
accgccaccatgaccacatttttcaccagcgtccccccctggattcaagatgcaaagcaggaggaggaagtgggctggaaactagttcccaggcctcggggccgggaggcggagagtcaagtgaagtgccaatgtgaaatttcgggaacacctttctcaaatggggagaagctgaggcctcacagcctcccgcaaccagagcagagaccatatagctgccctcagctgcactgtggcaaggcttttgcttccaaatacaagctgtataggcacatggccacccactcagcccagaaaccccaccagtgtatgtactgtgataagatgtttcaccgcaaggaccatctgcggaaccatctgcagacccatgatcctaacaaagaggccctccactgctctgagtgcggtaagaattacaatacgaagctgggctaccggcgccacctggccatgcatgctgccagcagcggtgacctcagctgcaaggtgtgcctgcagacctttgagagtacccaggccctgctagagcacctgaaggcccactcacgccgggtagcaggcggtgccaaggagaagaagcacccctgtgaccactgcgaccggcggttctatactcgtaaggatgtacggcggcacctagtggtgcacacaggccgtaaggacttcctgtgccagtactgtgcccagcggtttggccgtaaggaccacctgacgcgtcatgtcaagaagagccactcgcaggagctgctcaagatcaagacagagcccgtggacatgttaggcctactcagctgcagctccacagtcagtgtgaaggaagagctgagccctgtgctgtgcatggcctctcgggacgtaatggggaccaaggccttccctggcatgttgcccatgggcatgtatggtgcccacatccctaccatgcccagcacgggcgtgccacactccctggtgcacaacacgctgcccatgggtatgagctaccctctggaatcctcacctatctcttccccagctcagctccctccaaaataccagcttggatctacctcatacttgcccgacaaattgcccaaagtggaggtggatagttttctggcggagcttcctggaagcctgtctctctcatccgctgaaccccagcccgcctcacctcagccggcggcagctgcggccctcctagatgaagcactgcttgccaagagccccgccaacctctctgaggccctctgcgctgctaatgtggacttctcccacctactgggctttcttccactcaacctgcccccgtgtaacccacctggggccacaggaggcctggtcatgggctactcccaggctgaggcacagcccctgcttaccactttgcaagctcagcctcaagattccccaggagctgggggaccactgaactttgggcctctgcactccttgcctcctgtcttcacgtctggcctgagtagcaccaccctgcctcgtttccatcaagcattccagtagtaatgaactagtccgtaacttgaaagtatttcgatttcttggctttatatatcttgtggaaaggacgaatttgccacatagcaagacaaaga

SEQ ID NO: 1139 - DNA, 2027 bp, Homo sapiens
  source 1..2027: mol_type = genomic DNA
accgccaccatggccacagggctcctgagagccaaaaaagaggcgttcgtggcattcagggatgtggctgtgtacttcacccaggaggagtggaggttgttgagccctgctcagaggaccctgcacagggaggtgatgctggagacttataaccatctggtctcactggaaattccatcttctaaaccaaaactcattgctcagctggagcgaggggaagcgccctggagagaggagagaaaatgtccactggacctctgtccagcagaatcgaagccagaaattcaacttagtccctcctgccctctgattttctccagtcagcaagctctcagccaacatgtgtggctgagtcatctctctcagctgttttcaagtttatgggcaggaaatcctctccacctgggaaaacactatccagaagatcagaaacaacagcaggatccattctgctttagtggcaaagcagaatggattcaagagggagaagactccagactcctgtttgggagagtaagcaaaaatggcacttcaaaggcactttccagcccacctgaagaacaacagccagcacagtccaaggaagacaacacagtggtggatatagggtccagccctgaacggagggcagatctagaggaaacagacaaagtattgcatggtttagaagtctcaggatttggagaaatcaaatatgaagagtttgggccaggctttatcaaggagtcaaacctccttagcctccagaagacacaaactggggagacaccttacatgtacactgagtggggagacagctttggcagtatgtcagtcctcatcaaaaacccaaggacacactctgggggaaagccttatgtgtgcagggaatgtgggcgaggctttacgtggaagtcaaacctgatcacacatcagaggacacactcaggggagaaaccttatgtgtgcaaggattgtggacgaggctttacttggaagtcgaacctctttacacatcagcggacacactcagggctcaagccttatgtgtgcaaggaatgtgggcagagctttagcctgaagtcaaacctcattacccaccagagggcgcacactggggagaagccttatgtttgcagggaatgtgggcgtggctttcgccagcattcacacctggtcagacacaagaggacacattcaggagagaagccttacatttgcagggagtgtgagcaaggctttagccagaagtcacacctcatcagacacttaaggacacacacaggagagaagccttatgtatgcacagaatgtgggcgtcactttagctggaaatcaaacctcaaaacacaccagaggacacactcaggggttaaaccttatgtctgcctggagtgcgggcagtgctttagcctgaagtcaaaccttaacaaacaccagaggtcacacacgggggagaagccatttgtatgtacggagtgtgggcgaggctttacccggaaatcaaccctgagcacgcaccagaggacacactcaggggagaagccatttgtatgtgctgagtgtggacgaggctttaatgataagtccaccctcatttcacaccagaggacacattcaggggaaaagccttttatgtgcagggagtgtggcagaaggtttcggcagaagcctaacctgtttaggcacaagagggcacactcaggtgcctttgtgtgcagggagtgtgggcaaggcttttgtgctaagttaactctcattaaacaccagagagcacacgcaggggggaagcctcatgtgtgcagggagtgtgggcaaggctttagccggcagtcacacctcattagacaccagaggacacattcaggagagaagccttatatttgcagaaagtgtggacggggctttagtcggaagtccaaccttatcagacatcagaggacacactcaggatagtaatgaactagtccgtaacttgaaagtatttcgatttcttggctttatatatcttgtggaaaggacgatgtgcgagccggcctctgaggcaa

SEQ ID NO: 1140 - DNA, 1898 bp, Homo sapiens
  source 1..1898: mol_type = genomic DNA
accgccaccatgctggagacttataaccatctggtctcactggaaattccatcttctaaaccaaaactcattgctcagctggagcgaggggaagcgccctggagagaggagagaaaatgtccactggacctctgtccagaatcgaagccagaaattcaacttagtccctcctgccctctgattttctccagtcagcaagctctcagccaacatgtgtggctgagtcatctctctcagctgttttcaagtttatgggcaggaaatcctctccacctgggaaaacactatccagaagatcagaaacaacagcaggatccattctgctttagtggcaaagcagaatggattcaagagggagaagactccagactcctgtttgggagagtaagcaaaaatggcacttcaaaggcactttccagcccacctgaagaacaacagccagcacagtccaaggaagacaacacagtggtggatatagggtccagccctgaacggagggcagatctagaggaaacagacaaagtattgcatggtttagaagtctcaggatttggagaaatcaaatatgaagagtttgggccaggctttatcaaggagtcaaacctccttagcctccagaagacacaaactggggagacaccttacatgtacactgagtggggagacagctttggcagtatgtcagtcctcatcaaaaacccaaggacacactctgggggaaagccttatgtgtgcagggaatgtgggcgaggctttacgtggaagtcaaacctgatcacacatcagaggacacactcaggggagaaaccttatgtgtgcaaggattgtggacgaggctttacttggaagtcgaacctctttacacatcagcggacacactcagggctcaagccttatgtgtgcaaggaatgtgggcagagctttagcctgaagtcaaacctcattacccaccagagggcgcacactggggagaagccttatgtttgcagggaatgtgggcgtggctttcgccagcattcacacctggtcagacacaagaggacacattcaggagagaagccttacatttgcagggagtgtgagcaaggctttagccagaagtcacacctcatcagacacttaaggacacacacaggagagaagccttatgtatgcacagaatgtgggcgtcactttagctggaaatcaaacctcaaaacacaccagaggacacactcaggggttaaaccttatgtctgcctggagtgcgggcagtgctttagcctgaagtcaaaccttaacaaacaccagaggtcacacacgggggagaagccatttgtatgtacggagtgtgggcgaggctttacccggaaatcaaccctgagcacgcaccagaggacacactcaggggagaagccatttgtatgtgctgagtgtggacgaggctttaatgataagtccaccctcatttcacaccagaggacacattcaggggaaaagccttttatgtgcagggagtgtggcagaaggtttcggcagaagcctaacctgtttaggcacaagagggcacactcaggtgcctttgtgtgcagggagtgtgggcaaggcttttgtgctaagttaactctcattaaacaccagagagcacacgcaggggggaagcctcatgtgtgcagggagtgtgggcaaggctttagccggcagtcacacctcattagacaccagaggacacattcaggagagaagccttatatttgcagaaagtgtggacggggctttagtcggaagtccaaccttatcagacatcagaggacacactcaggatagtaatgaactagtccgtaacttgaaagtatttcgatttcttggctttatatatcttgtggaaaggacgaccctgaaggtggccttcgtatagg

SEQ ID NO: 1141 - DNA, 2081 bp, Homo sapiens
  source 1..2081: mol_type = genomic DNA
accgccaccatgagggtcaaccacacagtgtctacaatgctccctacatgcatggttcacagacaaaccatgagttgttccggggctggaggaataacggcgttcgtggcattcagggatgtggctgtgtacttcacccaggaggagtggaggttgttgagccctgctcagaggaccctgcacagggaggtgatgctggagacttataaccatctggtctcactggaaattccatcttctaaaccaaaactcattgctcagctggagcgaggggaagcgccctggagagaggagagaaaatgtccactggacctctgtccagaatcgaagccagaaattcaacttagtccctcctgccctctgattttctccagtcagcaagctctcagccaacatgtgtggctgagtcatctctctcagctgttttcaagtttatgggcaggaaatcctctccacctgggaaaacactatccagaagatcagaaacaacagcaggatccattctgctttagtggcaaagcagaatggattcaagagggagaagactccagactcctgtttgggagagtaagcaaaaatggcacttcaaaggcactttccagcccacctgaagaacaacagccagcacagtccaaggaagacaacacagtggtggatatagggtccagccctgaacggagggcagatctagaggaaacagacaaagtattgcatggtttagaagtctcaggatttggagaaatcaaatatgaagagtttgggccaggctttatcaaggagtcaaacctccttagcctccagaagacacaaactggggagacaccttacatgtacactgagtggggagacagctttggcagtatgtcagtcctcatcaaaaacccaaggacacactctgggggaaagccttatgtgtgcagggaatgtgggcgaggctttacgtggaagtcaaacctgatcacacatcagaggacacactcaggggagaaaccttatgtgtgcaaggattgtggacgaggctttacttggaagtcgaacctctttacacatcagcggacacactcagggctcaagccttatgtgtgcaaggaatgtgggcagagctttagcctgaagtcaaacctcattacccaccagagggcgcacactggggagaagccttatgtttgcagggaatgtgggcgtggctttcgccagcattcacacctggtcagacacaagaggacacattcaggagagaagccttacatttgcagggagtgtgagcaaggctttagccagaagtcacacctcatcagacacttaaggacacacacaggagagaagccttatgtatgcacagaatgtgggcgtcactttagctggaaatcaaacctcaaaacacaccagaggacacactcaggggttaaaccttatgtctgcctggagtgcgggcagtgctttagcctgaagtcaaaccttaacaaacaccagaggtcacacacgggggagaagccatttgtatgtacggagtgtgggcgaggctttacccggaaatcaaccctgagcacgcaccagaggacacactcaggggagaagccatttgtatgtgctgagtgtggacgaggctttaatgataagtccaccctcatttcacaccagaggacacattcaggggaaaagccttttatgtgcagggagtgtggcagaaggtttcggcagaagcctaacctgtttaggcacaagagggcacactcaggtgcctttgtgtgcagggagtgtgggcaaggcttttgtgctaagttaactctcattaaacaccagagagcacacgcaggggggaagcctcatgtgtgcagggagtgtgggcaaggctttagccggcagtcacacctcattagacaccagaggacacattcaggagagaagccttatatttgcagaaagtgtggacggggctttagtcggaagtccaaccttatcagacatcagaggacacactcaggatagtaatgaactagtccgtaacttgaaagtatttcgatttcttggctttatatatcttgtggaaaggacgatgaagacctcgcgcgctgcagtgt

SEQ ID NO: 1142 - DNA, 2024 bp, Homo sapiens
  source 1..2024: mol_type = genomic DNA
accgccaccatggccacagggctcctgagagccaaaaaagaggcgttcgtggcattcagggatgtggctgtgtacttcacccaggaggagtggaggttgttgagccctgctcagaggaccctgcacagggaggtgatgctggagacttataaccatctggtctcactggaaattccatcttctaaaccaaaactcattgctcagctggagcgaggggaagcgccctggagagaggagagaaaatgtccactggacctctgtccagaatcgaagccagaaattcaacttagtccctcctgccctctgattttctccagtcagcaagctctcagccaacatgtgtggctgagtcatctctctcagctgttttcaagtttatgggcaggaaatcctctccacctgggaaaacactatccagaagatcagaaacaacagcaggatccattctgctttagtggcaaagcagaatggattcaagagggagaagactccagactcctgtttgggagagtaagcaaaaatggcacttcaaaggcactttccagcccacctgaagaacaacagccagcacagtccaaggaagacaacacagtggtggatatagggtccagccctgaacggagggcagatctagaggaaacagacaaagtattgcatggtttagaagtctcaggatttggagaaatcaaatatgaagagtttgggccaggctttatcaaggagtcaaacctccttagcctccagaagacacaaactggggagacaccttacatgtacactgagtggggagacagctttggcagtatgtcagtcctcatcaaaaacccaaggacacactctgggggaaagccttatgtgtgcagggaatgtgggcgaggctttacgtggaagtcaaacctgatcacacatcagaggacacactcaggggagaaaccttatgtgtgcaaggattgtggacgaggctttacttggaagtcgaacctctttacacatcagcggacacactcagggctcaagccttatgtgtgcaaggaatgtgggcagagctttagcctgaagtcaaacctcattacccaccagagggcgcacactggggagaagccttatgtttgcagggaatgtgggcgtggctttcgccagcattcacacctggtcagacacaagaggacacattcaggagagaagccttacatttgcagggagtgtgagcaaggctttagccagaagtcacacctcatcagacacttaaggacacacacaggagagaagccttatgtatgcacagaatgtgggcgtcactttagctggaaatcaaacctcaaaacacaccagaggacacactcaggggttaaaccttatgtctgcctggagtgcgggcagtgctttagcctgaagtcaaaccttaacaaacaccagaggtcacacacgggggagaagccatttgtatgtacggagtgtgggcgaggctttacccggaaatcaaccctgagcacgcaccagaggacacactcaggggagaagccatttgtatgtgctgagtgtggacgaggctttaatgataagtccaccctcatttcacaccagaggacacattcaggggaaaagccttttatgtgcagggagtgtggcagaaggtttcggcagaagcctaacctgtttaggcacaagagggcacactcaggtgcctttgtgtgcagggagtgtgggcaaggcttttgtgctaagttaactctcattaaacaccagagagcacacgcaggggggaagcctcatgtgtgcagggagtgtgggcaaggctttagccggcagtcacacctcattagacaccagaggacacattcaggagagaagccttatatttgcagaaagtgtggacggggctttagtcggaagtccaaccttatcagacatcagaggacacactcaggatagtaatgaactagtccgtaacttgaaagtatttcgatttcttggctttatatatcttgtggaaaggacgaacacacctatgcggtgggacttac

SEQ ID NO: 1143 - DNA, 1262 bp, Homo sapiens
  source 1..1262: mol_type = genomic DNA
accgccaccatgtacactgagtggggagacagctttggcagtatgtcagtcctcatcaaaaacccaaggacacactctgggggaaagccttatgtgtgcagggaatgtgggcgaggctttacgtggaagtcaaacctgatcacacatcagaggacacactcaggggagaaaccttatgtgtgcaaggattgtggacgaggctttacttggaagtcgaacctctttacacatcagcggacacactcagggctcaagccttatgtgtgcaaggaatgtgggcagagctttagcctgaagtcaaacctcattacccaccagagggcgcacactggggagaagccttatgtttgcagggaatgtgggcgtggctttcgccagcattcacacctggtcagacacaagaggacacattcaggagagaagccttacatttgcagggagtgtgagcaaggctttagccagaagtcacacctcatcagacacttaaggacacacacaggagagaagccttatgtatgcacagaatgtgggcgtcactttagctggaaatcaaacctcaaaacacaccagaggacacactcaggggttaaaccttatgtctgcctggagtgcgggcagtgctttagcctgaagtcaaaccttaacaaacaccagaggtcacacacgggggagaagccatttgtatgtacggagtgtgggcgaggctttacccggaaatcaaccctgagcacgcaccagaggacacactcaggggagaagccatttgtatgtgctgagtgtggacgaggctttaatgataagtccaccctcatttcacaccagaggacacattcaggggaaaagccttttatgtgcagggagtgtggcagaaggtttcggcagaagcctaacctgtttaggcacaagagggcacactcaggtgcctttgtgtgcagggagtgtgggcaaggcttttgtgctaagttaactctcattaaacaccagagagcacacgcaggggggaagcctcatgtgtgcagggagtgtgggcaaggctttagccggcagtcacacctcattagacaccagaggacacattcaggagagaagccttatatttgcagaaagtgtggacggggctttagtcggaagtccaaccttatcagacatcagaggacacactcaggatagtaatgaactagtccgtaacttgaaagtatttcgatttcttggctttatatatcttgtggaaaggacgaactagccataatagtccacccggc

SEQ ID NO: 1144 - DNA, 1493 bp, Homo sapiens
  source 1..1493: mol_type = genomic DNA
accgccaccatggccacgttcccctgccagttatgtggcaagacgttcctcaccctggagaagttcacgattcacaattattcccactccagggagcggccgtacaagtgtgtgcagcctgactgtggcaaagcctttgtttccagatataaattgatgaggcatatggctacccattctccccagaaatctcaccagtgtgctcactgtgagaagacgttcaaccggaaagaccacctgaaaaaccacctccagacccacgaccccaacaaaatggcctttgggtgtgaggagtgtgggaagaagtacaacaccatgctgggctataagaggcacctggccctccatgcggccagcagtggggacctcacctgtggggtctgtgccctggagctagggagcaccgaggtgctactggaccacctcaaagcccatgcggaagagaagccccctagcggaaccaaggaaaagaagcaccagtgcgaccactgtgaaagatgcttctacacccggaaggatgtgcgacgccacctggtggtccacacaggatgcaaggacttcctgtgccagttctgtgcccagagatttgggcgcaaggatcacctcacccggcataccaagaagacccactcacaggagctgatgaaagagagcttgcagaccggagaccttctgagcaccttccacaccatctcgccttcattccaactgaaggctgctgccttgcctcctttccctttaggagcttctgcccagaacgggcttgcaagtagcttgccagctgaggtccatagcctcaccctcagtcccccagaacaagccgcccagcctatgcagccgctgccagagtccctggcctccctccacccctcggtatcccctggctctcctccgccaccccttcccaatcacaagtacaacaccacttctacctcatactccccacttgcaagcctgcccctcaaagcagatactaaaggtttttgcaatatcagtttgtttgaggacttgcctctgcaagagcctcagtcacctcaaaagctcaacccaggttttgatctggctaagggaaatgctggtaaagtaaacctgcccaaggagctgcctgcagatgctgtgaacctaacaatacctgcctctctggacctgtcccccctgttgggcttctggcagctgccccctcctgctacccaaaatacctttgggaatagcactcttgccctggggcctggggaatctttgccccacaggttaagctgtctggggcagcagcagcaagaacccccacttgccatgggcactgtgagcctgggccagctccccctgccccccatccctcatgtgttctcagctggcactggctctgccatcctgcctcatttccatcatgcattcagatagtaatgaactagtccgtaacttgaaagtatttcgatttcttggctttatatatcttgtggaaaggacgattccgttaatgtcaagtagaaggt

SEQ ID NO: 1145 - DNA, 1337 bp, Homo sapiens
  source 1..1337: mol_type = genomic DNA
accgccaccatggctacccattctccccagaaatctcaccagtgtgctcactgtgagaagacgttcaaccggaaagaccacctgaaaaaccacctccagacccacgaccccaacaaaatggcctttgggtgtgaggagtgtgggaagaagtacaacaccatgctgggctataagaggcacctggccctccatgcggccagcagtggggacctcacctgtggggtctgtgccctggagctagggagcaccgaggtgctactggaccacctcaaagcccatgcggaagagaagccccctagcggaaccaaggaaaagaagcaccagtgcgaccactgtgaaagatgcttctacacccggaaggatgtgcgacgccacctggtggtccacacaggatgcaaggacttcctgtgccagttctgtgcccagagatttgggcgcaaggatcacctcacccggcataccaagaagacccactcacaggagctgatgaaagagagcttgcagaccggagaccttctgagcaccttccacaccatctcgccttcattccaactgaaggctgctgccttgcctcctttccctttaggagcttctgcccagaacgggcttgcaagtagcttgccagctgaggtccatagcctcaccctcagtcccccagaacaagccgcccagcctatgcagccgctgccagagtccctggcctccctccacccctcggtatcccctggctctcctccgccaccccttcccaatcacaagtacaacaccacttctacctcatactccccacttgcaagcctgcccctcaaagcagatactaaaggtttttgcaatatcagtttgtttgaggacttgcctctgcaagagcctcagtcacctcaaaagctcaacccaggttttgatctggctaagggaaatgctggtaaagtaaacctgcccaaggagctgcctgcagatgctgtgaacctaacaatacctgcctctctggacctgtcccccctgttgggcttctggcagctgccccctcctgctacccaaaatacctttgggaatagcactcttgccctggggcctggggaatctttgccccacaggttaagctgtctggggcagcagcagcaagaacccccacttgccatgggcactgtgagcctgggccagctccccctgccccccatccctcatgtgttctcagctggcactggctctgccatcctgcctcatttccatcatgcattcagatagtaatgaactagtccgtaacttgaaagtatttcgatttcttggctttatatatcttgtggaaaggacgagccaccggcctagaccggcatcgg

SEQ ID NO: 1146 - DNA, 1517 bp, Homo sapiens
  source 1..1517: mol_type = genomic DNA
accgccaccatgctgcagcttttcattgggacggcggacgaccgcctgctgcgcccgcacgccttctaccaggtgcaccgcatcacagggaagaccgtgtccaccaccagccacgaggccatcctctccaacaccaaagtcctggagatcccactcctgccggagaacagcatgcgagccgtcattgactgtgccggaatcctgaaactcagaaactccgacattgaacttcggaaaggagagacggacatcgggaggaagaacacacgggtacggctggtgttccgcgttcacgtcccgcaacccagcggccgcacgctgtccctgcaggtggcctccaaccccatcgaatgctcccagcgctcagctcaggagctgcctctggtggagaagcagagcacggacagctatccggtcgtgggcgggaagaagatggtcctgtctggccacaacttcctgcaggactccaaggtcattttcgtggagaaagccccagatggccaccatgtctgggagatggaagcgaaaactgaccgggacctgtgcaagccgaattctctggtggttgagatcccgccatttcggaatcagaggataaccagccccgttcacgtcagtttctacgtctgcaacgggaagagaaagcgaagccagtaccagcgtttcacctaccttcccgccaacgttccaattataaaaacagaacccactgatgattatgagcctgctccaacctgtggaccggtgagccaggggttaagtcctctcccaagaccatactacagccagcagctcgcgatgccacccgaccccagctcctgcctcgtggccggcttcccgccctgtccgcagagaagcaccctgatgccagcggcccctggcgtgagccccaagctccacgacctttctcccgctgcctacaccaagggcgttgccagcccgggccactgtcacctcggactcccgcagccggccggagaggcccccgccgtccaggacgtgcccaggccagtggccacgcaccccggctcgcccgggcagccacccccggccctgctgccacagcaggtgagtgcgcctccaagcagtagctgcccccctggtctcgaacactcgctctgccccagcagcccctctcctccactcccgcctgccacccaagagccgacctgcctgcagccctgcagcccagcgtgcccgcccgccacgggccgcccgcagcacctgccgtccacggtccgcagggacgagtctccgactgccgggccacggctgctgccagaggtgcatgaggacggtagtcctaatttggcccctattcctgtaacggtcaagcgagagcctgaagagttggaccagttgtacctggatgacgtaaatgaaataatacgaaatgacctctccagcacgagcacccactcctagtaatgaactagtccgtaacttgaaagtatttcgatttcttggctttatatatcttgtggaaaggacgatctccatcactacacttagtagag

SEQ ID NO: 1147 - DNA, 2213 bp, Homo sapiens
  source 1..2213: mol_type = genomic DNA
accgccaccatgacggggctggaggaccaggagttcgacttcgagttcctcttcgagtttaaccagcgcgacgagggcgccgccgcggccgccccagaacactatggctatgcatcctccaacgtcagccccgccctgccgctccccacggcgcactccaccctgccggccccgtgccacaaccttcagacctccacaccgggcatcatcccgccggcggatcacccctcggggtacggagcagctttggacggtgggcccgcgggctacttcctctcctccggccacaccaggcctgatggggcccctgccctggagagtcctcgcatcgagataacctcgtgcttgggcctgtaccacaacaataaccagtttttccacgatgtggaggtggaagacgtcctccctagctccaaacggtccccctccacggccacgctgagtctgcccagcctggaggcctacagagacccctcgtgcctgagcccggccagcagcctgtcctcccggagctgcaactcagaggcctcctcctacgagtccaactactcgtacccgtacgcgtccccccagacgtcgccatggcagtctccctgcgtgtctcccaagaccacggaccccgaggagggctttccccgcgggctgggggcctgcacactgctgggttccccgcggcactccccctccacctcgccccgcgccagcgtcactgaggagagctggctgggtgcccgctcctccagacccgcgtccccttgcaacaagaggaagtacagcctcaacggccggcagccgccctactcaccccaccactcgcccacgccgtccccgcacggctccccgcgggtcagcgtgaccgacgactcgtggttgggcaacaccacccagtacaccagctcggccatcgtggccgccatcaacgcgctgaccaccgacagcagcctggacctgggagatggcgtccctgtcaagtcccgcaagaccaccctggagcagccgccctcagtggcgctcaaggtggagcccgtcggggaggacctgggcagccccccgcccccggccgacttcgcgcccgaagactactcctctttccagcacatcaggaagggcggcttctgcgaccagtacctggcggtgccgcagcacccctaccagtgggcgaagcccaagcccctgtcccctacgtcctacatgagcccgaccctgcccgccctggactggcagctgccgtcccactcaggcccgtatgagcttcggattgaggtgcagcccaagtcccaccaccgagcccactacgagacggagggcagccggggggccgtgaaggcgtcggccggaggacaccccatcgtgcagctgcatggctacttggagaatgagccgctgatgctgcagcttttcattgggacggcggacgaccgcctgctgcgcccgcacgccttctaccaggtgcaccgcatcacagggaagaccgtgtccaccaccagccacgaggccatcctctccaacaccaaagtcctggagatcccactcctgccggagaacagcatgcgagccgtcattgactgtgccggaatcctgaaactcagaaactccgacattgaacttcggaaaggagagacggacatcgggaggaagaacacacgggtacggctggtgttccgcgttcacgtcccgcaacccagcggccgcacgctgtccctgcaggtggcctccaaccccatcgaatgctcccagcgctcagctcaggagctgcctctggtggagaagcagagcacggacagctatccggtcgtgggcgggaagaagatggtcctgtctggccacaacttcctgcaggactccaaggtcattttcgtggagaaagccccagatggccaccatgtctgggagatggaagcgaaaactgaccgggacctgtgcaagccgaattctctggtggttgagatcccgccatttcggaatcagaggataaccagccccgttcacgtcagtttctacgtctgcaacgggaagagaaagcgaagccagtaccagcgtttcacctaccttcccgccaacggtaacgccatctttctaaccgtaagccgtgaacatgagcgcgtggggtgctttttctagtaatgaactagtccgtaacttgaaagtatttcgatttcttggctttatatatcttgtggaaaggacgaccaactcactaatcctcaacgatg

SEQ ID NO: 1148 - DNA, 2540 bp, Homo sapiens
  source 1..2540: mol_type = genomic DNA
accgccaccatgacggggctggaggaccaggagttcgacttcgagttcctcttcgagtttaaccagcgcgacgagggcgccgccgcggccgccccagaacactatggctatgcatcctccaacgtcagccccgccctgccgctccccacggcgcactccaccctgccggccccgtgccacaaccttcagacctccacaccgggcatcatcccgccggcggatcacccctcggggtacggagcagctttggacggtgggcccgcgggctacttcctctcctccggccacaccaggcctgatggggcccctgccctggagagtcctcgcatcgagataacctcgtgcttgggcctgtaccacaacaataaccagtttttccacgatgtggaggtggaagacgtcctccctagctccaaacggtccccctccacggccacgctgagtctgcccagcctggaggcctacagagacccctcgtgcctgagcccggccagcagcctgtcctcccggagctgcaactcagaggcctcctcctacgagtccaactactcgtacccgtacgcgtccccccagacgtcgccatggcagtctccctgcgtgtctcccaagaccacggaccccgaggagggctttccccgcgggctgggggcctgcacactgctgggttccccgcggcactccccctccacctcgccccgcgccagcgtcactgaggagagctggctgggtgcccgctcctccagacccgcgtccccttgcaacaagaggaagtacagcctcaacggccggcagccgccctactcaccccaccactcgcccacgccgtccccgcacggctccccgcgggtcagcgtgaccgacgactcgtggttgggcaacaccacccagtacaccagctcggccatcgtggccgccatcaacgcgctgaccaccgacagcagcctggacctgggagatggcgtccctgtcaagtcccgcaagaccaccctggagcagccgccctcagtggcgctcaaggtggagcccgtcggggaggacctgggcagccccccgcccccggccgacttcgcgcccgaagactactcctctttccagcacatcaggaagggcggcttctgcgaccagtacctggcggtgccgcagcacccctaccagtgggcgaagcccaagcccctgtcccctacgtcctacatgagcccgaccctgcccgccctggactggcagctgccgtcccactcaggcccgtatgagcttcggattgaggtgcagcccaagtcccaccaccgagcccactacgagacggagggcagccggggggccgtgaaggcgtcggccggaggacaccccatcgtgcagctgcatggctacttggagaatgagccgctgatgctgcagcttttcattgggacggcggacgaccgcctgctgcgcccgcacgccttctaccaggtgcaccgcatcacagggaagaccgtgtccaccaccagccacgaggccatcctctccaacaccaaagtcctggagatcccactcctgccggagaacagcatgcgagccgtcattgactgtgccggaatcctgaaactcagaaactccgacattgaacttcggaaaggagagacggacatcgggaggaagaacacacgggtacggctggtgttccgcgttcacgtcccgcaacccagcggccgcacgctgtccctgcaggtggcctccaaccccatcgaatgctcccagcgctcagctcaggagctgcctctggtggagaagcagagcacggacagctatccggtcgtgggcgggaagaagatggtcctgtctggccacaacttcctgcaggactccaaggtcattttcgtggagaaagccccagatggccaccatgtctgggagatggaagcgaaaactgaccgggacctgtgcaagccgaattctctggtggttgagatcccgccatttcggaatcagaggataaccagccccgttcacgtcagtttctacgtctgcaacgggaagagaaagcgaagccagtaccagcgtttcacctaccttcccgccaacgttccaattataaaaacagaacccactgatgattatgagcctgctccaacctgtggaccggtgagccaggggttaagtcctctcccaagaccatactacagccagcagctcgcgatgccacccgaccccagctcctgcctcgtggccggcttcccgccctgtccgcagagaagcaccctgatgccagcggcccctggcgtgagccccaagctccacgacctttctcccgctgcctacaccaagggcgttgccagcccgggccactgtcacctcggactcccgcagccggccggagaggcccccgccgtccaggacgtgcccaggccagtggccacgcaccccggctcgcccgggcagccacccccggccctgctgccacagcagtagtaatgaactagtccgtaacttgaaagtatttcgatttcttggctttatatatcttgtggaaaggacgagttagataaacggccgttcgctag

SEQ ID NO: 1149 - DNA, 2579 bp, Homo sapiens
  source 1..2579: mol_type = genomic DNA
accgccaccatgccaagcaccagctttccagtcccttccaagtttccacttggccctgcggctgcggtcttcgggagaggagaaactttggggcccgcgccgcgcgccggcggcaccatgaagtcagcggaggaagaacactatggctatgcatcctccaacgtcagccccgccctgccgctccccacggcgcactccaccctgccggccccgtgccacaaccttcagacctccacaccgggcatcatcccgccggcggatcacccctcggggtacggagcagctttggacggtgggcccgcgggctacttcctctcctccggccacaccaggcctgatggggcccctgccctggagagtcctcgcatcgagataacctcgtgcttgggcctgtaccacaacaataaccagtttttccacgatgtggaggtggaagacgtcctccctagctccaaacggtccccctccacggccacgctgagtctgcccagcctggaggcctacagagacccctcgtgcctgagcccggccagcagcctgtcctcccggagctgcaactcagaggcctcctcctacgagtccaactactcgtacccgtacgcgtccccccagacgtcgccatggcagtctccctgcgtgtctcccaagaccacggaccccgaggagggctttccccgcgggctgggggcctgcacactgctgggttccccgcggcactccccctccacctcgccccgcgccagcgtcactgaggagagctggctgggtgcccgctcctccagacccgcgtccccttgcaacaagaggaagtacagcctcaacggccggcagccgccctactcaccccaccactcgcccacgccgtccccgcacggctccccgcgggtcagcgtgaccgacgactcgtggttgggcaacaccacccagtacaccagctcggccatcgtggccgccatcaacgcgctgaccaccgacagcagcctggacctgggagatggcgtccctgtcaagtcccgcaagaccaccctggagcagccgccctcagtggcgctcaaggtggagcccgtcggggaggacctgggcagccccccgcccccggccgacttcgcgcccgaagactactcctctttccagcacatcaggaagggcggcttctgcgaccagtacctggcggtgccgcagcacccctaccagtgggcgaagcccaagcccctgtcccctacgtcctacatgagcccgaccctgcccgccctggactggcagctgccgtcccactcaggcccgtatgagcttcggattgaggtgcagcccaagtcccaccaccgagcccactacgagacggagggcagccggggggccgtgaaggcgtcggccggaggacaccccatcgtgcagctgcatggctacttggagaatgagccgctgatgctgcagcttttcattgggacggcggacgaccgcctgctgcgcccgcacgccttctaccaggtgcaccgcatcacagggaagaccgtgtccaccaccagccacgaggccatcctctccaacaccaaagtcctggagatcccactcctgccggagaacagcatgcgagccgtcattgactgtgccggaatcctgaaactcagaaactccgacattgaacttcggaaaggagagacggacatcgggaggaagaacacacgggtacggctggtgttccgcgttcacgtcccgcaacccagcggccgcacgctgtccctgcaggtggcctccaaccccatcgaatgctcccagcgctcagctcaggagctgcctctggtggagaagcagagcacggacagctatccggtcgtgggcgggaagaagatggtcctgtctggccacaacttcctgcaggactccaaggtcattttcgtggagaaagccccagatggccaccatgtctgggagatggaagcgaaaactgaccgggacctgtgcaagccgaattctctggtggttgagatcccgccatttcggaatcagaggataaccagccccgttcacgtcagtttctacgtctgcaacgggaagagaaagcgaagccagtaccagcgtttcacctaccttcccgccaacgttccaattataaaaacagaacccactgatgattatgagcctgctccaacctgtggaccggtgagccaggggttaagtcctctcccaagaccatactacagccagcagctcgcgatgccacccgaccccagctcctgcctcgtggccggcttcccgccctgtccgcagagaagcaccctgatgccagcggcccctggcgtgagccccaagctccacgacctttctcccgctgcctacaccaagggcgttgccagcccgggccactgtcacctcggactcccgcagccggccggagaggcccccgccgtccaggacgtgcccaggccagtggccacgcaccccggctcgcccgggcagccacccccggccctgctgccacagcagtagtaatgaactagtccgtaacttgaaagtatttcgatttcttggctttatatatcttgtggaaaggacgaacgcacaatatacaccgattacag

SEQ ID NO: 1150 - DNA, 2204 bp, Homo sapiens
  source 1..2204: mol_type = genomic DNA
accgccaccatgacggggctggaggaccaggagttcgacttcgagttcctcttcgagtttaaccagcgcgacgagggcgccgccgcggccgccccagaacactatggctatgcatcctccaacgtcagccccgccctgccgctccccacggcgcactccaccctgccggccccgtgccacaaccttcagacctccacaccgggcatcatcccgccggcggatcacccctcggggtacggagcagctttggacggtgggcccgcgggctacttcctctcctccggccacaccaggcctgatggggcccctgccctggagagtcctcgcatcgagataacctcgtgcttgggcctgtaccacaacaataaccagtttttccacgatgtggaggtggaagacgtcctccctagctccaaacggtccccctccacggccacgctgagtctgcccagcctggaggcctacagagacccctcgtgcctgagcccggccagcagcctgtcctcccggagctgcaactcagaggcctcctcctacgagtccaactactcgtacccgtacgcgtccccccagacgtcgccatggcagtctccctgcgtgtctcccaagaccacggaccccgaggagggctttccccgcgggctgggggcctgcacactgctgggttccccgcggcactccccctccacctcgccccgcgccagcgtcactgaggagagctggctgggtgcccgctcctccagacccgcgtccccttgcaacaagaggaagtacagcctcaacggccggcagccgccctactcaccccaccactcgcccacgccgtccccgcacggctccccgcgggtcagcgtgaccgacgactcgtggttgggcaacaccacccagtacaccagctcggccatcgtggccgccatcaacgcgctgaccaccgacagcagcctggacctgggagatggcgtccctgtcaagtcccgcaagaccaccctggagcagccgccctcagtggcgctcaaggtggagcccgtcggggaggacctgggcagccccccgcccccggccgacttcgcgcccgaagactactcctctttccagcacatcaggaagggcggcttctgcgaccagtacctggcggtgccgcagcacccctaccagtgggcgaagcccaagcccctgtcccctacgtcctacatgagcccgaccctgcccgccctggactggcagctgccgtcccactcaggcccgtatgagcttcggattgaggtgcagcccaagtcccaccaccgagcccactacgagacggagggcagccggggggccgtgaaggcgtcggccggaggacaccccatcgtgcagctgcatggctacttggagaatgagccgctgatgctgcagcttttcattgggacggcggacgaccgcctgctgcgcccgcacgccttctaccaggtgcaccgcatcacagggaagaccgtgtccaccaccagccacgaggccatcctctccaacaccaaagtcctggagatcccactcctgccggagaacagcatgcgagccgtcattgactgtgccggaatcctgaaactcagaaactccgacattgaacttcggaaaggagagacggacatcgggaggaagaacacacgggtacggctggtgttccgcgttcacgtcccgcaacccagcggccgcacgctgtccctgcaggtggcctccaaccccatcgaatgctcccagcgctcagctcaggagctgcctctggtggagaagcagagcacggacagctatccggtcgtgggcgggaagaagatggtcctgtctggccacaacttcctgcaggactccaaggtcattttcgtggagaaagccccagatggccaccatgtctgggagatggaagcgaaaactgaccgggacctgtgcaagccgaattctctggtggttgagatcccgccatttcggaatcagaggataaccagccccgttcacgtcagtttctacgtctgcaacgggaagagaaagcgaagccagtaccagcgtttcacctaccttcccgccaacgtaaatgaaataatacgaaatgacctctccagcacgagcacccactcctagtaatgaactagtccgtaacttgaaagtatttcgatttcttggctttatatatcttgtggaaaggacgaagcgatttgggacacactcaggag

SEQ ID NO: 1151 - DNA, 2243 bp, Homo sapiens
  source 1..2243: mol_type = genomic DNA
accgccaccatgccaagcaccagctttccagtcccttccaagtttccacttggccctgcggctgcggtcttcgggagaggagaaactttggggcccgcgccgcgcgccggcggcaccatgaagtcagcggaggaagaacactatggctatgcatcctccaacgtcagccccgccctgccgctccccacggcgcactccaccctgccggccccgtgccacaaccttcagacctccacaccgggcatcatcccgccggcggatcacccctcggggtacggagcagctttggacggtgggcccgcgggctacttcctctcctccggccacaccaggcctgatggggcccctgccctggagagtcctcgcatcgagataacctcgtgcttgggcctgtaccacaacaataaccagtttttccacgatgtggaggtggaagacgtcctccctagctccaaacggtccccctccacggccacgctgagtctgcccagcctggaggcctacagagacccctcgtgcctgagcccggccagcagcctgtcctcccggagctgcaactcagaggcctcctcctacgagtccaactactcgtacccgtacgcgtccccccagacgtcgccatggcagtctccctgcgtgtctcccaagaccacggaccccgaggagggctttccccgcgggctgggggcctgcacactgctgggttccccgcggcactccccctccacctcgccccgcgccagcgtcactgaggagagctggctgggtgcccgctcctccagacccgcgtccccttgcaacaagaggaagtacagcctcaacggccggcagccgccctactcaccccaccactcgcccacgccgtccccgcacggctccccgcgggtcagcgtgaccgacgactcgtggttgggcaacaccacccagtacaccagctcggccatcgtggccgccatcaacgcgctgaccaccgacagcagcctggacctgggagatggcgtccctgtcaagtcccgcaagaccaccctggagcagccgccctcagtggcgctcaaggtggagcccgtcggggaggacctgggcagccccccgcccccggccgacttcgcgcccgaagactactcctctttccagcacatcaggaagggcggcttctgcgaccagtacctggcggtgccgcagcacccctaccagtgggcgaagcccaagcccctgtcccctacgtcctacatgagcccgaccctgcccgccctggactggcagctgccgtcccactcaggcccgtatgagcttcggattgaggtgcagcccaagtcccaccaccgagcccactacgagacggagggcagccggggggccgtgaaggcgtcggccggaggacaccccatcgtgcagctgcatggctacttggagaatgagccgctgatgctgcagcttttcattgggacggcggacgaccgcctgctgcgcccgcacgccttctaccaggtgcaccgcatcacagggaagaccgtgtccaccaccagccacgaggccatcctctccaacaccaaagtcctggagatcccactcctgccggagaacagcatgcgagccgtcattgactgtgccggaatcctgaaactcagaaactccgacattgaacttcggaaaggagagacggacatcgggaggaagaacacacgggtacggctggtgttccgcgttcacgtcccgcaacccagcggccgcacgctgtccctgcaggtggcctccaaccccatcgaatgctcccagcgctcagctcaggagctgcctctggtggagaagcagagcacggacagctatccggtcgtgggcgggaagaagatggtcctgtctggccacaacttcctgcaggactccaaggtcattttcgtggagaaagccccagatggccaccatgtctgggagatggaagcgaaaactgaccgggacctgtgcaagccgaattctctggtggttgagatcccgccatttcggaatcagaggataaccagccccgttcacgtcagtttctacgtctgcaacgggaagagaaagcgaagccagtaccagcgtttcacctaccttcccgccaacgtaaatgaaataatacgaaatgacctctccagcacgagcacccactcctagtaatgaactagtccgtaacttgaaagtatttcgatttcttggctttatatatcttgtggaaaggacgacgatgtaacttggctaggaaatta

SEQ ID NO: 1152 - DNA, 2933 bp, Homo sapiens
  source 1..2933: mol_type = genomic DNA
accgccaccatgccaagcaccagctttccagtcccttccaagtttccacttggccctgcggctgcggtcttcgggagaggagaaactttggggcccgcgccgcgcgccggcggcaccatgaagtcagcggaggaagaacactatggctatgcatcctccaacgtcagccccgccctgccgctccccacggcgcactccaccctgccggccccgtgccacaaccttcagacctccacaccgggcatcatcccgccggcggatcacccctcggggtacggagcagctttggacggtgggcccgcgggctacttcctctcctccggccacaccaggcctgatggggcccctgccctggagagtcctcgcatcgagataacctcgtgcttgggcctgtaccacaacaataaccagtttttccacgatgtggaggtggaagacgtcctccctagctccaaacggtccccctccacggccacgctgagtctgcccagcctggaggcctacagagacccctcgtgcctgagcccggccagcagcctgtcctcccggagctgcaactcagaggcctcctcctacgagtccaactactcgtacccgtacgcgtccccccagacgtcgccatggcagtctccctgcgtgtctcccaagaccacggaccccgaggagggctttccccgcgggctgggggcctgcacactgctgggttccccgcggcactccccctccacctcgccccgcgccagcgtcactgaggagagctggctgggtgcccgctcctccagacccgcgtccccttgcaacaagaggaagtacagcctcaacggccggcagccgccctactcaccccaccactcgcccacgccgtccccgcacggctccccgcgggtcagcgtgaccgacgactcgtggttgggcaacaccacccagtacaccagctcggccatcgtggccgccatcaacgcgctgaccaccgacagcagcctggacctgggagatggcgtccctgtcaagtcccgcaagaccaccctggagcagccgccctcagtggcgctcaaggtggagcccgtcggggaggacctgggcagccccccgcccccggccgacttcgcgcccgaagactactcctctttccagcacatcaggaagggcggcttctgcgaccagtacctggcggtgccgcagcacccctaccagtgggcgaagcccaagcccctgtcccctacgtcctacatgagcccgaccctgcccgccctggactggcagctgccgtcccactcaggcccgtatgagcttcggattgaggtgcagcccaagtcccaccaccgagcccactacgagacggagggcagccggggggccgtgaaggcgtcggccggaggacaccccatcgtgcagctgcatggctacttggagaatgagccgctgatgctgcagcttttcattgggacggcggacgaccgcctgctgcgcccgcacgccttctaccaggtgcaccgcatcacagggaagaccgtgtccaccaccagccacgaggccatcctctccaacaccaaagtcctggagatcccactcctgccggagaacagcatgcgagccgtcattgactgtgccggaatcctgaaactcagaaactccgacattgaacttcggaaaggagagacggacatcgggaggaagaacacacgggtacggctggtgttccgcgttcacgtcccgcaacccagcggccgcacgctgtccctgcaggtggcctccaaccccatcgaatgctcccagcgctcagctcaggagctgcctctggtggagaagcagagcacggacagctatccggtcgtgggcgggaagaagatggtcctgtctggccacaacttcctgcaggactccaaggtcattttcgtggagaaagccccagatggccaccatgtctgggagatggaagcgaaaactgaccgggacctgtgcaagccgaattctctggtggttgagatcccgccatttcggaatcagaggataaccagccccgttcacgtcagtttctacgtctgcaacgggaagagaaagcgaagccagtaccagcgtttcacctaccttcccgccaacgttccaattataaaaacagaacccactgatgattatgagcctgctccaacctgtggaccggtgagccaggggttaagtcctctcccaagaccatactacagccagcagctcgcgatgccacccgaccccagctcctgcctcgtggccggcttcccgccctgtccgcagagaagcaccctgatgccagcggcccctggcgtgagccccaagctccacgacctttctcccgctgcctacaccaagggcgttgccagcccgggccactgtcacctcggactcccgcagccggccggagaggcccccgccgtccaggacgtgcccaggccagtggccacgcaccccggctcgcccgggcagccacccccggccctgctgccacagcaggtgagtgcgcctccaagcagtagctgcccccctggtctcgaacactcgctctgccccagcagcccctctcctccactcccgcctgccacccaagagccgacctgcctgcagccctgcagcccagcgtgcccgcccgccacgggccgcccgcagcacctgccgtccacggtccgcagggacgagtctccgactgccgggccacggctgctgccagaggtgcatgaggacggtagtcctaatttggcccctattcctgtaacggtcaagcgagagcctgaagagttggaccagttgtacctggatgacgtaaatgaaataatacgaaatgacctctccagcacgagcacccactcctagtaatgaactagtccgtaacttgaaagtatttcgatttcttggctttatatatcttgtggaaaggacgacgaaagaatagtgatccaccagga

SEQ ID NO: 1153 - DNA, 1163 bp, Homo sapiens
  source 1..1163: mol_type = genomic DNA
accgccaccatgctgcagcttttcattgggacggcggacgaccgcctgctgcgcccgcacgccttctaccaggtgcaccgcatcacagggaagaccgtgtccaccaccagccacgaggccatcctctccaacaccaaagtcctggagatcccactcctgccggagaacagcatgcgagccgtcattgactgtgccggaatcctgaaactcagaaactccgacattgaacttcggaaaggagagacggacatcgggaggaagaacacacgggtacggctggtgttccgcgttcacgtcccgcaacccagcggccgcacgctgtccctgcaggtggcctccaaccccatcgaatgctcccagcgctcagctcaggagctgcctctggtggagaagcagagcacggacagctatccggtcgtgggcgggaagaagatggtcctgtctggccacaacttcctgcaggactccaaggtcattttcgtggagaaagccccagatggccaccatgtctgggagatggaagcgaaaactgaccgggacctgtgcaagccgaattctctggtggttgagatcccgccatttcggaatcagaggataaccagccccgttcacgtcagtttctacgtctgcaacgggaagagaaagcgaagccagtaccagcgtttcacctaccttcccgccaacgttccaattataaaaacagaacccactgatgattatgagcctgctccaacctgtggaccggtgagccaggggttaagtcctctcccaagaccatactacagccagcagctcgcgatgccacccgaccccagctcctgcctcgtggccggcttcccgccctgtccgcagagaagcaccctgatgccagcggcccctggcgtgagccccaagctccacgacctttctcccgctgcctacaccaagggcgttgccagcccgggccactgtcacctcggactcccgcagccggccggagaggcccccgccgtccaggacgtgcccaggccagtggccacgcaccccggctcgcccgggcagccacccccggccctgctgccacagcagtagtaatgaactagtccgtaacttgaaagtatttcgatttcttggctttatatatcttgtggaaaggacgacaaggcgaactactcctatctacc

SEQ ID NO: 1154 - DNA, 2894 bp, Homo sapiens
  source 1..2894: mol_type = genomic DNA
accgccaccatgacggggctggaggaccaggagttcgacttcgagttcctcttcgagtttaaccagcgcgacgagggcgccgccgcggccgccccagaacactatggctatgcatcctccaacgtcagccccgccctgccgctccccacggcgcactccaccctgccggccccgtgccacaaccttcagacctccacaccgggcatcatcccgccggcggatcacccctcggggtacggagcagctttggacggtgggcccgcgggctacttcctctcctccggccacaccaggcctgatggggcccctgccctggagagtcctcgcatcgagataacctcgtgcttgggcctgtaccacaacaataaccagtttttccacgatgtggaggtggaagacgtcctccctagctccaaacggtccccctccacggccacgctgagtctgcccagcctggaggcctacagagacccctcgtgcctgagcccggccagcagcctgtcctcccggagctgcaactcagaggcctcctcctacgagtccaactactcgtacccgtacgcgtccccccagacgtcgccatggcagtctccctgcgtgtctcccaagaccacggaccccgaggagggctttccccgcgggctgggggcctgcacactgctgggttccccgcggcactccccctccacctcgccccgcgccagcgtcactgaggagagctggctgggtgcccgctcctccagacccgcgtccccttgcaacaagaggaagtacagcctcaacggccggcagccgccctactcaccccaccactcgcccacgccgtccccgcacggctccccgcgggtcagcgtgaccgacgactcgtggttgggcaacaccacccagtacaccagctcggccatcgtggccgccatcaacgcgctgaccaccgacagcagcctggacctgggagatggcgtccctgtcaagtcccgcaagaccaccctggagcagccgccctcagtggcgctcaaggtggagcccgtcggggaggacctgggcagccccccgcccccggccgacttcgcgcccgaagactactcctctttccagcacatcaggaagggcggcttctgcgaccagtacctggcggtgccgcagcacccctaccagtgggcgaagcccaagcccctgtcccctacgtcctacatgagcccgaccctgcccgccctggactggcagctgccgtcccactcaggcccgtatgagcttcggattgaggtgcagcccaagtcccaccaccgagcccactacgagacggagggcagccggggggccgtgaaggcgtcggccggaggacaccccatcgtgcagctgcatggctacttggagaatgagccgctgatgctgcagcttttcattgggacggcggacgaccgcctgctgcgcccgcacgccttctaccaggtgcaccgcatcacagggaagaccgtgtccaccaccagccacgaggccatcctctccaacaccaaagtcctggagatcccactcctgccggagaacagcatgcgagccgtcattgactgtgccggaatcctgaaactcagaaactccgacattgaacttcggaaaggagagacggacatcgggaggaagaacacacgggtacggctggtgttccgcgttcacgtcccgcaacccagcggccgcacgctgtccctgcaggtggcctccaaccccatcgaatgctcccagcgctcagctcaggagctgcctctggtggagaagcagagcacggacagctatccggtcgtgggcgggaagaagatggtcctgtctggccacaacttcctgcaggactccaaggtcattttcgtggagaaagccccagatggccaccatgtctgggagatggaagcgaaaactgaccgggacctgtgcaagccgaattctctggtggttgagatcccgccatttcggaatcagaggataaccagccccgttcacgtcagtttctacgtctgcaacgggaagagaaagcgaagccagtaccagcgtttcacctaccttcccgccaacgttccaattataaaaacagaacccactgatgattatgagcctgctccaacctgtggaccggtgagccaggggttaagtcctctcccaagaccatactacagccagcagctcgcgatgccacccgaccccagctcctgcctcgtggccggcttcccgccctgtccgcagagaagcaccctgatgccagcggcccctggcgtgagccccaagctccacgacctttctcccgctgcctacaccaagggcgttgccagcccgggccactgtcacctcggactcccgcagccggccggagaggcccccgccgtccaggacgtgcccaggccagtggccacgcaccccggctcgcccgggcagccacccccggccctgctgccacagcaggtgagtgcgcctccaagcagtagctgcccccctggtctcgaacactcgctctgccccagcagcccctctcctccactcccgcctgccacccaagagccgacctgcctgcagccctgcagcccagcgtgcccgcccgccacgggccgcccgcagcacctgccgtccacggtccgcagggacgagtctccgactgccgggccacggctgctgccagaggtgcatgaggacggtagtcctaatttggcccctattcctgtaacggtcaagcgagagcctgaagagttggaccagttgtacctggatgacgtaaatgaaataatacgaaatgacctctccagcacgagcacccactcctagtaatgaactagtccgtaacttgaaagtatttcgatttcttggctttatatatcttgtggaaaggacgaagagttctcttcttacttcttaca

SEQ ID NO: 1155 - DNA, 2210 bp, Homo sapiens
  source 1..2210: mol_type = genomic DNA
accgccaccatgtcacctcgaaccagcctcgccgaggacagctgcctgggccgccactcgcccgtgccccgtccggcctcccgctcctcatcgcctggtgccaagcggaggcattcgtgcgccgaggccttggttgccctgccgcccggagcctcaccccagcgctcccggagcccctcgccgcagccctcatctcacgtggcaccccaggaccacggctccccggctgggtacccccctgtggctggctctgccgtgatcatggatgccctgaacagcctcgccacggactcgccttgtgggatcccccccaagatgtggaagaccagccctgacccctcgccggtgtctgccgccccatccaaggccggcctgcctcgccacatctacccggccgtggagttcctggggccctgcgagcagggcgagaggagaaactcggctccagaatccatcctgctggttccgcccacttggcccaagccgctggtgcctgccattcccatctgcagcatcccagtgactgcatccctccctccacttgagtggccgctgtccagtcagtcaggctcttacgagctgcggatcgaggtgcagcccaagccacatcaccgggcccactatgagacagaaggcagccgaggggctgtcaaagctccaactggaggccaccctgtggttcagctccatggctacatggaaaacaagcctctgggacttcagatcttcattgggacagctgatgagcggatccttaagccgcacgccttctaccaggtgcaccgaatcacggggaaaactgtcaccaccaccagctatgagaagatagtgggcaacaccaaagtcctggagatacccttggagcccaaaaacaacatgagggcaaccatcgactgtgcggggatcttgaagcttagaaacgccgacattgagctgcggaaaggcgagacggacattggaagaaagaacacgcgggtgagactggttttccgagttcacatcccagagtccagtggcagaatcgtctctttacagactgcatctaaccccatcgagtgctcccagcgatctgctcacgagctgcccatggttgaaagacaagacacagacagctgcctggtctatggcggccagcaaatgatcctcacggggcagaactttacatccgagtccaaagttgtgtttactgagaagaccacagatggacagcaaatttgggagatggaagccacggtggataaggacaagagccagcccaacatgctttttgttgagatccctgaatatcggaacaagcatatccgcacacctgtaaaagtgaacttctacgtcatcaatgggaagagaaaacgaagtcagcctcagcactttacctaccacccagtcccagccatcaagacggagcccacggatgaatatgaccccactctgatctgcagccccacccatggaggcctggggagccagccttactacccccagcacccgatggtggccgagtccccctcctgcctcgtggccaccatggctccctgccagcagttccgcacggggctctcatcccctgacgcccgctaccagcaacagaacccagcggccgtactctaccagcggagcaagagcctgagccccagcctgctgggctatcagcagccggccctcatggccgccccgctgtcccttgcggacgctcaccgctctgtgctggtgcacgccggctcccagggccagagctcagccctgctccacccctctccgaccaaccagcaggcctcgcctgtgatccactactcacccaccaaccagcagctgcgctgcggaagccaccaggagttccagcacatcatgtactgcgagaatttcgcaccaggcaccaccagacctggcccgcccccggtcagtcaaggtcagaggctgagcccgggttcctaccccacagtcattcagcagcagaatgccacgagccaaagagccgccaaaaacggacccccggtcagtgaccaaaaggaagtattacctgcgggggtgaccattaaacaggagcagaacttggaccagacctacttggatgatgagctgatagacacacaccttagctggatacaaaacatattatagtaatgaactagtccgtaacttgaaagtatttcgatttcttggctttatatatcttgtggaaaggacgaagaaattatcaattgttatatacc

SEQ ID NO: 1156 - DNA, 2879 bp, Homo sapiens
  source 1..2879: mol_type = genomic DNA
accgccaccatgaacgcccccgagcggcagccccaacccgacggcggggacgccccaggccacgagcctgggggcagcccccaagacgagcttgacttctccatcctcttcgactatgagtatttgaatccgaacgaagaagagccgaatgcacataaggtcgccagcccaccctccggacccgcataccccgatgatgtcctggactatggcctcaagccatacagcccccttgctagtctctctggcgagccccccggccgattcggagagccggatagggtagggccgcagaagtttctgagcgcggccaagccagcaggggcctcgggcctgagccctcggatcgagatcactccgtcccacgaactgatccaggcagtggggcccctccgcatgagagacgcgggcctcctggtggagcagccgcccctggccggggtggccgccagcccgaggttcaccctgcccgtgcccggcttcgagggctaccgcgagccgctttgcttgagccccgctagcagcggctcctctgccagcttcatttctgacaccttctccccctacacctcgccctgcgtctcgcccaataacggcgggcccgacgacctgtgtccgcagtttcaaaacatccctgctcattattcccccagaacctcgccaataatgtcacctcgaaccagcctcgccgaggacagctgcctgggccgccactcgcccgtgccccgtccggcctcccgctcctcatcgcctggtgccaagcggaggcattcgtgcgccgaggccttggttgccctgccgcccggagcctcaccccagcgctcccggagcccctcgccgcagccctcatctcacgtggcaccccaggaccacggctccccggctgggtacccccctgtggctggctctgccgtgatcatggatgccctgaacagcctcgccacggactcgccttgtgggatcccccccaagatgtggaagaccagccctgacccctcgccggtgtctgccgccccatccaaggccggcctgcctcgccacatctacccggccgtggagttcctggggccctgcgagcagggcgagaggagaaactcggctccagaatccatcctgctggttccgcccacttggcccaagccgctggtgcctgccattcccatctgcagcatcccagtgactgcatccctccctccacttgagtggccgctgtccagtcagtcaggctcttacgagctgcggatcgaggtgcagcccaagccacatcaccgggcccactatgagacagaaggcagccgaggggctgtcaaagctccaactggaggccaccctgtggttcagctccatggctacatggaaaacaagcctctgggacttcagatcttcattgggacagctgatgagcggatccttaagccgcacgccttctaccaggtgcaccgaatcacggggaaaactgtcaccaccaccagctatgagaagatagtgggcaacaccaaagtcctggagatacccttggagcccaaaaacaacatgagggcaaccatcgactgtgcggggatcttgaagcttagaaacgccgacattgagctgcggaaaggcgagacggacattggaagaaagaacacgcgggtgagactggttttccgagttcacatcccagagtccagtggcagaatcgtctctttacagactgcatctaaccccatcgagtgctcccagcgatctgctcacgagctgcccatggttgaaagacaagacacagacagctgcctggtctatggcggccagcaaatgatcctcacggggcagaactttacatccgagtccaaagttgtgtttactgagaagaccacagatggacagcaaatttgggagatggaagccacggtggataaggacaagagccagcccaacatgctttttgttgagatccctgaatatcggaacaagcatatccgcacacctgtaaaagtgaacttctacgtcatcaatgggaagagaaaacgaagtcagcctcagcactttacctaccacccagtcccagccatcaagacggagcccacggatgaatatgaccccactctgatctgcagccccacccatggaggcctggggagccagccttactacccccagcacccgatggtggccgagtccccctcctgcctcgtggccaccatggctccctgccagcagttccgcacggggctctcatcccctgacgcccgctaccagcaacagaacccagcggccgtactctaccagcggagcaagagcctgagccccagcctgctgggctatcagcagccggccctcatggccgccccgctgtcccttgcggacgctcaccgctctgtgctggtgcacgccggctcccagggccagagctcagccctgctccacccctctccgaccaaccagcaggcctcgcctgtgatccactactcacccaccaaccagcagctgcgctgcggaagccaccaggagttccagcacatcatgtactgcgagaatttcgcaccaggcaccaccagacctggcccgcccccggtcagtcaaggtcagaggctgagcccgggttcctaccccacagtcattcagcagcagaatgccacgagccaaagagccgccaaaaacggacccccggtcagtgaccaaaaggaagtattacctgcgggggtgaccattaaacaggagcagaacttggaccagacctacttggatgatgttaatgaaattatcaggaaggagttttcaggacctcctgccagaaatcagacgtagtaatgaactagtccgtaacttgaaagtatttcgatttcttggctttatatatcttgtggaaaggacgatagatttggttatgcatttattga

SEQ ID NO: 1157 - DNA, 2819 bp, Homo sapiens
  source 1..2819: mol_type = genomic DNA
accgccaccatgcagagagaggctgcgttcagactggggcactgccatcccctccgcatcatggggtctgtggaccaagaagagccgaatgcacataaggtcgccagcccaccctccggacccgcataccccgatgatgtcctggactatggcctcaagccatacagcccccttgctagtctctctggcgagccccccggccgattcggagagccggatagggtagggccgcagaagtttctgagcgcggccaagccagcaggggcctcgggcctgagccctcggatcgagatcactccgtcccacgaactgatccaggcagtggggcccctccgcatgagagacgcgggcctcctggtggagcagccgcccctggccggggtggccgccagcccgaggttcaccctgcccgtgcccggcttcgagggctaccgcgagccgctttgcttgagccccgctagcagcggctcctctgccagcttcatttctgacaccttctccccctacacctcgccctgcgtctcgcccaataacggcgggcccgacgacctgtgtccgcagtttcaaaacatccctgctcattattcccccagaacctcgccaataatgtcacctcgaaccagcctcgccgaggacagctgcctgggccgccactcgcccgtgccccgtccggcctcccgctcctcatcgcctggtgccaagcggaggcattcgtgcgccgaggccttggttgccctgccgcccggagcctcaccccagcgctcccggagcccctcgccgcagccctcatctcacgtggcaccccaggaccacggctccccggctgggtacccccctgtggctggctctgccgtgatcatggatgccctgaacagcctcgccacggactcgccttgtgggatcccccccaagatgtggaagaccagccctgacccctcgccggtgtctgccgccccatccaaggccggcctgcctcgccacatctacccggccgtggagttcctggggccctgcgagcagggcgagaggagaaactcggctccagaatccatcctgctggttccgcccacttggcccaagccgctggtgcctgccattcccatctgcagcatcccagtgactgcatccctccctccacttgagtggccgctgtccagtcagtcaggctcttacgagctgcggatcgaggtgcagcccaagccacatcaccgggcccactatgagacagaaggcagccgaggggctgtcaaagctccaactggaggccaccctgtggttcagctccatggctacatggaaaacaagcctctgggacttcagatcttcattgggacagctgatgagcggatccttaagccgcacgccttctaccaggtgcaccgaatcacggggaaaactgtcaccaccaccagctatgagaagatagtgggcaacaccaaagtcctggagatacccttggagcccaaaaacaacatgagggcaaccatcgactgtgcggggatcttgaagcttagaaacgccgacattgagctgcggaaaggcgagacggacattggaagaaagaacacgcgggtgagactggttttccgagttcacatcccagagtccagtggcagaatcgtctctttacagactgcatctaaccccatcgagtgctcccagcgatctgctcacgagctgcccatggttgaaagacaagacacagacagctgcctggtctatggcggccagcaaatgatcctcacggggcagaactttacatccgagtccaaagttgtgtttactgagaagaccacagatggacagcaaatttgggagatggaagccacggtggataaggacaagagccagcccaacatgctttttgttgagatccctgaatatcggaacaagcatatccgcacacctgtaaaagtgaacttctacgtcatcaatgggaagagaaaacgaagtcagcctcagcactttacctaccacccagtcccagccatcaagacggagcccacggatgaatatgaccccactctgatctgcagccccacccatggaggcctggggagccagccttactacccccagcacccgatggtggccgagtccccctcctgcctcgtggccaccatggctccctgccagcagttccgcacggggctctcatcccctgacgcccgctaccagcaacagaacccagcggccgtactctaccagcggagcaagagcctgagccccagcctgctgggctatcagcagccggccctcatggccgccccgctgtcccttgcggacgctcaccgctctgtgctggtgcacgccggctcccagggccagagctcagccctgctccacccctctccgaccaaccagcaggcctcgcctgtgatccactactcacccaccaaccagcagctgcgctgcggaagccaccaggagttccagcacatcatgtactgcgagaatttcgcaccaggcaccaccagacctggcccgcccccggtcagtcaaggtcagaggctgagcccgggttcctaccccacagtcattcagcagcagaatgccacgagccaaagagccgccaaaaacggacccccggtcagtgaccaaaaggaagtattacctgcgggggtgaccattaaacaggagcagaacttggaccagacctacttggatgatgttaatgaaattatcaggaaggagttttcaggacctcctgccagaaatcagacgtagtaatgaactagtccgtaacttgaaagtatttcgatttcttggctttatatatcttgtggaaaggacgactacaggacaatcaaagcgtgtgc

SEQ ID NO: 1158 - DNA, 2807 bp, Homo sapiens
  source 1..2807: mol_type = genomic DNA
accgccaccatgcagagagaggctgcgttcagactggggcactgccatcccctccgcatcatggggtctgtggaccaagaagagccgaatgcacataaggtcgccagcccaccctccggacccgcataccccgatgatgtcctggactatggcctcaagccatacagcccccttgctagtctctctggcgagccccccggccgattcggagagccggatagggtagggccgcagaagtttctgagcgcggccaagccagcaggggcctcgggcctgagccctcggatcgagatcactccgtcccacgaactgatccaggcagtggggcccctccgcatgagagacgcgggcctcctggtggagcagccgcccctggccggggtggccgccagcccgaggttcaccctgcccgtgcccggcttcgagggctaccgcgagccgctttgcttgagccccgctagcagcggctcctctgccagcttcatttctgacaccttctccccctacacctcgccctgcgtctcgcccaataacggcgggcccgacgacctgtgtccgcagtttcaaaacatccctgctcattattcccccagaacctcgccaataatgtcacctcgaaccagcctcgccgaggacagctgcctgggccgccactcgcccgtgccccgtccggcctcccgctcctcatcgcctggtgccaagcggaggcattcgtgcgccgaggccttggttgccctgccgcccggagcctcaccccagcgctcccggagcccctcgccgcagccctcatctcacgtggcaccccaggaccacggctccccggctgggtacccccctgtggctggctctgccgtgatcatggatgccctgaacagcctcgccacggactcgccttgtgggatcccccccaagatgtggaagaccagccctgacccctcgccggtgtctgccgccccatccaaggccggcctgcctcgccacatctacccggccgtggagttcctggggccctgcgagcagggcgagaggagaaactcggctccagaatccatcctgctggttccgcccacttggcccaagccgctggtgcctgccattcccatctgcagcatcccagtgactgcatccctccctccacttgagtggccgctgtccagtcagtcaggctcttacgagctgcggatcgaggtgcagcccaagccacatcaccgggcccactatgagacagaaggcagccgaggggctgtcaaagctccaactggaggccaccctgtggttcagctccatggctacatggaaaacaagcctctgggacttcagatcttcattgggacagctgatgagcggatccttaagccgcacgccttctaccaggtgcaccgaatcacggggaaaactgtcaccaccaccagctatgagaagatagtgggcaacaccaaagtcctggagatacccttggagcccaaaaacaacatgagggcaaccatcgactgtgcggggatcttgaagcttagaaacgccgacattgagctgcggaaaggcgagacggacattggaagaaagaacacgcgggtgagactggttttccgagttcacatcccagagtccagtggcagaatcgtctctttacagactgcatctaaccccatcgagtgctcccagcgatctgctcacgagctgcccatggttgaaagacaagacacagacagctgcctggtctatggcggccagcaaatgatcctcacggggcagaactttacatccgagtccaaagttgtgtttactgagaagaccacagatggacagcaaatttgggagatggaagccacggtggataaggacaagagccagcccaacatgctttttgttgagatccctgaatatcggaacaagcatatccgcacacctgtaaaagtgaacttctacgtcatcaatgggaagagaaaacgaagtcagcctcagcactttacctaccacccagtcccagccatcaagacggagcccacggatgaatatgaccccactctgatctgcagccccacccatggaggcctggggagccagccttactacccccagcacccgatggtggccgagtccccctcctgcctcgtggccaccatggctccctgccagcagttccgcacggggctctcatcccctgacgcccgctaccagcaacagaacccagcggccgtactctaccagcggagcaagagcctgagccccagcctgctgggctatcagcagccggccctcatggccgccccgctgtcccttgcggacgctcaccgctctgtgctggtgcacgccggctcccagggccagagctcagccctgctccacccctctccgaccaaccagcaggcctcgcctgtgatccactactcacccaccaaccagcagctgcgctgcggaagccaccaggagttccagcacatcatgtactgcgagaatttcgcaccaggcaccaccagacctggcccgcccccggtcagtcaaggtcagaggctgagcccgggttcctaccccacagtcattcagcagcagaatgccacgagccaaagagccgccaaaaacggacccccggtcagtgaccaaaaggaagtattacctgcgggggtgaccattaaacaggagcagaacttggaccagacctacttggatgatgagctgatagacacacaccttagctggatacaaaacatattatagtaatgaactagtccgtaacttgaaagtatttcgatttcttggctttatatatcttgtggaaaggacgagcgctaactaccaagtataggcac

SEQ ID NO: 1159 - DNA, 2867 bp, Homo sapiens
  source 1..2867: mol_type = genomic DNA
accgccaccatgaacgcccccgagcggcagccccaacccgacggcggggacgccccaggccacgagcctgggggcagcccccaagacgagcttgacttctccatcctcttcgactatgagtatttgaatccgaacgaagaagagccgaatgcacataaggtcgccagcccaccctccggacccgcataccccgatgatgtcctggactatggcctcaagccatacagcccccttgctagtctctctggcgagccccccggccgattcggagagccggatagggtagggccgcagaagtttctgagcgcggccaagccagcaggggcctcgggcctgagccctcggatcgagatcactccgtcccacgaactgatccaggcagtggggcccctccgcatgagagacgcgggcctcctggtggagcagccgcccctggccggggtggccgccagcccgaggttcaccctgcccgtgcccggcttcgagggctaccgcgagccgctttgcttgagccccgctagcagcggctcctctgccagcttcatttctgacaccttctccccctacacctcgccctgcgtctcgcccaataacggcgggcccgacgacctgtgtccgcagtttcaaaacatccctgctcattattcccccagaacctcgccaataatgtcacctcgaaccagcctcgccgaggacagctgcctgggccgccactcgcccgtgccccgtccggcctcccgctcctcatcgcctggtgccaagcggaggcattcgtgcgccgaggccttggttgccctgccgcccggagcctcaccccagcgctcccggagcccctcgccgcagccctcatctcacgtggcaccccaggaccacggctccccggctgggtacccccctgtggctggctctgccgtgatcatggatgccctgaacagcctcgccacggactcgccttgtgggatcccccccaagatgtggaagaccagccctgacccctcgccggtgtctgccgccccatccaaggccggcctgcctcgccacatctacccggccgtggagttcctggggccctgcgagcagggcgagaggagaaactcggctccagaatccatcctgctggttccgcccacttggcccaagccgctggtgcctgccattcccatctgcagcatcccagtgactgcatccctccctccacttgagtggccgctgtccagtcagtcaggctcttacgagctgcggatcgaggtgcagcccaagccacatcaccgggcccactatgagacagaaggcagccgaggggctgtcaaagctccaactggaggccaccctgtggttcagctccatggctacatggaaaacaagcctctgggacttcagatcttcattgggacagctgatgagcggatccttaagccgcacgccttctaccaggtgcaccgaatcacggggaaaactgtcaccaccaccagctatgagaagatagtgggcaacaccaaagtcctggagatacccttggagcccaaaaacaacatgagggcaaccatcgactgtgcggggatcttgaagcttagaaacgccgacattgagctgcggaaaggcgagacggacattggaagaaagaacacgcgggtgagactggttttccgagttcacatcccagagtccagtggcagaatcgtctctttacagactgcatctaaccccatcgagtgctcccagcgatctgctcacgagctgcccatggttgaaagacaagacacagacagctgcctggtctatggcggccagcaaatgatcctcacggggcagaactttacatccgagtccaaagttgtgtttactgagaagaccacagatggacagcaaatttgggagatggaagccacggtggataaggacaagagccagcccaacatgctttttgttgagatccctgaatatcggaacaagcatatccgcacacctgtaaaagtgaacttctacgtcatcaatgggaagagaaaacgaagtcagcctcagcactttacctaccacccagtcccagccatcaagacggagcccacggatgaatatgaccccactctgatctgcagccccacccatggaggcctggggagccagccttactacccccagcacccgatggtggccgagtccccctcctgcctcgtggccaccatggctccctgccagcagttccgcacggggctctcatcccctgacgcccgctaccagcaacagaacccagcggccgtactctaccagcggagcaagagcctgagccccagcctgctgggctatcagcagccggccctcatggccgccccgctgtcccttgcggacgctcaccgctctgtgctggtgcacgccggctcccagggccagagctcagccctgctccacccctctccgaccaaccagcaggcctcgcctgtgatccactactcacccaccaaccagcagctgcgctgcggaagccaccaggagttccagcacatcatgtactgcgagaatttcgcaccaggcaccaccagacctggcccgcccccggtcagtcaaggtcagaggctgagcccgggttcctaccccacagtcattcagcagcagaatgccacgagccaaagagccgccaaaaacggacccccggtcagtgaccaaaaggaagtattacctgcgggggtgaccattaaacaggagcagaacttggaccagacctacttggatgatgagctgatagacacacaccttagctggatacaaaacatattatagtaatgaactagtccgtaacttgaaagtatttcgatttcttggctttatatatcttgtggaaaggacgacctgtcgtataacctatgtgagac

SEQ ID NO: 1160 - DNA, 3308 bp, Homo sapiens
  source 1..3308: mol_type = genomic DNA
accgccaccatgactactgcaaactgtggcgcccacgacgagctcgacttcaaactcgtctttggcgaggacggggcgccggcgccgccgcccccgggctcgcggcctgcagatcttgagccagatgattgtgcatccatttacatctttaatgtagatccacctccatctactttaaccacaccactttgcttaccacatcatggattaccgtctcactcttctgttttgtcaccatcgtttcagctccaaagtcacaaaaactatgaaggaacttgtgagattcctgaatctaaatatagcccattaggtggtcccaaaccctttgagtgcccaagtattcaaattacatctatctctcctaactgtcatcaagaattagatgcacatgaagatgacctacagataaatgacccagaacgggaatttttggaaaggccttctagagatcatctctatcttcctcttgagccatcctaccgggagtcttctcttagtcctagtcctgccagcagcatctcttctaggagttggttctctgatgcatcttcttgtgaatcgctttcacatatttatgatgatgtggactcagagttgaatgaagctgcagcccgatttacccttggatcccctctgacttctcctggtggctctccagggggctgccctggagaagaaacttggcatcaacagtatggacttggacactcattatcacccaggcaatctccttgccactctcctagatccagtgtcactgatgagaattggctgagccccaggccagcctcaggaccctcatcaaggcccacatccccctgtgggaaacggaggcactccagtgctgaagtttgttatgctgggtccctttcaccccatcactcacctgttccttcacctggtcactcccccaggggaagtgtgacagaagatacgtggctcaatgcttctgtccatggtgggtcaggccttggccctgcagtttttccatttcagtactgtgtagagactgacatccctctcaaaacaaggaaaacttctgaagatcaagctgccatactaccaggaaaattagagctgtgttcagatgaccaagggagtttatcaccagcccgggagacttcaatagatgatggccttggatctcagtatcctttaaagaaagattcatgtggtgatcagtttctttcagttccttcaccctttacctggagcaaaccaaagcctggccacacccctatatttcgcacatcttcattacctccactagactggcctttaccagctcattttggacaatgtgaactgaaaatagaagtgcaacctaaaactcatcatcgagcccattatgaaactgaaggtagccgaggggcagtaaaagcatctactgggggacatcctgttgtgaagctcctgggctataacgaaaagccaataaatctacaaatgtttattgggacagcagatgatcgatatttacgacctcatgcattttaccaggtgcatcgaatcactgggaagacagtcgctactgcaagccaagagataataattgccagtacaaaagttctggaaattccacttcttcctgaaaataatatgtcagccagtattgattgtgcaggtattttgaaactccgcaattcagatatagaacttcgaaaaggagaaactgatattggcagaaagaatactagagtacgacttgtgtttcgtgtacacatcccacagcccagtggaaaagtcctttctctgcagatagcctctatacccgttgagtgctcccagcggtctgctcaagaacttcctcatattgagaagtacagtatcaacagttgttctgtaaatggaggtcatgaaatggttgtgactggatctaattttcttccagaatccaaaatcatttttcttgaaaaaggacaagatggacgacctcagtgggaggtagaagggaagataatcagggaaaaatgtcaaggggctcacattgtccttgaagttcctccatatcataacccagcagttacagctgcagtgcaggtgcacttttatctttgcaatggcaagaggaaaaaaagccagtctcaacgttttacttatacaccagttttgatgaagcaagaacacagagaagagattgatttgtcttcagttccatctttgcctgtgcctcatcctgctcagacccagaggccttcctctgattcagggtgttcacatgacagtgtactgtcaggacagagaagtttgatttgctccatcccacaaacatatgcatccatggtgacctcatcccatctgccacagttgcagtgtagagatgagagtgttagtaaagaacagcatatgattccttctccaattgtacaccagccttttcaagtcacaccaacacctcctgtggggtcttcctatcagcctatgcaaactaatgttgtgtacaatggaccaacttgtcttcctattaatgctgcctctagtcaagaatttgattcagttttgtttcagcaggatgcaactctttctggtttagtgaatcttggctgtcaaccactgtcatccataccatttcattcttcaaattcaggctcaacaggacatctcttagcccatacacctcattctgtgcataccctgcctcatctgcaatcaatgggatatcattgttcaaatacaggacaaagatctctttcttctccagtggctgaccagattacaggtcagccttcgtctcagttacaacctattacatatggtccttcacattcagggtctgctacaacagcttccccagcagcttctcatcccttggctagttcaccgctttctgggccaccatctcctcagcttcagcctatgccttaccaatctcctagctcaggaactgcctcatcaccgtctccagccaccagaatgcattctggacagcactcaactcaagcacaaagtacgggccaggggggtctttctgcaccttcatccttaatatgtcacagtttgtgtgatccagcgtcatttccacctgatggggcaactgtgagcattaaacctgaaccagaagatcgagagcctaactttgcaaccattggtctgcaggacatcactttagatgatgaccaatttatatctgacttggaacaccagccatcaggttcagcagagaaatggcctaaccacagtgtgctctcatgtccagctcctttctggagaatctagtaatgaactagtccgtaacttgaaagtatttcgatttcttggctttatatatcttgtggaaaggacgactagtggaactccttcgccgcgtc

SEQ ID NO: 1161 - DNA, 3299 bp, Homo sapiens
  source 1..3299: mol_type = genomic DNA
accgccaccatgactactgcaaactgtggcgcccacgacgagctcgacttcaaactcgtctttggcgaggacggggcgccggcgccgccgcccccgggctcgcggcctgcagatcttgagccagatgattgtgcatccatttacatctttaatgtagatccacctccatctactttaaccacaccactttgcttaccacatcatggattaccgtctcactcttctgttttgtcaccatcgtttcagctccaaagtcacaaaaactatgaaggaacttgtgagattcctgaatctaaatatagcccattaggtggtcccaaaccctttgagtgcccaagtattcaaattacatctatctctcctaactgtcatcaagaattagatgcacatgaagatgacctacagataaatgacccagaacgggaatttttggaaaggccttctagagatcatctctatcttcctcttgagccatcctaccgggagtcttctcttagtcctagtcctgccagcagcatctcttctaggagttggttctctgatgcatcttcttgtgaatcgctttcacatatttatgatgatgtggactcagagttgaatgaagctgcagcccgatttacccttggatcccctctgacttctcctggtggctctccagggggctgccctggagaagaaacttggcatcaacagtatggacttggacactcattatcacccaggcaatctccttgccactctcctagatccagtgtcactgatgagaattggctgagccccaggccagcctcaggaccctcatcaaggcccacatccccctgtgggaaacggaggcactccagtgctgaagtttgttatgctgggtccctttcaccccatcactcacctgttccttcacctggtcactcccccaggggaagtgtgacagaagatacgtggctcaatgcttctgtccatggtgggtcaggccttggccctgcagtttttccatttcagtactgtgtagagactgacatccctctcaaaacaaggaaaacttctgaagatcaagctgccatactaccaggaaaattagagctgtgttcagatgaccaagggagtttatcaccagcccgggagacttcaatagatgatggccttggatctcagtatcctttaaagaaagattcatgtggtgatcagtttctttcagttccttcaccctttacctggagcaaaccaaagcctggccacacccctatatttcgcacatcttcattacctccactagactggcctttaccagctcattttggacaatgtgaactgaaaatagaagtgcaacctaaaactcatcatcgagcccattatgaaactgaaggtagccgaggggcagtaaaagcatctactgggggacatcctgttgtgaagctcctgggctataacgaaaagccaataaatctacaaatgtttattgggacagcagatgatcgatatttacgacctcatgcattttaccaggtgcatcgaatcactgggaagacagtcgctactgcaagccaagagataataattgccagtacaaaagttctggaaattccacttcttcctgaaaataatatgtcagccagtattgattgtgcaggtattttgaaactccgcaattcagatatagaacttcgaaaaggagaaactgatattggcagaaagaatactagagtacgacttgtgtttcgtgtacacatcccacagcccagtggaaaagtcctttctctgcagatagcctctatacccgttgagtgctcccagcggtctgctcaagaacttcctcatattgagaagtacagtatcaacagttgttctgtaaatggaggtcatgaaatggttgtgactggatctaattttcttccagaatccaaaatcatttttcttgaaaaaggacaagatggacgacctcagtgggaggtagaagggaagataatcagggaaaaatgtcaaggggctcacattgtccttgaagttcctccatatcataacccagcagttacagctgcagtgcaggtgcacttttatctttgcaatggcaagaggaaaaaaagccagtctcaacgttttacttatacaccagttttgatgaagcaagaacacagagaagagattgatttgtcttcagttccatctttgcctgtgcctcatcctgctcagacccagaggccttcctctgattcagggtgttcacatgacagtgtactgtcaggacagagaagtttgatttgctccatcccacaaacatatgcatccatggtgacctcatcccatctgccacagttgcagtgtagagatgagagtgttagtaaagaacagcatatgattccttctccaattgtacaccagccttttcaagtcacaccaacacctcctgtggggtcttcctatcagcctatgcaaactaatgttgtgtacaatggaccaacttgtcttcctattaatgctgcctctagtcaagaatttgattcagttttgtttcagcaggatgcaactctttctggtttagtgaatcttggctgtcaaccactgtcatccataccatttcattcttcaaattcaggctcaacaggacatctcttagcccatacacctcattctgtgcataccctgcctcatctgcaatcaatgggatatcattgttcaaatacaggacaaagatctctttcttctccagtggctgaccagattacaggtcagccttcgtctcagttacaacctattacatatggtccttcacattcagggtctgctacaacagcttccccagcagcttctcatcccttggctagttcaccgctttctgggccaccatctcctcagcttcagcctatgccttaccaatctcctagctcaggaactgcctcatcaccgtctccagccaccagaatgcattctggacagcactcaactcaagcacaaagtacgggccaggggggtctttctgcaccttcatccttaatatgtcacagtttgtgtgatccagcgtcatttccacctgatggggcaactgtgagcattaaacctgaaccagaagatcgagagcctaactttgcaaccattggtctgcaggacatcactttagatgatgatttgtttaccagtaataattttgacttgcttcagttgagacctacgttttggccagtcccagcaggaagatatctgaggaatctagagtagtaatgaactagtccgtaacttgaaagtatttcgatttcttggctttatatatcttgtggaaaggacgattaagcaatgtcccactgcaggtc

SEQ ID NO: 1162 - DNA, 2996 bp, Homo sapiens
  source 1..2996: mol_type = genomic DNA
accgccaccatgataaccaccctcccatctctcctacccgccagcctcgccagtatctcccaccgagtcacgaatctcccatctaactccctctcacacaacccaggcctctccaagcctgactttcccggaaactccagtccaggtcttccttcctcctccagcccaggccgggacctgggggctcctgccggatccatgggggcggccagctgcgaggatgaggagctggaatttaagctggtgttcggggaggaaaaggaggcccccccgctgggcgcggggggattgggggaagaactggactcagaggatgccccgccatgctgccgtctggccttgggagagccccctccctatggcgctgcacctatcggtattccccgacctccaccccctcggcctggcatgcattcgccaccgccgcgaccagccccctcacctggcacctgggagagccagcccgccaggtcggtgaggctgggaggaccaggagggggtgctgggggtgctgggggtggccgtgttctcgagtgtcccagcatccgcatcacctccatctctcccacgccggagccgccagcagcgctggaggacaaccctgatgcctggggggacggctctcctagagattaccccccaccagaaggctttgggggctacagagaagcagggggccagggtgggggggccttcttcagcccaagccctggcagcagcagcctgtcctcgtggagcttcttctccgatgcctctgacgaggcagccctgtatgcagcctgcgacgaggtggagtctgagctaaatgaggcggcctcccgctttggcctgggctccccgctgccctcgccccgggcctcccctcggccatggacccccgaagatccctggagcctgtatggtccaagccccggaggccgagggccagaggatagctggctactcctcagtgctcctgggcccaccccagcctccccgcggcctgcctctccatgtggcaagcggcgctattccagctcgggaaccccatcttcagcctccccagctctgtcccgccgtggcagcctgggggaagaggggtctgagccacctccaccacccccattgcctctggcccgggacccgggctcccctggtccctttgactatgtgggggccccaccagctgagagcatccctcagaagacacggcggacttccagcgagcaggcagtggctctgcctcggtctgaggagcctgcctcatgcaatgggaagctgcccttgggagcagaggagtctgtggctcctccaggaggttcccggaaggaggtggctggcatggactacctggcagtgccctccccactcgcttggtccaaggcccggattgggggacacagccctatcttcaggacctctgccctacccccactggactggcctctgcccagccaatatgagcagctggagctgaggatcgaggtacagcctagagcccaccaccgggcccactatgagacagaaggcagccgtggagctgtcaaagctgcccctggcggtcaccccgtagtcaagctcctaggctacagtgagaagccactgaccctacagatgttcatcggcactgcagatgaaaggaacctgcggcctcatgccttctatcaggtgcaccgtatcacaggcaagatggtggccacggccagctatgaagccgtagtcagtggcaccaaggtgttggagatgactctgctgcctgagaacaacatggcggccaacattgactgcgcgggaatcctgaagcttcggaattcagacattgagcttcggaagggtgagacggacatcgggcgcaaaaacacacgtgtacggctggtgttccgggtacacgtgccccagggcggcgggaaggtcgtctcagtacaggcagcatcggtgcccatcgagtgctcccagcgctcagcccaggagctgccccaggtggaggcctacagccccagtgcctgctctgtgagaggaggcgaggaactggtactgactggctccaacttcctgccagactccaaggtggtgttcattgagaggggtcctgatgggaagctgcaatgggaggaggaggccacagtgaaccgactgcagagcaacgaggtgacgctgaccctgactgtccccgagtacagcaacaagagggtttcccggccagtccaggtctacttttatgtctccaatgggcggaggaaacgcagtcctacccagagtttcaggtttctgcctgtgatctgcaaagaggagcccctaccggactcatctctgcggggtttcccttcagcatcggcaaccccctttggcactgacatggacttctcaccacccaggcccccctacccctcctatccccatgaagaccctgcttgcgaaactccttacctatcagaaggcttcggctatggcatgccccctctgtacccccagacggggcccccaccatcctacagaccgggcctgcggatgttccctgagactaggggtaccacaggttgtgcccaaccacctgcagtttccttccttccccgccccttccctagtgacccgtatggagggcggggctcctctttctccctggggctgccattctctccgccagccccctttcggccgcctcctcttcctgcatccccaccgcttgaaggccccttcccttcccagagtgatgtgcatcccctacctgctgagggatacaataaggtagggccaggctatggccctggggagggggctccggagcaggagaaatccaggggtggctacagcagcggcttccgagacagtgtccctatccagggtatcacgctggaggaaggtgggtgtgggactgggggctgtgagtgtgagtgtgtgcaagagattgctctgcatgtttgctagtaatgaactagtccgtaacttgaaagtatttcgatttcttggctttatatatcttgtggaaaggacgaaggctccggttgagatcaagagcc

SEQ ID NO: 1163 - DNA, 2774 bp, Homo sapiens
  source 1..2774: mol_type = genomic DNA
accgccaccatgcctgcttcaatctcctccatcttcccaggtccaactctgcttttgtcttgtggctcagaagaactggactcagaggatgccccgccatgctgccgtctggccttgggagagccccctccctatggcgctgcacctatcggtattccccgacctccaccccctcggcctggcatgcattcgccaccgccgcgaccagccccctcacctggcacctgggagagccagcccgccaggtcggtgaggctgggaggaccaggagggggtgctgggggtgctgggggtggccgtgttctcgagtgtcccagcatccgcatcacctccatctctcccacgccggagccgccagcagcgctggaggacaaccctgatgcctggggggacggctctcctagagattaccccccaccagaaggctttgggggctacagagaagcagggggccagggtgggggggccttcttcagcccaagccctggcagcagcagcctgtcctcgtggagcttcttctccgatgcctctgacgaggcagccctgtatgcagcctgcgacgaggtggagtctgagctaaatgaggcggcctcccgctttggcctgggctccccgctgccctcgccccgggcctcccctcggccatggacccccgaagatccctggagcctgtatggtccaagccccggaggccgagggccagaggatagctggctactcctcagtgctcctgggcccaccccagcctccccgcggcctgcctctccatgtggcaagcggcgctattccagctcgggaaccccatcttcagcctccccagctctgtcccgccgtggcagcctgggggaagaggggtctgagccacctccaccacccccattgcctctggcccgggacccgggctcccctggtccctttgactatgtgggggccccaccagctgagagcatccctcagaagacacggcggacttccagcgagcaggcagtggctctgcctcggtctgaggagcctgcctcatgcaatgggaagctgcccttgggagcagaggagtctgtggctcctccaggaggttcccggaaggaggtggctggcatggactacctggcagtgccctccccactcgcttggtccaaggcccggattgggggacacagccctatcttcaggacctctgccctacccccactggactggcctctgcccagccaatatgagcagctggagctgaggatcgaggtacagcctagagcccaccaccgggcccactatgagacagaaggcagccgtggagctgtcaaagctgcccctggcggtcaccccgtagtcaagctcctaggctacagtgagaagccactgaccctacagatgttcatcggcactgcagatgaaaggaacctgcggcctcatgccttctatcaggtgcaccgtatcacaggcaagatggtggccacggccagctatgaagccgtagtcagtggcaccaaggtgttggagatgactctgctgcctgagaacaacatggcggccaacattgactgcgcgggaatcctgaagcttcggaattcagacattgagcttcggaagggtgagacggacatcgggcgcaaaaacacacgtgtacggctggtgttccgggtacacgtgccccagggcggcgggaaggtcgtctcagtacaggcagcatcggtgcccatcgagtgctcccagcgctcagcccaggagctgccccaggtggaggcctacagccccagtgcctgctctgtgagaggaggcgaggaactggtactgactggctccaacttcctgccagactccaaggtggtgttcattgagaggggtcctgatgggaagctgcaatgggaggaggaggccacagtgaaccgactgcagagcaacgaggtgacgctgaccctgactgtccccgagtacagcaacaagagggtttcccggccagtccaggtctacttttatgtctccaatgggcggaggaaacgcagtcctacccagagtttcaggtttctgcctgtgatctgcaaagaggagcccctaccggactcatctctgcggggtttcccttcagcatcggcaaccccctttggcactgacatggacttctcaccacccaggcccccctacccctcctatccccatgaagaccctgcttgcgaaactccttacctatcagaaggcttcggctatggcatgccccctctgtacccccagacggggcccccaccatcctacagaccgggcctgcggatgttccctgagactaggggtaccacaggttgtgcccaaccacctgcagtttccttccttccccgccccttccctagtgacccgtatggagggcggggctcctctttctccctggggctgccattctctccgccagccccctttcggccgcctcctcttcctgcatccccaccgcttgaaggccccttcccttcccagagtgatgtgcatcccctacctgctgagggatacaataaggtagggccaggctatggccctggggagggggctccggagcaggagaaatccaggggtggctacagcagcggcttccgagacagtgtccctatccagggtatcacgctggaggaagtgagtgagatcattggccgagacctgagtggcttccctgcacctcctggagaagagcctcctgcctagtaatgaactagtccgtaacttgaaagtatttcgatttcttggctttatatatcttgtggaaaggacgacttccctgtcagggtaaagtgtaa

SEQ ID NO: 1164 - DNA, 2600 bp, Homo sapiens
  source 1..2600: mol_type = genomic DNA
accgccaccatgcattcgccaccgccgcgaccagccccctcacctggcacctgggagagccagcccgccaggtcggtgaggctgggaggaccaggagggggtgctgggggtgctgggggtggccgtgttctcgagtgtcccagcatccgcatcacctccatctctcccacgccggagccgccagcagcgctggaggacaaccctgatgcctggggggacggctctcctagagattaccccccaccagaaggctttgggggctacagagaagcagggggccagggtgggggggccttcttcagcccaagccctggcagcagcagcctgtcctcgtggagcttcttctccgatgcctctgacgaggcagccctgtatgcagcctgcgacgaggtggagtctgagctaaatgaggcggcctcccgctttggcctgggctccccgctgccctcgccccgggcctcccctcggccatggacccccgaagatccctggagcctgtatggtccaagccccggaggccgagggccagaggatagctggctactcctcagtgctcctgggcccaccccagcctccccgcggcctgcctctccatgtggcaagcggcgctattccagctcgggaaccccatcttcagcctccccagctctgtcccgccgtggcagcctgggggaagaggggtctgagccacctccaccacccccattgcctctggcccgggacccgggctcccctggtccctttgactatgtgggggccccaccagctgagagcatccctcagaagacacggcggacttccagcgagcaggcagtggctctgcctcggtctgaggagcctgcctcatgcaatgggaagctgcccttgggagcagaggagtctgtggctcctccaggaggttcccggaaggaggtggctggcatggactacctggcagtgccctccccactcgcttggtccaaggcccggattgggggacacagccctatcttcaggacctctgccctacccccactggactggcctctgcccagccaatatgagcagctggagctgaggatcgaggtacagcctagagcccaccaccgggcccactatgagacagaaggcagccgtggagctgtcaaagctgcccctggcggtcaccccgtagtcaagctcctaggctacagtgagaagccactgaccctacagatgttcatcggcactgcagatgaaaggaacctgcggcctcatgccttctatcaggtgcaccgtatcacaggcaagatggtggccacggccagctatgaagccgtagtcagtggcaccaaggtgttggagatgactctgctgcctgagaacaacatggcggccaacattgactgcgcgggaatcctgaagcttcggaattcagacattgagcttcggaagggtgagacggacatcgggcgcaaaaacacacgtgtacggctggtgttccgggtacacgtgccccagggcggcgggaaggtcgtctcagtacaggcagcatcggtgcccatcgagtgctcccagcgctcagcccaggagctgccccaggtggaggcctacagccccagtgcctgctctgtgagaggaggcgaggaactggtactgactggctccaacttcctgccagactccaaggtggtgttcattgagaggggtcctgatgggaagctgcaatgggaggaggaggccacagtgaaccgactgcagagcaacgaggtgacgctgaccctgactgtccccgagtacagcaacaagagggtttcccggccagtccaggtctacttttatgtctccaatgggcggaggaaacgcagtcctacccagagtttcaggtttctgcctgtgatctgcaaagaggagcccctaccggactcatctctgcggggtttcccttcagcatcggcaaccccctttggcactgacatggacttctcaccacccaggcccccctacccctcctatccccatgaagaccctgcttgcgaaactccttacctatcagaaggcttcggctatggcatgccccctctgtacccccagacggggcccccaccatcctacagaccgggcctgcggatgttccctgagactaggggtaccacaggttgtgcccaaccacctgcagtttccttccttccccgccccttccctagtgacccgtatggagggcggggctcctctttctccctggggctgccattctctccgccagccccctttcggccgcctcctcttcctgcatccccaccgcttgaaggccccttcccttcccagagtgatgtgcatcccctacctgctgagggatacaataaggtagggccaggctatggccctggggagggggctccggagcaggagaaatccaggggtggctacagcagcggcttccgagacagtgtccctatccagggtatcacgctggaggaagtgagtgagatcattggccgagacctgagtggcttccctgcacctcctggagaagagcctcctgcctagtaatgaactagtccgtaacttgaaagtatttcgatttcttggctttatatatcttgtggaaaggacgacctgtgcaaacgagggtgagcatt

SEQ ID NO: 1165 - DNA, 2486 bp, Homo sapiens
  source 1..2486: mol_type = genomic DNA
accgccaccatgggggcggccagctgcgaggatgaggagctggaatttaagctggtgttcggggaggaaaaggaggcccccccgctgggcgcggggggattgggggaagaactggactcagaggatgccccgccatgctgccgtctggccttgggagagccccctccctatggcgctgcacctatcggtattccccgacctccaccccctcggcctggcatgcattcgccaccgccgcgaccagccccctcacctggcacctgggagagccagcccgccaggtcggtgaggctgggaggaccaggagggggtgctgggggtgctgggggtggccgtgttctcgagtgtcccagcatccgcatcacctccatctctcccacgccggagccgccagcagcgctggaggacaaccctgatgcctggggggacggctctcctagagattaccccccaccagaaggctttgggggctacagagaagcagggggccagggtgggggggccttcttcagcccaagccctggcagcagcagcctgtcctcgtggagcttcttctccgatgcctctgacgaggcagccctgtatgcagcctgcgacgaggtggagtctgagctaaatgaggcggcctcccgctttggcctgggctccccgctgccctcgccccgggcctcccctcggccatggacccccgaagatccctggagcctgtatggtccaagccccggaggccgagggccagaggatagctggctactcctcagtgctcctgggcccaccccagcctccccgcggcctgcctctccatgtggcaagcggcgctattccagctcgggaaccccatcttcagcctccccagctctgtcccgccgtggcagcctgggggaagaggggtctgagccacctccaccacccccattgcctctggcccgggacccgggctcccctggtccctttgactatgtgggggccccaccagctgagagcatccctcagaagacacggcggacttccagcgagcaggcagtggctctgcctcggtctgaggagcctgcctcatgcaatgggaagctgcccttgggagcagaggagtctgtggctcctccaggaggttcccggaaggaggtggctggcatggactacctggcagtgccctccccactcgcttggtccaaggcccggattgggggacacagccctatcttcaggacctctgccctacccccactggactggcctctgcccagccaatatgagcagctggagctgaggatcgaggtacagcctagagcccaccaccgggcccactatgagacagaaggcagccgtggagctgtcaaagctgcccctggcggtcaccccgtagtcaagctcctaggctacagtgagaagccactgaccctacagatgttcatcggcactgcagatgaaaggaacctgcggcctcatgccttctatcaggtgcaccgtatcacaggcaagatggtggccacggccagctatgaagccgtagtcagtggcaccaaggtgttggagatgactctgctgcctgagaacaacatggcggccaacattgactgcgcgggaatcctgaagcttcggaattcagacattgagcttcggaagggtgagacggacatcgggcgcaaaaacacacgtgtacggctggtgttccgggtacacgtgccccagggcggcgggaaggtcgtctcagtacaggcagcatcggtgcccatcgagtgctcccagcgctcagcccaggagctgccccaggtggaggcctacagccccagtgcctgctctgtgagaggaggcgaggaactggtactgactggctccaacttcctgccagactccaaggtggtgttcattgagaggggtcctgatgggaagctgcaatgggaggaggaggccacagtgaaccgactgcagagcaacgaggtgacgctgaccctgactgtccccgagtacagcaacaagagggtttcccggccagtccaggtctacttttatgtctccaatgggcggaggaaacgcagtcctacccagagtttcaggtttctgcctgtgatctgcaaagaggagcccctaccggactcatctctgcggggtttcccttcagcatcggcaaccccctttggcactgacatggacttctcaccacccaggcccccctacccctcctatccccatgaagaccctgcttgcgaaactccttacctatcagaaggcttcggctatggcatgccccctctgtacccccagacggggcccccaccatcctacagaccgggcctgcggatgttccctgagactaggggtaccacagtgagtgagatcattggccgagacctgagtggcttccctgcacctcctggagaagagcctcctgcctagtaatgaactagtccgtaacttgaaagtatttcgatttcttggctttatatatcttgtggaaaggacgatatgagcgcttgcacatcctttag

SEQ ID NO: 1166 - DNA, 2771 bp, Homo sapiens
  source 1..2771: mol_type = genomic DNA
accgccaccatgcctgcttcaatctcctccatcttcccaggtccaactctgcttttgtcttgtggctcagaagaactggactcagaggatgccccgccatgctgccgtctggccttgggagagccccctccctatggcgctgcacctatcggtattccccgacctccaccccctcggcctggcatgcattcgccaccgccgcgaccagccccctcacctggcacctgggagagccagcccgccaggtcggtgaggctgggaggaccaggagggggtgctgggggtgctgggggtggccgtgttctcgagtgtcccagcatccgcatcacctccatctctcccacgccggagccgccagcagcgctggaggacaaccctgatgcctggggggacggctctcctagagattaccccccaccagaaggctttgggggctacagagaagcagggggccagggtgggggggccttcttcagcccaagccctggcagcagcagcctgtcctcgtggagcttcttctccgatgcctctgacgaggcagccctgtatgcagcctgcgacgaggtggagtctgagctaaatgaggcggcctcccgctttggcctgggctccccgctgccctcgccccgggcctcccctcggccatggacccccgaagatccctggagcctgtatggtccaagccccggaggccgagggccagaggatagctggctactcctcagtgctcctgggcccaccccagcctccccgcggcctgcctctccatgtggcaagcggcgctattccagctcgggaaccccatcttcagcctccccagctctgtcccgccgtggcagcctgggggaagaggggtctgagccacctccaccacccccattgcctctggcccgggacccgggctcccctggtccctttgactatgtgggggccccaccagctgagagcatccctcagaagacacggcggacttccagcgagcaggcagtggctctgcctcggtctgaggagcctgcctcatgcaatgggaagctgcccttgggagcagaggagtctgtggctcctccaggaggttcccggaaggaggtggctggcatggactacctggcagtgccctccccactcgcttggtccaaggcccggattgggggacacagccctatcttcaggacctctgccctacccccactggactggcctctgcccagccaatatgagcagctggagctgaggatcgaggtacagcctagagcccaccaccgggcccactatgagacagaaggcagccgtggagctgtcaaagctgcccctggcggtcaccccgtagtcaagctcctaggctacagtgagaagccactgaccctacagatgttcatcggcactgcagatgaaaggaacctgcggcctcatgccttctatcaggtgcaccgtatcacaggcaagatggtggccacggccagctatgaagccgtagtcagtggcaccaaggtgttggagatgactctgctgcctgagaacaacatggcggccaacattgactgcgcgggaatcctgaagcttcggaattcagacattgagcttcggaagggtgagacggacatcgggcgcaaaaacacacgtgtacggctggtgttccgggtacacgtgccccagggcggcgggaaggtcgtctcagtacaggcagcatcggtgcccatcgagtgctcccagcgctcagcccaggagctgccccaggtggaggcctacagccccagtgcctgctctgtgagaggaggcgaggaactggtactgactggctccaacttcctgccagactccaaggtggtgttcattgagaggggtcctgatgggaagctgcaatgggaggaggaggccacagtgaaccgactgcagagcaacgaggtgacgctgaccctgactgtccccgagtacagcaacaagagggtttcccggccagtccaggtctacttttatgtctccaatgggcggaggaaacgcagtcctacccagagtttcaggtttctgcctgtgatctgcaaagaggagcccctaccggactcatctctgcggggtttcccttcagcatcggcaaccccctttggcactgacatggacttctcaccacccaggcccccctacccctcctatccccatgaagaccctgcttgcgaaactccttacctatcagaaggcttcggctatggcatgccccctctgtacccccagacggggcccccaccatcctacagaccgggcctgcggatgttccctgagactaggggtaccacaggttgtgcccaaccacctgcagtttccttccttccccgccccttccctagtgacccgtatggagggcggggctcctctttctccctggggctgccattctctccgccagccccctttcggccgcctcctcttcctgcatccccaccgcttgaaggccccttcccttcccagagtgatgtgcatcccctacctgctgagggatacaataaggtagggccaggctatggccctggggagggggctccggagcaggagaaatccaggggtggctacagcagcggcttccgagacagtgtccctatccagggtatcacgctggaggaaggtgggtgtgggactgggggctgtgagtgtgagtgtgtgcaagagattgctctgcatgtttgctagtaatgaactagtccgtaacttgaaagtatttcgatttcttggctttatatatcttgtggaaaggacgaccgccaatcccatttcagggcttc

SEQ ID NO: 1167 - DNA, 2450 bp, Homo sapiens
  source 1..2450: mol_type = genomic DNA
accgccaccatgcctgcttcaatctcctccatcttcccaggtccaactctgcttttgtcttgtggctcagaagaactggactcagaggatgccccgccatgctgccgtctggccttgggagagccccctccctatggcgctgcacctatcggtattccccgacctccaccccctcggcctggcatgcattcgccaccgccgcgaccagccccctcacctggcacctgggagagccagcccgccaggtcggtgaggctgggaggaccaggagggggtgctgggggtgctgggggtggccgtgttctcgagtgtcccagcatccgcatcacctccatctctcccacgccggagccgccagcagcgctggaggacaaccctgatgcctggggggacggctctcctagagattaccccccaccagaaggctttgggggctacagagaagcagggggccagggtgggggggccttcttcagcccaagccctggcagcagcagcctgtcctcgtggagcttcttctccgatgcctctgacgaggcagccctgtatgcagcctgcgacgaggtggagtctgagctaaatgaggcggcctcccgctttggcctgggctccccgctgccctcgccccgggcctcccctcggccatggacccccgaagatccctggagcctgtatggtccaagccccggaggccgagggccagaggatagctggctactcctcagtgctcctgggcccaccccagcctccccgcggcctgcctctccatgtggcaagcggcgctattccagctcgggaaccccatcttcagcctccccagctctgtcccgccgtggcagcctgggggaagaggggtctgagccacctccaccacccccattgcctctggcccgggacccgggctcccctggtccctttgactatgtgggggccccaccagctgagagcatccctcagaagacacggcggacttccagcgagcaggcagtggctctgcctcggtctgaggagcctgcctcatgcaatgggaagctgcccttgggagcagaggagtctgtggctcctccaggaggttcccggaaggaggtggctggcatggactacctggcagtgccctccccactcgcttggtccaaggcccggattgggggacacagccctatcttcaggacctctgccctacccccactggactggcctctgcccagccaatatgagcagctggagctgaggatcgaggtacagcctagagcccaccaccgggcccactatgagacagaaggcagccgtggagctgtcaaagctgcccctggcggtcaccccgtagtcaagctcctaggctacagtgagaagccactgaccctacagatgttcatcggcactgcagatgaaaggaacctgcggcctcatgccttctatcaggtgcaccgtatcacaggcaagatggtggccacggccagctatgaagccgtagtcagtggcaccaaggtgttggagatgactctgctgcctgagaacaacatggcggccaacattgactgcgcgggaatcctgaagcttcggaattcagacattgagcttcggaagggtgagacggacatcgggcgcaaaaacacacgtgtacggctggtgttccgggtacacgtgccccagggcggcgggaaggtcgtctcagtacaggcagcatcggtgcccatcgagtgctcccagcgctcagcccaggagctgccccaggtggaggcctacagccccagtgcctgctctgtgagaggaggcgaggaactggtactgactggctccaacttcctgccagactccaaggtggtgttcattgagaggggtcctgatgggaagctgcaatgggaggaggaggccacagtgaaccgactgcagagcaacgaggtgacgctgaccctgactgtccccgagtacagcaacaagagggtttcccggccagtccaggtctacttttatgtctccaatgggcggaggaaacgcagtcctacccagagtttcaggtttctgcctgtgatctgcaaagaggagcccctaccggactcatctctgcggggtttcccttcagcatcggcaaccccctttggcactgacatggacttctcaccacccaggcccccctacccctcctatccccatgaagaccctgcttgcgaaactccttacctatcagaaggcttcggctatggcatgccccctctgtacccccagacggggcccccaccatcctacagaccgggcctgcggatgttccctgagactaggggtaccacagtgagtgagatcattggccgagacctgagtggcttccctgcacctcctggagaagagcctcctgcctagtaatgaactagtccgtaacttgaaagtatttcgatttcttggctttatatatcttgtggaaaggacgaccaggatccaggacagaattggac

SEQ ID NO: 1168 - DNA, 2675 bp, Homo sapiens
  source 1..2675: mol_type = genomic DNA
accgccaccatgataaccaccctcccatctctcctacccgccagcctcgccagtatctcccaccgagtcacgaatctcccatctaactccctctcacacaacccaggcctctccaagcctgactttcccggaaactccagtccaggtcttccttcctcctccagcccaggccgggacctgggggctcctgccggatccatgggggcggccagctgcgaggatgaggagctggaatttaagctggtgttcggggaggaaaaggaggcccccccgctgggcgcggggggattgggggaagaactggactcagaggatgccccgccatgctgccgtctggccttgggagagccccctccctatggcgctgcacctatcggtattccccgacctccaccccctcggcctggcatgcattcgccaccgccgcgaccagccccctcacctggcacctgggagagccagcccgccaggtcggtgaggctgggaggaccaggagggggtgctgggggtgctgggggtggccgtgttctcgagtgtcccagcatccgcatcacctccatctctcccacgccggagccgccagcagcgctggaggacaaccctgatgcctggggggacggctctcctagagattaccccccaccagaaggctttgggggctacagagaagcagggggccagggtgggggggccttcttcagcccaagccctggcagcagcagcctgtcctcgtggagcttcttctccgatgcctctgacgaggcagccctgtatgcagcctgcgacgaggtggagtctgagctaaatgaggcggcctcccgctttggcctgggctccccgctgccctcgccccgggcctcccctcggccatggacccccgaagatccctggagcctgtatggtccaagccccggaggccgagggccagaggatagctggctactcctcagtgctcctgggcccaccccagcctccccgcggcctgcctctccatgtggcaagcggcgctattccagctcgggaaccccatcttcagcctccccagctctgtcccgccgtggcagcctgggggaagaggggtctgagccacctccaccacccccattgcctctggcccgggacccgggctcccctggtccctttgactatgtgggggccccaccagctgagagcatccctcagaagacacggcggacttccagcgagcaggcagtggctctgcctcggtctgaggagcctgcctcatgcaatgggaagctgcccttgggagcagaggagtctgtggctcctccaggaggttcccggaaggaggtggctggcatggactacctggcagtgccctccccactcgcttggtccaaggcccggattgggggacacagccctatcttcaggacctctgccctacccccactggactggcctctgcccagccaatatgagcagctggagctgaggatcgaggtacagcctagagcccaccaccgggcccactatgagacagaaggcagccgtggagctgtcaaagctgcccctggcggtcaccccgtagtcaagctcctaggctacagtgagaagccactgaccctacagatgttcatcggcactgcagatgaaaggaacctgcggcctcatgccttctatcaggtgcaccgtatcacaggcaagatggtggccacggccagctatgaagccgtagtcagtggcaccaaggtgttggagatgactctgctgcctgagaacaacatggcggccaacattgactgcgcgggaatcctgaagcttcggaattcagacattgagcttcggaagggtgagacggacatcgggcgcaaaaacacacgtgtacggctggtgttccgggtacacgtgccccagggcggcgggaaggtcgtctcagtacaggcagcatcggtgcccatcgagtgctcccagcgctcagcccaggagctgccccaggtggaggcctacagccccagtgcctgctctgtgagaggaggcgaggaactggtactgactggctccaacttcctgccagactccaaggtggtgttcattgagaggggtcctgatgggaagctgcaatgggaggaggaggccacagtgaaccgactgcagagcaacgaggtgacgctgaccctgactgtccccgagtacagcaacaagagggtttcccggccagtccaggtctacttttatgtctccaatgggcggaggaaacgcagtcctacccagagtttcaggtttctgcctgtgatctgcaaagaggagcccctaccggactcatctctgcggggtttcccttcagcatcggcaaccccctttggcactgacatggacttctcaccacccaggcccccctacccctcctatccccatgaagaccctgcttgcgaaactccttacctatcagaaggcttcggctatggcatgccccctctgtacccccagacggggcccccaccatcctacagaccgggcctgcggatgttccctgagactaggggtaccacagtgagtgagatcattggccgagacctgagtggcttccctgcacctcctggagaagagcctcctgcctagtaatgaactagtccgtaacttgaaagtatttcgatttcttggctttatatatcttgtggaaaggacgacatcccttctctttatccctggga

SEQ ID NO: 1169 - DNA, 2810 bp, Homo sapiens
  source 1..2810: mol_type = genomic DNA
accgccaccatgggggcggccagctgcgaggatgaggagctggaatttaagctggtgttcggggaggaaaaggaggcccccccgctgggcgcggggggattgggggaagaactggactcagaggatgccccgccatgctgccgtctggccttgggagagccccctccctatggcgctgcacctatcggtattccccgacctccaccccctcggcctggcatgcattcgccaccgccgcgaccagccccctcacctggcacctgggagagccagcccgccaggtcggtgaggctgggaggaccaggagggggtgctgggggtgctgggggtggccgtgttctcgagtgtcccagcatccgcatcacctccatctctcccacgccggagccgccagcagcgctggaggacaaccctgatgcctggggggacggctctcctagagattaccccccaccagaaggctttgggggctacagagaagcagggggccagggtgggggggccttcttcagcccaagccctggcagcagcagcctgtcctcgtggagcttcttctccgatgcctctgacgaggcagccctgtatgcagcctgcgacgaggtggagtctgagctaaatgaggcggcctcccgctttggcctgggctccccgctgccctcgccccgggcctcccctcggccatggacccccgaagatccctggagcctgtatggtccaagccccggaggccgagggccagaggatagctggctactcctcagtgctcctgggcccaccccagcctccccgcggcctgcctctccatgtggcaagcggcgctattccagctcgggaaccccatcttcagcctccccagctctgtcccgccgtggcagcctgggggaagaggggtctgagccacctccaccacccccattgcctctggcccgggacccgggctcccctggtccctttgactatgtgggggccccaccagctgagagcatccctcagaagacacggcggacttccagcgagcaggcagtggctctgcctcggtctgaggagcctgcctcatgcaatgggaagctgcccttgggagcagaggagtctgtggctcctccaggaggttcccggaaggaggtggctggcatggactacctggcagtgccctccccactcgcttggtccaaggcccggattgggggacacagccctatcttcaggacctctgccctacccccactggactggcctctgcccagccaatatgagcagctggagctgaggatcgaggtacagcctagagcccaccaccgggcccactatgagacagaaggcagccgtggagctgtcaaagctgcccctggcggtcaccccgtagtcaagctcctaggctacagtgagaagccactgaccctacagatgttcatcggcactgcagatgaaaggaacctgcggcctcatgccttctatcaggtgcaccgtatcacaggcaagatggtggccacggccagctatgaagccgtagtcagtggcaccaaggtgttggagatgactctgctgcctgagaacaacatggcggccaacattgactgcgcgggaatcctgaagcttcggaattcagacattgagcttcggaagggtgagacggacatcgggcgcaaaaacacacgtgtacggctggtgttccgggtacacgtgccccagggcggcgggaaggtcgtctcagtacaggcagcatcggtgcccatcgagtgctcccagcgctcagcccaggagctgccccaggtggaggcctacagccccagtgcctgctctgtgagaggaggcgaggaactggtactgactggctccaacttcctgccagactccaaggtggtgttcattgagaggggtcctgatgggaagctgcaatgggaggaggaggccacagtgaaccgactgcagagcaacgaggtgacgctgaccctgactgtccccgagtacagcaacaagagggtttcccggccagtccaggtctacttttatgtctccaatgggcggaggaaacgcagtcctacccagagtttcaggtttctgcctgtgatctgcaaagaggagcccctaccggactcatctctgcggggtttcccttcagcatcggcaaccccctttggcactgacatggacttctcaccacccaggcccccctacccctcctatccccatgaagaccctgcttgcgaaactccttacctatcagaaggcttcggctatggcatgccccctctgtacccccagacggggcccccaccatcctacagaccgggcctgcggatgttccctgagactaggggtaccacaggttgtgcccaaccacctgcagtttccttccttccccgccccttccctagtgacccgtatggagggcggggctcctctttctccctggggctgccattctctccgccagccccctttcggccgcctcctcttcctgcatccccaccgcttgaaggccccttcccttcccagagtgatgtgcatcccctacctgctgagggatacaataaggtagggccaggctatggccctggggagggggctccggagcaggagaaatccaggggtggctacagcagcggcttccgagacagtgtccctatccagggtatcacgctggaggaagtgagtgagatcattggccgagacctgagtggcttccctgcacctcctggagaagagcctcctgcctagtaatgaactagtccgtaacttgaaagtatttcgatttcttggctttatatatcttgtggaaaggacgacacttcggttggctgtgctgaggg

SEQ ID NO: 1170 - DNA, 2177 bp, Homo sapiens
  source 1..2177: mol_type = genomic DNA
accgccaccatggctctccttttgacactaacatcaccagacctggagggtacctgggacaccagagacaaggatggcttcaaagcccaggaggggccgcccctggctgtacctgaatttcctgtgtgtggactgtaccggatctacggagtctgtggctctttcagctccttcttcatcatccggtgcagcctttgtgctctggagaccctcaaatcaccccaacatgatcccttagagatacctgaacagtccctcaaactcatacccctggtgtctgggaaaagggaactcacaaggggccagaaagctggagagaagcccctggctgcaggacccggggaggaggaactgctccggggctcagcccctcatgctcaggacactcagagtgaggaactgccaccctcctgcaccatctcaggagagaagaagccgccagcagtctctggagaagccaccggggctgatgctgggagactgtgcccgcccccccgctccagggctccccacaaagacagaactctagcccgctccaggccccagactcagggggaagattgttccctcccagtgggagaggtgaagataggaaagaggtcctattctccagcccccgggaagcagaaaaagcctaatgccatgggtctggccccaacatcatctccgggtgcccctaactcagcccgtgccacacacaacccagtgccctgtgggtcaggccgggggccctgccacctggccaatctcctcagtacattggcgcagagcaaccaaaacagagaccacaagcaggggcccccggaagtgacctgccaaattaggaaaaagacacgaaccctataccgctcagatcagctggaggagctagagaagatattccaagaagaccactatcctgacagtgataaacgccgagagattgcccagacggtgggggtgaccccccagcgcatcatggtaaagggggccggctcactggtggcagggtggagtggcggagggcccaccattgaaacactcgaattgcagagtgagcgctcagcggtagcctgggtgtggttccagaatcgccgggccaagtggcgaaaaatggagaaactgaatgggaaagaaagcaaggacaatcctgcagcccctggccctgccagcagtcaatgcagctctgcagctgagatcctacctgctgtgcccatggagccaaagcctgaccctttccctcaggagtcccctctggatacctttccagagccccccatgctgctgacttctgaccagactttggcccccacccaacccagtgagggtgctcagagggtggtgacccccccactcttcagccccccacctgtgcgaagggccgatcttcctttcccccttggccctgtccacaccccccaactgatgccactgctgatggatgttgctggcagtgacagcagccacaaggacggcccctgtgggtcctgggggacaagcatcaccctgccacccccctgttcatatttggaggagctggagccccaggattaccaacagagcaaccagccaggacccttccagttctcccaggctccacagcccccgcttttccagtcccctcagcccaagttgccctacctccccactttccccttctccatgcccagttcactgacgcttccaccgcccgaagactctctctttatgtttccctgtggccccagcgggggcacatcgcagggctattgcccaggtgcctcctcaggacagatcctgatgcaaccacctgctgggaatataggtacagcctcctggagtgacccctgtttgccagagctgcccttccctggtccgttctgcccacaagctctggggcatcccccaggaggggatggctactttcctgatctatttccaactccctgcccccaggctctgggcaggcagccttcgtcagctctctcatggatgcctgaaggggccagaccagggactgggcccttactcagcaaggcaaaagaggaaccaccagctgcttccctggatcagccctcagcactggaggaggccagaggggatgacaagaatagccatgtcccctagtaatgaactagtccgtaacttgaaagtatttcgatttcttggctttatatatcttgtggaaaggacgaggcaccacagttcatcgcgttggc

SEQ ID NO: 1171 - DNA, 2081 bp, Homo sapiens
  source 1..2081: mol_type = genomic DNA
accgccaccatggctctccttttgacactaacatcaccagacctggagggtacctgggacaccagagacaaggatggcttcaaagcccaggaggggccgcccctggctgtacctgaatttcctgtgtgtggactgtaccggatctacggagtctgtggctctttcagctccttcttcatcatccggtgcagcctttgtgctctggagaccctcaaatcaccccaacatgatcccttagagatacctgaacagtccctcaaactcatacccctggtgtctgggaaaagggaactcacaaggggccagaaagctggagagaagcccctggctgcaggacccggggaggaggaactgctccggggctcagcccctcatgctcaggacactcagagtgaggaactgccaccctcctgcaccatctcaggagagaagaagccgccagcagtctctggagaagccaccggggctgatgctgggagactgtgcccgcccccccgctccagggctccccacaaagacagaactctagcccgctccaggccccagactcagggggaagattgttccctcccagtgggagaggtgaagataggaaagaggtcctattctccagcccccgggaagcagaaaaagcctaatgccatgggtctggccccaacatcatctccgggtgcccctaactcagcccgtgccacacacaacccagtgccctgtgggtcaggccgggggccctgccacctggccaatctcctcagtacattggcgcagagcaaccaaaacagagaccacaagcaggggcccccggaagtgacctgccaaattaggaaaaagacacgaaccctataccgctcagatcagctggaggagctagagaagatattccaagaagaccactatcctgacagtgataaacgccgagagattgcccagacggtgggggtgaccccccagcgcatcatggtgtggttccagaatcgccgggccaagtggcgaaaaatggagaaactgaatgggaaagaaagcaaggacaatcctgcagcccctggccctgccagcagtcaatgcagctctgcagctgagatcctacctgctgtgcccatggagccaaagcctgaccctttccctcaggagtcccctctggatacctttccagagccccccatgctgctgacttctgaccagactttggcccccacccaacccagtgagggtgctcagagggtggtgacccccccactcttcagccccccacctgtgcgaagggccgatcttcctttcccccttggccctgtccacaccccccaactgatgccactgctgatggatgttgctggcagtgacagcagccacaaggacggcccctgtgggtcctgggggacaagcatcaccctgccacccccctgttcatatttggaggagctggagccccaggattaccaacagagcaaccagccaggacccttccagttctcccaggctccacagcccccgcttttccagtcccctcagcccaagttgccctacctccccactttccccttctccatgcccagttcactgacgcttccaccgcccgaagactctctctttatgtttccctgtggccccagcgggggcacatcgcagggctattgcccaggtgcctcctcaggacagatcctgatgcaaccacctgctgggaatataggtacagcctcctggagtgacccctgtttgccagagctgcccttccctggtccgttctgcccacaagctctggggcatcccccaggaggggatggctactttcctgatctatttccaactccctgcccccaggctctgggcaggcagccttcgtcagctctctcatggatgcctgaaggggccagaccagggactgggcccttactcagcaaggcaaaagaggaaccaccagctgcttccctggatcagccctcagcactggaggaggccagaggggatgacaagaatagccatgtcccctagtaatgaactagtccgtaacttgaaagtatttcgatttcttggctttatatatcttgtggaaaggacgatatcctgtggaatctcgggaggag

SEQ ID NO: 1172 - DNA, 2036 bp, Homo sapiens
  source 1..2036: mol_type = genomic DNA
accgccaccatggcagactattcaacagtgcctcccccctcttctggctcagctggtggcggtggtggcggcggtggtggtggaggagttaacgacgctttcaaagatgcactgcagagagcccggcagattgcagcaaaaattggaggtgatgcagggacatcactgaattcaaatgactatggttatgggggacaaaaaagacctttagaagatggagatcaaccagatgctaagaaagttgctcctcaaaatgactcttttggaacacagttaccaccgatgcatcagcagcaaagcagatctgtaatgacagaagaatacaaagttccagatggaatggttggattcataattggcagaggaggtgaacagatctcacgcatacaacaggaatctggatgcaaaatacagatagctcctgacagtggtggccttccagaaaggtcctgtatgttaactggaacacctgaatctgtccagtcagcaaaacggttactggaccagattgttgaaaaaggaagaccagctcctggcttccatcatggcgatggaccgggaaatgcagttcaagaaatcatgattccagctagcaaggcaggattagtcattggaaaagggggagaaactattaaacagcttcaggaacgggctggagttaaaatggttatgattcaagacgggccgcagaacactggtgctgacaaacctcttaggattacaggagacccatataaagttcaacaagccaaggaaatggtgttagagttaattcgtgatcaaggcggtttcagagaagttcggaatgagtatgggtcaagaataggaggaaatgaagggatagatgtccccattccaagatttgctgttggcattgtaataggaagaaatggagagatgatcaaaaaaatacaaaatgatgctggtgttcgcattcagtttaagccagatgatgggacaacacccgaaaggatagcacaaataacaggacctccagaccgatgtcaacatgctgcagaaattattacagaccttcttcgaagtgttcaggctggtaatcctggtggacctggacctggtggtcgaggaagaggtagaggtcaaggcaactggaacatgggaccacctggtggactacaggaatttaattttattgtgccaactgggaaaactggattaataataggaaaaggaggtgaaaccataaaaagcataagccagcagtctggtgcaagaatagaacttcagagaaatcctccaccaaatgcagatcctaatatgaagttatttacaattcgtggcactccacaacagatagactatgctcggcaactcatagaagaaaagattggtggcccagtaaatcctttagggccacctgtaccccatgggccccatggtgtcccaggcccccatggacctcctgggcctccagggcctggaactccaatgggaccatacaaccctgcaccttataatcctggaccaccaggcccggctcctcatggtcctccagccccatatgctccccagggatggggaaatgcatatccacactggcagcagcaggctcctcctgatccagctaaggcaggaacggatccaaattcagcagcttgggctgcttattacgctcactattatcaacagcaagcacagccaccaccagcagcccctgcaggtgcaccaactacaactcaaactaatggacaaggagatcagcagaatccagccccagctggacaggttgattataccaaggcttgggaagagtactacaagaaaatgggtcaggcagttcctgctccgactggggctcctccaggtggtcagccagattatagtgcagcctgggctgagtattatagacaacaagcagcctattatgcccagacaagtccccagggaatgccacagcatcctccagcacctcagggccaatagtaatgaactagtccgtaacttgaaagtatttcgatttcttggctttatatatcttgtggaaaggacgaaggcacgtagaggataggtctacc

SEQ ID NO: 1173 - DNA, 2063 bp, Homo sapiens
  source 1..2063: mol_type = genomic DNA
accgccaccatggcagactattcaacagtgcctcccccctcttctggctcagctggtggcggtggtggcggcggtggtggtggaggagttaacgacgctttcaaagatgcactgcagagagcccggcagattgcagcaaaaattggaggtgatgcagggacatcactgaattcaaatgactatggttatgggggacaaaaaagacctttagaagatggagatcaaccagatgctaagaaagttgctcctcaaaatgactcttttggaacacagttaccaccgatgcatcagcagcaaagatctgtaatgacagaagaatacaaagttccagatggaatggttggattcataattggcagaggaggtgaacagatctcacgcatacaacaggaatctggatgcaaaatacagatagctcctgacagtggtggccttccagaaaggtcctgtatgttaactggaacacctgaatctgtccagtcagcaaaacggttactggaccagattgttgaaaaaggaagaccagctcctggcttccatcatggcgatggaccgggaaatgcagttcaagaaatcatgattccagctagcaaggcaggattagtcattggaaaagggggagaaactattaaacagcttcaggaacgggctggagttaaaatggttatgattcaagacgggccgcagaacactggtgctgacaaacctcttaggattacaggagacccatataaagttcaacaagccaaggaaatggtgttagagttaattcgtgatcaaggcggtttcagagaagttcggaatgagtatgggtcaagaataggaggaaatgaagggatagatgtccccattccaagatttgctgttggcattgtaataggaagaaatggagagatgatcaaaaaaatacaaaatgatgctggtgttcgcattcagtttaagccagatgatgggacaacacccgaaaggatagcacaaataacaggacctccagaccgatgtcaacatgctgcagaaattattacagaccttcttcgaagtgttcaggctggtaatcctggtggacctggacctggtggtcgaggaagaggtagaggtcaaggcaactggaacatgggaccacctggtggactacaggaatttaattttattgtgccaactgggaaaactggattaataataggaaaaggaggtgaaaccataaaaagcataagccagcagtctggtgcaagaatagaacttcagagaaatcctccaccaaatgcagatcctaatatgaagttatttacaattcgtggcactccacaacagatagactatgctcggcaactcatagaagaaaagattggtggcccagtaaatcctttagggccacctgtaccccatgggccccatggtgtcccaggcccccatggacctcctgggcctccagggcctggaactccaatgggaccatacaaccctgcaccttataatcctggaccaccaggcccggctcctcatggtcctccagccccatatgctccccagggatggggaaatgcatatccacactggcagcagcaggctcctcctgatccagctaaggcaggaacggatccaaattcagcagcttgggctgcttattacgctcactattatcaacagcaagcacagccaccaccagcagcccctgcaggtgcaccaactacaactcaaactaatggacaaggagatcagcagaatccagccccagctggacaggttgattataccaaggcttgggaagagtactacaagaaaatgggtcaggcagttcctgctccgactggggctcctccaggtggtcagccagattatagtgcagcctgggctgagtattatagacaacaagcagcctattatgcccagacaagtccccagggaatgccacagcatcctccagcacctcagtgcaggtttgatccagccagtatagaactagctctgtagtaatgaactagtccgtaacttgaaagtatttcgatttcttggctttatatatcttgtggaaaggacgaggtggtaacggcatcttaatgcca

SEQ ID NO: 1174 - DNA, 1394 bp, Homo sapiens
  source 1..1394: mol_type = genomic DNA
accgccaccatggccagctctgctaagtcagctgagatgcccaccatctccaaaaccgttaaccctactcctgatcctcatcaagaatatctggaccctaggattaccattgccttattcgaaattggatcacattccccttcctcctggggctctctccctttcctaaagaatagcagccatcaagttacagaacaacagactgcacagaagtttaacaatctcttaaaagaaattaaagatattcttaaaaatatggcaggttttgaagagaagatcacagaagcaaaagaactttttgaggaaaccaatattactgaggatgtgtcagcccacaaagaaaatatcagaggacttgacaaaatcaatgaaatgttatcaacaaacctgcctgttagtttagccccagagaaagaagacaatgaaaagaaacaggagatgatattggaaaccaatattactgaggatgtgtcagcccacaaagaaaatatcagaggacttgacaaaatcaatgaaatgttatcaacaaacctgcctgttagtttagccccagagaaagaagacaatgaaaagaaacagcagatgataatggaaaaccagaactctgagaacaccgcacaagtttttgcaagagatttggtaaatcgtttagaagaaaaaaaagtccttaacgaaactcaacaaagtcaggaaaaagcaaaaaacagacttaatgttcaagaagaaactatgaaaattaggaacaacatggagcagttactacaggaagcagaacactggagtaaacaacatactgagctcagtaaactgataaaatcctatcagaaatctcagaaagacataagtgaaactcttggaaataatggagtcggtttccaaacccagccaaataatgaagtgtcggctaagcatgagctggaggaacaggtgaagaaactgagccatgacacctattcattgcagttgatggcagctttgctagagaatgaatgccaaatcttacagcagagagtagagattctcaaggaactccatcatcagaaacagggaactctgcaagagaagccaattcagataaactataaacaggacaagaaaaatcagaagccatcagaagcaaagaaagtagaaatgtataagcagaacaagcaagcaatgaagggtacattttggaaaaaagacagatcctgtagaagcctggatgtttgtcttaataagaaagcttgcaatacccagttcaatattcatgttgcaagaaaagctcttaggggaaaaatgaggtcagctagcagcctaagatagtaatgaactagtccgtaacttgaaagtatttcgatttcttggctttatatatcttgtggaaaggacgacgttatatgggtgcggttataaac

SEQ ID NO: 1175 - DNA, 2915 bp, Homo sapiens
  source 1..2915: mol_type = genomic DNA
accgccaccatgactgactccaagtatttcacaaccaataaaaaaggagaaatatttgaactaaaagctgaactcaacaatgaaaagaaagaaaagagaaaggaggctgtgaagaaagtgattgctgctatgaccgtggggaaggatgttagttctctctttccagacgtagtgaactgtatgcagactgacaatctggaactaaagaagcttgtgtatctctacttgatgaactacgccaagagtcagccagacatggccatcatggctgtaaacagctttgtgaaggactgtgaagatcctaatcctttgattcgagccttggcagtcagaaccatggggtgcatccgggtagacaaaattacagaatatctctgtgagccgctccgcaagtgcttgaaggatgaggatccctatgttcggaaaacagcagcagtctgcgtggcaaaactccatgatatcaatgcccaaatggtggaagatcagggatttctggattctctacgggatctcatagcagattcaaatccaatggtggtggctaatgccgtagcggcattatctgaaatcagtgagtctcacccaaacagcaacttacttgatctgaacccacagaacattaataagctgctgacagccctgaatgaatgcactgaatggggccagattttcatcctggactgcctgtctaattacaaccctaaagatgatcgggaggctcagagcatctgtgagcgggtaactccccggctatcccatgccaactcagcagtggtgctttcagcggtaaaagtcctaatgaagtttctagaattgttacctaaggattctgactactacaatatgctgctgaagaagttagcccctccacttgtcactttgctgtctggggagccagaagtgcagtatgtcgccctgaggaacatcaacttaattgtccagaaaaggcctgaaatcttgaagcaggaaatcaaagtcttctttgtgaagtacaatgatcccatctatgttaaactagagaagttggacatcatgattcgtttggcatctcaagccaacattgctcaggttctggcagaactgaaagaatatgctacagaggtggatgttgactttgttcgaaaagctgtgcgggccattggacggtgtgccatcaaggtggagcaatctgcagagcgctgtgtaagcacattgcttgatctaatccagaccaaagtgaattatgtggtccaagaagcaattgttgtcatcagggacatcttccgcaaataccccaacaagtatgaaagtatcatcgccactctgtgtgagaacttagactcgctggatgagccagatgctcgagcagctatgatttggattgtgggagaatatgctgaaagaattgacaatgcagatgagttactagaaagcttcctggagggttttcacgatgaaagcacccaggtgcagctcactctgcttactgccatagtgaagctgtttctcaagaaaccatcagaaacacaggagctagtccagcaggtcttgagtttggcaacacaggattctgataatcctgaccttcgagaccggggctatatttattggcgccttctctcaactgaccctgttacagctaaagaagtagtcttgtctgagaagccactgatctctgaggagacggaccttattgagccaactctgctggatgagctaatctgccacattggttctttggcctctgtgtatcataagcctcccaatgcttttgtggaaggaagtcatggaattcatcgtaaacacttgccaattcatcatgggagcactgatgcaggtgacagccctgttggcactaccactgcaacgaacctggaacagcctcaggttatcccctctcaaggtgatcttctaggggatcttttaaaccttgacctcggtcccccagtcaatgtgccacaggtgtcctccatgcagatgggagcagtggatctcctaggaggaggactagatagtctggtgggacaatccttcatcccatcatcggtgcctgcaacctttgctccttcacctacacctgctgtggtcagcagtggactgaatgacctgtttgaactctccacagggataggcatggcacctggtggatatgtggctcctaaggctgtctggctacctgcagtaaaggctaaaggcttggagatttccggaacatttactcaccgccaagggcacatctatatggaaatgaacttcaccaataaagctctgcagcacatgacagattttgcaatccagtttaacaaaaatagctttggtgtcatccccagcactcctctggccatccatacaccactgatgccaaaccagagcattgatgtctccctgcctctcaataccttgggcccagtcatgaagatggaacctctgaataacctccaggtggctgtgaaaaacaatatcgatgtcttctacttcagctgcctcatcccactcaatgtgctttttgtagaagatggcaaaatggagcgccaggtcttccttgcaacatggaaggatattcccaatgaaaatgaacttcagtttcagattaaggaatgtcatttaaatgctgacactgtttccagcaagttgcaaaacaacaatgtttatactattgccaagaggaatgtggaagggcaggacatgctgtaccaatccctgaagctcactaatggcatttggattttggccgaactacgtatccagccaggaaaccccaattacacgctgtcactgaagtgtagagctcctgaagtctctcaatacatctatcaggtctacgacagcattttgaaaaactagtaatgaactagtccgtaacttgaaagtatttcgatttcttggctttatatatcttgtggaaaggacgaggagggtgccgatgacccatcaaa

SEQ ID NO: 1176 - DNA, 1421 bp, Homo sapiens
  source 1..1421: mol_type = genomic DNA
accgccaccatggcagacccagatgtcctcactgaagttccagcagcattgaagcggttagccaagtatgtgatccggggattttatggcattgagcatgccttggccttggacatcttgatcaggaactcctgtgtgaaagaggaggatatgctggagctgctcaagtttgatcggaagcaacttcgatcagttttgaataatttaaagggagacaagtttatcaaatgcagaatgagggtagagactgctgcagacgggaaaaccactcgccataactactacttcatcaattatcgtactcttgttaatgtggtaaaatataaactggaccacatgagaagaagaattgagaccgatgagagagattcgaccaaccgggcttccttcaaatgtcctgtctgtagtagtactttcacagacttagaagctaatcagctctttgatcctatgacaggaactttccgctgtactttttgccatacagaggtagaagaggatgaatcagcaatgcccaaaaaagatgcacgcacacttttggcaaggtttaatgaacaaattgagcccatttatgcattgcttcgggagacagaggatgtgaacttggcctatgaaatacttgagccagaacccacagaaatcccagccctgaaacagagcaaggaccatgcagcaactactgctggagctgctagcctagcaggtgggcaccaccgggaagcatgggccaccaaaggtccttcctatgaagacttatacactcagaatgttgtcattaacatggatgaccaagaagatcttcatcgagcctcactggaagggaaatctgccaaagagaggcctatttggttgagagaaagcactgtccaaggggcatatggttctgaagatatgaaagaagggggcatagatatggacgcatttcaggagcgtgaggaaggccatgctgggcctgatgacaacgaagaggtcatgcgagcactgctcattcacgagaaaaagacttcctctgccatggctggttcagtgggggcagctgctccagtgaccgctgccaatggcagtgactcagaaagcgagaccagtgagtcagatgatgattctccaccccgtccggcagctgtggctgtgcataaacgagaagaggatgaagaggaagatgacgagtttgaagaagtagcagatgaccccattgtcatggtggctggccgtccgttctcctacagtgaagtgagccaacggccagagctagtggcccagatgacaccagaagaaaaggaagcatatatagcaatgggacaacgcatgtttgaggacctctttgagtagtaatgaactagtccgtaacttgaaagtatttcgatttcttggctttatatatcttgtggaaaggacgatagtagttctcgaactgccggcgc

SEQ ID NO: 1177 - DNA, 1607 bp, Homo sapiens
  source 1..1607: mol_type = genomic DNA
accgccaccatggaggcttcgcgctgccggctcagtcccagcggcgacagtgtcttccatgaagaaatgatgaagatgcgacaggctaagctggattatcagaggctactacttgagaagaggcaaaggaaaaagcgccttgagccatttatggtgcagcccaatccagaagccaggctacgtcgggcaaagccaagggccagtgatgagcagactcccttggtgaactgtcatactccccacagcaatgtcatcttacatggtattgatggtccagctgctgtcctgaaaccagacgaagttcatgctccatcagtaagctcctctgttgtggaagaagatgctgaaaacaccgtggatactgcttccaagccaggacttcaggagcgtctccaaaagcatgatatctctgaaagtgtgaacttcgatgaggagactgatggaatatcccagtcagcatgtttagaaagacccaattctgcatcaagccagaattcaaccgatacaggcacttccggttctgctactgccgcccaaccagctgataacctcctgggagacatagacgacctggaggactttgtgtatagtcctgcccctcaaggtgtcacagtaagatgtcggataatccgggataaaaggggaatggatcggggtctcttccccacctactatatgtacttggaaaaagaagaaaatcagaagatatttcttcttgcagctagaaagcggaaaaagagcaaaacagccaactaccttatctccattgatccagttgatttatctcgtgaaggagaaagttatgtcggcaagcttagatccaacctcatggggaccaagtttacagtttatgaccgtggcatctgccccatgaagggccggggtttggtaggagcggcccacacccggcaggagctggctgccatctcctatgaaacaaacgtacttggatttaaaggtcctaggaaaatgtctgtgatcattcctggaatgacactgaatcataagcagatcccctatcagccacaaaacaaccatgacagtttgctctcaaggtggcagaacagaactatggaaaatctggttgagctgcacaacaaggcccccgtctggaacagtgacactcagtcctatgtcctcaacttccgtggccgggtcactcaggcgtctgtgaagaacttccagatagtccacaaaaatgaccctgattatatagtcatgcagtttggacgtgtggcagatgacgtgttcacactggattacaactacccactttgtgcagtacaggcctttggcatcggtctttctagctttgacaaatgtatccaaaccttgagaatgcaggagctctgtgagctccaccgtcagcaccattcagctgcatcccttgtgcacagaactgtttgccagcgttgggtgggacacccgtggcggctgctccctcagacctcccttctgtggactgacctctcacctccgcctgttgttcctgcaccacatcagataagcatgtagtaatgaactagtccgtaacttgaaagtatttcgatttcttggctttatatatcttgtggaaaggacgatatagtacgagggcgcataacgcg

SEQ ID NO: 1178 - DNA, 1430 bp, Homo sapiens
  source 1..1430: mol_type = genomic DNA
accgccaccatggaggcttcgcgctgccggctcagtcccagcggcgacagtgtcttccatgaagaaatgatgaagatgcgacaggctaagctggattatcagaggctactacttgagaagaggcaaaggaaaaagcgccttgagccatttatggtgcagcccaatccagaagccaggctacgtcgggcaaagccaagggccagtgatgagcagactcccttggtgaactgtcatactccccacagcaatgtcatcttacatggtattgatggtccagctgctgtcctgaaaccagacgaagttcatgctccatcagtaagctcctctgttgtggaagaagatgctgaaaacaccgtggatactgcttccaagccaggacttcaggagcgtctccaaaagcatgatatctctgaaagtgtgaacttcgatgaggagactgatggaatatcccagtcagcatgtttagaaagacccaattctgcatcaagccagaattcaaccgatacaggcacttccggttctgctactgccgcccaaccagctgataacctcctgggagacatagacgacctggaggactttgtgtatagtcctgcccctcaaggtgtcacagtaagatgtcggataatccgggataaaaggggaatggatcggggtctcttccccacctactatatgtacttggaaaaagaagaaaatcagaagatatttcttcttgcagctagaaagcggaaaaagagcaaaacagccaactaccttatctccattgatccagttgatttatctcgtgaaggagaaagttatgtcggcaagcttagatccaacctcatggggaccaagtttacagtttatgaccgtggcatctgccccatgaagggccggggtttggtaggagcggcccacacccggcaggagctggctgccatctcctatgaaacaaacgtacttggatttaaaggtcctaggaaaatgtctgtgatcattcctggaatgacactgaatcataagcagatcccctatcagccacaaaacaaccatgacagtttgctctcaaggtggcagaacagaactatggaaaatctggttgagctgcacaacaaggcccccgtctggaacagtgacactcagtcctatgtcctcaacttccgtggccgggtcactcaggcgtctgtgaagaacttccagatagtccacaaaaatgaccctgattatatagtcatgcagtttggacgtgtggcagatgacgtgttcacactggattacaactacccactttgtgcagtacaggcctttggcatcggtctttctagctttgacagtaagctggcgtgtgaatagtaatgaactagtccgtaacttgaaagtatttcgatttcttggctttatatatcttgtggaaaggacgacagtccagggcgattgtagtaggg

SEQ ID NO: 1179 - DNA, 1730 bp, Homo sapiens
  source 1..1730: mol_type = genomic DNA
accgccaccatgcctctgcgggatgaaaccctccgagaggtgtgggcctctgacagtgggcatgaagaagaaagcctgagcccggaggccccgcggcgccccaaacagcgacccgccccggcacagaggctaaggaagaagaggacggaggcccccgaatccccctgccccacgggatccaagccccggaagcccggagctgggcggacggggaggccgcgggaggagccttccccagacccagcccaggcccgggcgccgcagacggtctacgccaggttcctcagggaccccgaggccaagaagcgcgacccccgggaaacctttctggtagcccgtgccccagacgcggaggacgaggaggaggaggaagaggaggacgaggaggacgaggaagaggaggcagaggaaaagaaagagaaaatccttctgcctcccaagaagcccctgagagagaagagctccgcagacctgaaggagaggagggccaaggcccagggcccaaggggagacctgggaagccctgaccccccaccgaaacctctgcgtgttaggaataaggaagctccagcaggggaggggaccaagatgagaaagaccaagaagaaagggtctggggaggccgacaaggacccctcagggagcccagccagtgcgaggaagagcccagcagccatgtttctggttggggaaggcagtcctgacaagaaagccctgaagaagaaaggcactcccaaaggcgcgaggaaggaggaagaagaggaggaggaggcagctacggtgataaagaagagcaatcaaaagggcaaagccaaaggaaaaggcaaaaagaaagcgaaggaggagagggccccgtctccccccgtggaggtggacgaaccccgggagtttgtgctccggcctgccccccagggccgcacggtgcgctgccggctgacccgggacaaaaagggcatggatcgaggcatgtatccctcctacttcctgcacctggacacggagaagaaggtgttcctcttggctggcaggaaacgaaaacggagcaagacagccaattacctcatctccatcgaccctaccaatctgtcccgaggaggggagaatttcatcgggaagctgaggtccaacctcctggggaaccgcttcacggtctttgacaacgggcagaacccacagcgtgggtacagcactaatgtggcaagccttcggcaggagctggcagctgtgatctatgaaaccaacgtgctgggcttccgtggcccccggcgcatgaccgtcatcattcctggcatgagtgcggagaacgagagggtccccatccggccccgaaatgctagtgacggcctgctggtgcgctggcagaacaagacgctggagagcctcatagaactgcacaacaagccacctgtctggaacgatgacagtggctcctacaccctcaacttccaaggccgggtcacccaggcctcagtcaagaacttccagattgtccacgctgatgaccccgactatatcgtgctgcagttcggccgcgtggcggaggacgccttcaccctagactaccggtacccgctgtgcgccctgcaggccttcgccatcgccctctccagtttcgacgggaagctggcctgcgagtagtaatgaactagtccgtaacttgaaagtatttcgatttcttggctttatatatcttgtggaaaggacgaggtgcaacgtacggcggcggcttg

SEQ ID NO: 1180 - DNA, 1571 bp, Homo sapiens
  source 1..1571: mol_type = genomic DNA
accgccaccatgcctctgcgggatgaaaccctccgagaggtgtgggcctctgacagtgggcatgaagaagaaagcctgagcccggaggccccgcggcgccccaaacagcgacccgccccggcacagaggctaaggaagaagaggacggaggcccccgaatccccctgccccacgggatccaagccccggaagcccggagaggaggaggaggaagaggaggacgaggaggacgaggaagaggaggcagaggaaaagaaagagaaaatccttctgcctcccaagaagcccctgagagagaagagctccgcagacctgaaggagaggagggccaaggcccagggcccaaggggagacctgggaagccctgaccccccaccgaaacctctgcgtgttaggaataaggaagctccagcaggggaggggaccaagatgagaaagaccaagaagaaagggtctggggaggccgacaaggacccctcagggagcccagccagtgcgaggaagagcccagcagccatgtttctggttggggaaggcagtcctgacaagaaagccctgaagaagaaaggcactcccaaaggcgcgaggaaggaggaagaagaggaggaggaggcagctacggtgataaagaagagcaatcaaaagggcaaagccaaaggaaaaggcaaaaagaaagcgaaggaggagagggccccgtctccccccgtggaggtggacgaaccccgggagtttgtgctccggcctgccccccagggccgcacggtgcgctgccggctgacccgggacaaaaagggcatggatcgaggcatgtatccctcctacttcctgcacctggacacggagaagaaggtgttcctcttggctggcaggaaacgaaaacggagcaagacagccaattacctcatctccatcgaccctaccaatctgtcccgaggaggggagaatttcatcgggaagctgaggtccaacctcctggggaaccgcttcacggtctttgacaacgggcagaacccacagcgtgggtacagcactaatgtggcaagccttcggcaggagctggcagctgtgatctatgaaaccaacgtgctgggcttccgtggcccccggcgcatgaccgtcatcattcctggcatgagtgcggagaacgagagggtccccatccggccccgaaatgctagtgacggcctgctggtgcgctggcagaacaagacgctggagagcctcatagaactgcacaacaagccacctgtctggaacgatgacagtggctcctacaccctcaacttccaaggccgggtcacccaggcctcagtcaagaacttccagattgtccacgctgatgaccccgactatatcgtgctgcagttcggccgcgtggcggaggacgccttcaccctagactaccggtacccgctgtgcgccctgcaggccttcgccatcgccctctccagtttcgacgggaagctggcctgcgagtagtaatgaactagtccgtaacttgaaagtatttcgatttcttggctttatatatcttgtggaaaggacgacaaccgaatttgtgccatatatat

SEQ ID NO: 1181 - DNA, 1124 bp, Homo sapiens
  source 1..1124: mol_type = genomic DNA
accgccaccatggagatctcctctcatcagtctcacctcctgcagcaactgaacgagcagcgcaggcaagatgtattttgtgactgcagtattctagttgaagggaaggtcttcaaagcacatcgaaatgtattattcgctagtagcggctactttaaaatgcttctttctcagaattcaaaggagacgagtcagccaaccacagctacatttcaggctttctcccctgacacttttacagttatcttggacttcgtatattctggcaaactgtctcttactggtcagaatgtcatagaagtgatgtcggctgctagcttccttcagatgactgatgtcataagtgtatgtaagacttttattaaatcttccttagacattagtgagaaagaaaaagatcgctatttcagtctctcagataaagatgccaattctaatggtgtagaacgttcctctttttatagtggtggctggcaagaaggaagcagttctccacgttctcacctaagcccagagcaaggaacaggtataataagtggaaaatcttggaataagtataattatcatccagcctcccagaagaatactcaacaacccttggccaagcatgaaccaaggaaagagtccattaaaaagaccaaacatttgagattgtcacagccttctgaagttactcattataagtcaagcaaacgagaagtacgaacatctgattcttccagccatgtttcccagtctgaagaacaagcacagattgatgctgaaatggactctactcctgttggctatcagtacggtcaaggatctgatgtcacatccaaaagctttccagatgatctgcctcggatgcgattcaagtgcccgtactgcacacatgtggtgaagcggaaggcagacctaaagcgccaccttcgttgtcatacaggagaaaggccctatccatgtcaagcttgtggaaaaagatttagcaggctagaccatctaagtagccattttcgaacaatggagataaggattccagatggcacttagtaatgaactagtccgtaacttgaaagtatttcgatttcttggctttatatatcttgtggaaaggacgatatctctcacctagttggtgcccg

SEQ ID NO: 1182 - DNA, 1427 bp, Homo sapiens
  source 1..1427: mol_type = genomic DNA
accgccaccatggagatctcctctcatcagtctcacctcctgcagcaactgaacgagcagcgcaggcaagatgtattttgtgactgcagtattctagttgaagggaaggtcttcaaagcacatcgaaatgtattattcgctagtagcggctactttaaaatgcttctttctcagaattcaaaggagacgagtcagccaaccacagctacatttcaggctttctcccctgacacttttacagttatcttggacttcgtatattctggcaaactgtctcttactggtcagaatgtcatagaagtgatgtcggctgctagcttccttcagatgactgatgtcataagtgtatgtaagacttttattaaatcttccttagacattagtgagaaagaaaaagatcgctatttcagtctctcagataaagatgccaattctaatggtgtagaacgttcctctttttatagtggtggctggcaagaaggaagcagttctccacgttctcacctaagcccagagcaaggaacaggtataataagtggaaaatcttggaataagtataattatcatccagcctcccagaagaatactcaacaacccttggccaagcatgaaccaaggaaagagtccattaaaaagaccaaacatttgagattgtcacagccttctgaagttactcattataagtcaagcaaacgagaagtacgaacatctgattcttccagccatgtttcccagtctgaagaacaagcacagattgatgctgaaatggactctactcctgttggctatcagtacggtcaaggatctgatgtcacatccaaaagctttccagatgatctgcctcggatgcgattcaagtgcccgtactgcacacatgtggtgaagcggaaggcagacctaaagcgccaccttcgttgtcatacaggagaaaggccctatccatgtcaagcttgtggaaaaagatttagcaggctagaccatctaagtagccattttcgaacaattcaccaggcatgtaaactcatctgcagaaaatgtaaacgtcatgtgacagatctaacagggcaagtggtacaggagggaaccaggcgctacagactgtgtaatgagtgtcttgcagaatttggcatagacagcctccccattgacttggaagctgaacaacatcttatgtccccatcagatggagataaggattccagatggcacttgagtgaagatgagaatagatcctatgtggagattgtagaagatgggtctgctgatctggtcatccaacaggttgatgatagtgaagaagaagaagaaaaagaaattaagcccaacattaggtagtaatgaactagtccgtaacttgaaagtatttcgatttcttggctttatatatcttgtggaaaggacgaccgagggtatgacttccaatacga

SEQ ID NO: 1183 - DNA, 1589 bp, Homo sapiens
  source 1..1589: mol_type = genomic DNA
accgccaccatggagatgcaatcctattatgccaagcttttgggggagctgaatgaacagagaaagagggactttttctgtgactgcagcatcattgtggaagggcggatcttcaaggcccacaggaacattttgtttgctaacagcggctacttccgagccctgctcattcactatatccaggacagcgggcggcatagcaccgcctccttggacattgtcacctctgatgccttctccatcatcttagatttcctctattctgggaagttggatttgtgtggggagaatgtgattgaagtgatgtcggctgccagctacctgcagatgaatgacgtggtgaacttctgcaagacatacattaggtcatccctcgacatttgccgaaagatggagaaggaggctgctgtggctgcagcagtggcggcggcagcggcggcggctgcagcggcggcagcagcggcggctcatcaggttgacagtgaaagccccagttcaggccgggaggggacctcctgtggtaccaagagcttggtctcctctccagccgagggagaaaagagcgtggagtgcctgagagagtccccttgcggtgactgcggagactgccaccccttggaactggtggtgagagacagccttggcggtggctcggctgacagcaacctctctactccacccaaacggatagagcccaaggtggaatttgatgctgatgaagtggaggtggacgttggtgaacagctgcagcagtatgctgccccgctgaacctggcccacgtggaggaggccttgccaagcggccaggcggttgacttggcttacagcaactaccacgtgaagcagttcctggaggcgctcttgcgcaacagcgctgccccgagcaaggatgatgcagaccatcacttttctaggagtttggaaggaagaccagaaggtgcaggagtagccatgagttccatgatggatgtccaggctgactggtatggagaggactcaggtgatgtgctggtggtccccatcaagctccacaagtgtcctttctgcccttacactgccaaacagaagggcatcctcaagcggcacatccgttcacacacaggcgagcggccctacccctgtgagacctgcggcaagaggttcactcgacaagagcacctgcggagccacgcactgagtgtccacagatccaaccgtccaatcatctgcaagggctgcaggagaacattcacgagtcacctgtcccaggggctgcggcgcttcgggctgtgtgacagctgcacctgcgttacagacacacccgatgatgatgatgatttgatgcccatcaaccttagcttggtggaggcttcatctgaaagccaagaaaagagcgacacagacaatgactggccaatctatgtggagtcgggtgaggaaaatgaccctgctggagatgattctgatgacaaaccacaaattcagcctaacttatcagaccgagagacacttacgtagtaatgaactagtccgtaacttgaaagtatttcgatttcttggctttatatatcttgtggaaaggacgatgcaccgtacgtgttgcccaccta

SEQ ID NO: 1184 - DNA, 1373 bp, Homo sapiens
  source 1..1373: mol_type = genomic DNA
accgccaccatggaggacaagcgatcattgagtatggctcgctgtgaagaaagaaattcgaggggacaggatcatggcttggaaagggtgcctttccctccccagttgcagtcagagacctaccttcacccagcagatccttcccctgcctgggacgacccggggtccactgggagccctaacttgaggctgctgacagaagaaatcgctttccaacctctggccgaggaagcttcgttcagaaggccgcaccctgacggtgacgtcccgccccagggagaagataatctcctctccctcccctttccacagaaactgtggagactggtcagcagcaaccagttttcgtccatctggtgggatgacagtggggcttgtagagtgatcaatcaaaaactctttgaaaaggagattctcaaaagggacgtcgcacacaaagtgtttgccacaacttcgataaagagcttcttccgccagctaaacttgtatggcttccgaaaacggcgtcaatgcactttcaggaccttcacccgcattttctccgcaaaaaggctggtctccatcttgaataagttagagttctactgccatccttactttcaaagagactcccctcacctcctcgtgaggatgaagagaagagtgggtgtcaagtctgcaccaagacatcaggaggaggacaagccagaagctgctggatcctgtctggcaccagcagacactgagcaacaagatcacacgtctccgaatgagaatgaccaggtcacaccgcaacaccgggaaccggccggtcccaacacccaaatcaggagtggctctgctccaccagcaactcctgtgatggtgcctgattccgccgtggcgagtgacaacagtccagtgacccagccggccggcgagtggtcagagggcagccaggctcacgtcactccggtggccgctgtccctgggcctgcagcgctgcccttcctctatgtccctggatctcccactcagatgaattcttacgggcctgtggtggcccttcccacagcgtcccgtagtacccttgccatggacaccacaggacttcctgcacctggcatgctgcccttttgccatctctgggtaccggtgaccctagtggctgctggggctgcacagcctgctgcctccatggtcatgttcccccatctcccagctctgcaccaccattgcccccacagccaccgcacgtcacagtacatgccagctagcgatgggccccaggcgtacccagactacgcagaccagagcacatagtaatgaactagtccgtaacttgaaagtatttcgatttcttggctttatatatcttgtggaaaggacgacattgatgacgattatctttatcg

SEQ ID NO: 1185 - DNA, 1280 bp, Homo sapiens
  source 1..1280: mol_type = genomic DNA
accgccaccatggaagaacagcagccggaacctaaaagtcagcgcgactcggccctcggcgcggcggcggcggcgactccgggcggcctcagcctgagcctcagtccgggcgccagcggcagcagcggcagcggcagcgatggagacagcgtgccggtgtccccgcagcctgcgcccccctcgccgcccgcggcgccttgcctgccgcccctggcccaccacccgcacctccccccacaccccccgcccccgccgcctcagcatctcgcggcgcctgctcaccagccgcagccagcggcccagctgcaccgcaccaccaactttttcatcgacaacatcctgaggccggacttcggctgcaaaaaggagcagccgccaccgcagcttctggtggctgcggcggccagaggaggcgcaggaggaggaggccgggtcgagcgtgacagaggccagactgccgcaggtagagaccctgtccacccgttgggcacccgggcgccaggcgctgcctcgctcctgtgcgccccggacgcgaactgtggcccacccgacggctcccagccagccgccgccggcgcgggcgcgtctaaagctgggaacccggctgcggcggcggcggcggccgcggcggcagtggcggcggcggcggcggccgcagcagccaagccctcggacaccggtggcggcggcagtggaggcggcgcggggagccccggagcgcagggcaccaaatacccggagcacggcaacccggctatcctacttatgggctcagccaacggcgggcccgtggtcaaaactgactcgcagcagcctctcgtatggcccgcctgggtgtactgcacacgttattcggatcgtccatcctccggtccgcgcaccaggaagctgaagaagaagaagaacgagaaggaggacaagcggccgcggaccgcgttcacggccgagcagctgcagagactcaaggcggagttccaggcaaaccgctacatcacggagcagcggcggcagaccctggcccaggaactcagcctcaacgagtcccagatcaagatctggttccagaacaagcgcgccaagatcaagaaagccacaggcatcaagaacggcctggcgctgcacctcatggcccagggactgtacaaccactccaccaccacggtccaggacaaagacgagagcgagtagtaatgaactagtccgtaacttgaaagtatttcgatttcttggctttatatatcttgtggaaaggacgattgtggtgtggccaaactgcccac

SEQ ID NO: 1186 - DNA, 1103 bp, Homo sapiens
  source 1..1103: mol_type = genomic DNA
accgccaccatggaggagaatgaccccaagcctggcgaagcagcggcggcggtggagggacagcggcagccggaatccagccccggcggcggctcgggcggcggcggcggtagcagcccgggcgaagcggacaccgggcgccggcgggctctgatgctgcccgcggtcctgcaggcgcccggcaaccaccagcacccgcaccgcatcaccaacttcttcatcgacaacatcctgcggcccgagttcggccggcgaaaggacgcggggacctgctgtgcgggcgcgggaggaggaaggggcggcggagccggcggcgaaggcggcgcgagcggtgcggagggaggcggcggcgcgggcggctcggagcagctcttgggctcgggctcccgagagccccggcagaacccgccatgtgcgcccggcgcgggcgggccgctcccagccgccggcagcgactctccgggtgacggggaaggcggctccaagacgctctcgctgcacggtggcgccaagaaaggcggcgaccccggcggccccctggacgggtcgctcaaggcccgcggcttgggcggcggcgacctgtcggtgagctcggactcggacagctcgcaagccggcgccaacctgggcgcgcagcccatgctctggccggcgtgggtctactgtacgcgctactcggaccggccttcttcaggtcccaggtctcgaaaaccaaagaagaagaacccgaacaaagaggacaagcggccgcgcacggcctttaccgccgagcagctgcagaggctcaaggccgagttccagaccaacaggtacctgacggagcagcggcgccagagcctggcgcaggagctgagcctcaacgagtcacagatcaagatttggttccagaacaagcgcgccaagatcaagaaggccacgggcaacaagaacacgctggccgtgcacctcatggcacagggcttgtacaaccactccaccacagccaaggagggcaagtcggacagcgagtagtaatgaactagtccgtaacttgaaagtatttcgatttcttggctttatatatcttgtggaaaggacgagagcactgtactgcacccgtctca

SEQ ID NO: 1187 - DNA, 1373 bp, Homo sapiens
  source 1..1373: mol_type = genomic DNA
accgccaccatggaggacaagcgatcattgagtatggctcgctgtgaagaaagaaattcgagaggacaggatcatggcttggaaagggtgcctttccctccccagttgcagtcagagacctaccttcacccagcagatccttcccctgcctgggacgacccggggtccactgggagccctaacttgaggctgctgacagaagaaatcgctttccaacctctggccgaggaagcttcgttcagaaggccgcaccctgacggtgacgtcccgccccagggagaagataatctcctctccctcccctttccacagaaactgtggagactggtcagcagcaaccagttttcgtccatctggtgggatgacagtggggcttgtagagtgatcaatcaaaaactctttgaaaaggagattctcaaaagggacgtcgcacacaaagtgtttgccacaacttcgataaagagcttcttccgccagctaaacttgtatggcttccgaaaacggcgtcaatgcactttcaggaccttcacccgcattttctccgcaaaaaggctggtctccatcttgaataagttagagttctactgccatccttactttcaaagagactcccctcacctcctcgtgaggatgaagagaagagtgggtgtcaagtctgcaccaagacatcaggaggaggacaagccagaagctgctggatcctgtctggcaccagcagacactgagcaacaagatcacacgtctccgaatgagaatgaccaggtcacaccgcaacaccgggaaccggccggtcccaacacccaaatcaggagtggctctgctccaccagcaactcctgtgatggtgcctgattccgccgtggcgagtgacaacagtccagtgacccagccggccggcgagtggtcagagggcagccaggctcacgtcactccggtggccgctgtccctgggcctgcagcgctgcccttcctctatgtccctggatctcccactcagatgaattcttacgggcctgtggtggcccttcccacagcgtcccgtagtacccttgccatggacaccacaggacttcctgcacctggcatgctgcccttttgccatctctgggtaccggtgaccctagtggctgctggggctgcacagcctgctgcctccatggtcatgttcccccatctcccagctctgcaccaccattgcccccacagccaccgcacgtcacagtacatgccagctagcgatgggccccaggcgtacccagactacgcagaccagagcacatagtaatgaactagtccgtaacttgaaagtatttcgatttcttggctttatatatcttgtggaaaggacgacattatgtccaatattgggatagg

SEQ ID NO: 1188 - DNA, 1616 bp, Homo sapiens
  source 1..1616: mol_type = genomic DNA
accgccaccatggcctgggtgctcaagatggacgaggtgatcgagtccgggctggtgcacgacttcgacgccagcctctcgggcatcgggcaggaactgggcgccggcgcttacagcatgagtgatgtcttggcattgcccattttcaagcaggaagattccagccttccattggatggtgaaacagagcacccaccctttcagtatgtgatgtgtgctgcaacgtcaccagcagtaaaactgcatgatgaaacgcttacttatttgaaccaaggtcagtcatatgaaattcggatgctggataatcggaaaatgggtgatatgcctgagatcaatggaaaattagtaaagagcatcataagggttgtattccatgacagacggctacaatacacagagcatcagcaacttgaaggatggaagtggaatcgcccaggagacagacttcttgatttagatattccaatgtctgtgggaataattgacacaaggacgaatccaagccagttaaatgcggttgaatttctgtgggacccagcaaaacgcacctctgctttcattcaggtacactgcatcagcacagaatttactccacggaagcacggaggtgaaaagggagtgccctttaggatccaggttgacacctttaagcagaatgaaaatggagaatacacagatcatctacactcagctagctgccaaatcaaagtttttaagcctaaaggtgcagacaggaaacaaaaaactgaccgagagaagatggagaagagaacagctcatgaaaaagaaaagtatcagccgtcctatgataccacaatcctcacagagtgttctccgtggcccgatgcccccacagcctatgtgaataacagcccttccccagcgcccactttcacctccccacagcagagcacttgcagtgtcccagacagcaattcttcttccccaaatcatcagggagatggagcttcacagacctctggtgaacaaattcagccttcagctacgatccaggaaacacagcaatggctgctcaaaaacagattctcttcctacacaagactgttctctaatttttcaggtgccgacttattaaaactgacaaaggaggatttagttcaaatttgtggtgcagccgatggaattcggctctataattcactgaagtcaaggtcggttagaccccgtttaaccatctatgtctgccgggagcagccaagcagcacagtgctgcaagggcagcagcaagctgcaagcagtgcaagcgagaatggcagtggggcaccctatgtttatcatgcaatctacttggaagaaatgattgcctcagaagttgctcgaaaacttgcgctggtgtttaatatccctctccaccaaattaatcaggtttacagacagggtcccaccggtattcacattcttgttagtgatcagatggttcagaattttcaagatgagagttgttttttattctccacagtaaaagctgaaagtagtgatggcatccacataattttgaagtagtaatgaactagtccgtaacttgaaagtatttcgatttcttggctttatatatcttgtggaaaggacgactgagatttcgcacgttaacttgg

SEQ ID NO: 1189 - DNA, 1724 bp, Homo sapiens
  source 1..1724: mol_type = genomic DNA
accgccaccatggcctgggtgctcaagatggacgaggtgatcgagtccgggctggtgcacgacttcgacgccagcctctcgggcatcgggcaggaactgggcgccggcgcttacagcatgagtgatgtcttggcattgcccattttcaagcaggaagattccagccttccattggatggtgaaacagagcacccaccctttcagtatgtgatgtgtgctgcaacgtcaccagcagtaaaactgcatgatgaaacgcttacttatttgaaccaaggtcagtcatatgaaattcggatgctggataatcggaaaatgggtgatatgcctgagatcaatggaaaattagtaaagagcatcataagggttgtattccatgacagacggctacaatacacagagcatcagcaacttgaaggatggaagtggaatcgcccaggagacagacttcttgatttagatattccaatgtctgtgggaataattgacacaaggacgaatccaagccagttaaatgcggttgaatttctgtgggacccagcaaaacgcacctctgctttcattcaggtacactgcatcagcacagaatttactccacggaagcacggaggtgaaaagggagtgccctttaggatccaggttgacacctttaagcagaatgaaaatggagaatacacagatcatctacactcagctagctgccaaatcaaagtttttaagcctaaaggtgcagacaggaaacaaaaaactgaccgagagaagatggagaagagaacagctcatgaaaaagaaaagtatcagccgtcctatgataccacaatcctcacagagatgaggcttgagcctataattgaagatgcagttgaacatgagcagaaaaagtccagcaagcggactttgccagcagactacggtgattctctggcaaagcgaggcagttgttctccgtggcccgatgcccccacagcctatgtgaataacagcccttccccagcgcccactttcacctccccacagcagagcacttgcagtgtcccagacagcaattcttcttccccaaatcatcagggagatggagcttcacagacctctggtgaacaaattcagccttcagctacgatccaggaaacacagcaatggctgctcaaaaacagattctcttcctacacaagactgttctctaatttttcaggtgccgacttattaaaactgacaaaggaggatttagttcaaatttgtggtgcagccgatggaattcggctctataattcactgaagtcaaggtcggttagaccccgtttaaccatctatgtctgccgggagcagccaagcagcacagtgctgcaagggcagcagcaagctgcaagcagtgcaagcgagaatggcagtggggcaccctatgtttatcatgcaatctacttggaagaaatgattgcctcagaagttgctcgaaaacttgcgctggtgtttaatatccctctccaccaaattaatcaggtttacagacagggtcccaccggtattcacattcttgttagtgatcagatggttcagaattttcaagatgagagttgttttttattctccacagtaaaagctgaaagtagtgatggcatccacataattttgaagtagtaatgaactagtccgtaacttgaaagtatttcgatttcttggctttatatatcttgtggaaaggacgacgagaccctatggagcgttaagat

SEQ ID NO: 1190 - DNA, 2984 bp, Homo sapiens
  source 1..2984: mol_type = genomic DNA
accgccaccatggccttgctgggtaagcgctgtgacgtccccaccaacggctgcggacccgaccgctggaactccgcgttcacccgcaaagacgagatcatcaccagcctcgtgtctgccttagactccatgtgctcagcgctgtccaaactgaacgccgaggtggcctgtgtcgccgtgcacgatgagagcgcctttgtggtgggcacagagaaggggagaatgttcctgaatgcccggaaggagctacagtcagacttcctcaggttctgccgagggcccccgtggaaggatccggaggcagagcaccccaagaaggtgcagcggggcgagggtggaggccgtagcctccctcggtcctccctggaacatggctcagatgtgtaccttctgcggaagatggtagaggaggtgtttgatgttctttatagcgaggccctgggaagggccagtgtggtgccactgccctatgagaggctgctcagggagccagggctgctggccgtgcaggggctgcccgaaggcctggccttccgaaggccagccgagtatgaccccaaggccctcatggccatcctggaacacagccaccgcatccgcttcaagctcaagaggccacttgaggatggcgggcgggactcgaaggccctggtggagctgaacggtgtctccctgattcccaaggggtcacgggactgtggcctgcatggccaggcccccaaggtgccaccccaggacctgcccccaaccgccacctcctcctccatggccagcttcctgtacagcacggcgctccccaaccacgccatccgagagctcaagcaggaagcaccttcctgcccccttgcccccagcgacctgggcctgagtcggcccatgccagagcccaaggccaccggtgcccaagacttctccgactgttgtggacagaagcccactgggcctggtgggcctctcatccagaacgtccatgcctccaagcgcattctcttctccatcgtccatgacaagtcagagaagtgggacgccttcataaaggaaaccgaggacatcaacacgctccgggagtgtgtgcagatcctgtttaacagcagatatgcggaagccctgggcctggaccacatggtccccgtgccctaccggaagattgcctgtgacccggaggctgtggagatcgtgggcatcccggacaagatccccttcaagcgcccctgcacttatggagtccccaagctgaagcggatcctggaggagcgccatagtatccacttcatcattaagaggatgtttgatgagcgaattttcacagggaacaagtttaccaaagacaccacgaagctggagccagccagcccgccagaggacacctctgcagaggtctctagggccaccgtccttgaccttgctgggaatgctcggtcagacaagggcagcatgtctgaagactgtgggccaggaacctccggggagctgggcgggctgaggccgatcaaaattgagccagaggatctggacatcattcaggtcaccgtcccagacccctcgccaacctctgaggaaatgacagactcgatgcctgggcacctgccatcggaggattctggttatgggatggagatgctgacagacaaaggtctgagtgaggacgcgcggcccgaggagaggcccgtggaggacagccacggtgacgtgatccggcccctgcggaagcaggtggagctgctcttcaacacacgatacgccaaggccattggcatctcggagcccgtcaaggtgccgtactccaagtttctgatgcacccggaggagctgtttgtggtgggactgcctgaaggcatctccctccgcaggcccaactgcttcgggatcgccaagctccggaagattctggaggccagcaacagcatccagtttgtcatcaagaggcccgagctgctcactgagggagtcaaagagcccatcatggatagtcaagagagggattccggggaccctctggtggacgagagcctgaagagacagggctttcaagaaaattatgacgcgaggctctcacggatcgacatcgccaacacactaagggagcaggtccaggaccttttcaataagaaatacggggaagccttgggcatcaagtacccggtccaggtcccctacaagcggatcaagagtaaccccggctccgtgatcatcgaggggctgcccccaggaatcccgttccgaaagccctgtaccttcggctcccagaacctggagaggattcttgctgtggctgacaagatcaagttcacagtcaccaggcctttccaaggactcatcccaaagcctgatgaagatgacgccaacagactcggggagaaggtgatcctgcgggagcaggtgaaggaactcttcaacgagaaatacggtgaggccctgggcctgaaccggccggtgctggtcccttataaactaatccgggacagcccagacgccgtggaggtcacgggtctgcctgatgacatccccttccggaaccccaacacgtacgacatccaccggctggagaagatcctgaaggcccgagagcatgtccgcatggtcatcattaaccagctccaaccctttgcagaaatctgcaatgatgccaaggtgccagccaaagacagcagcattcccaagcgcaagagaaagcgggtctcggaaggaaattccgtctcctcttcctcctcgtcttcctcttcctcgtcctctaacccggattcagtggcatcggccaaccagatctcactcgtggtaaagttgcaccgatttggactccggcactcatctctgtggccctcacccctctgtctggcagggccgtctactctgggatgtgggcccaggggacggggaggcactgggctttagtaatgaactagtccgtaacttgaaagtatttcgatttcttggctttatatatcttgtggaaaggacgactgcctgactacaagagatgcttg

SEQ ID NO: 1191 - DNA, 2936 bp, Homo sapiens
  source 1..2936: mol_type = genomic DNA
accgccaccatggccttgctgggtaagcgctgtgacgtccccaccaacggctgcggacccgaccgctggaactccgcgttcacccgcaaagacgagatcatcaccagcctcgtgtctgccttagactccatgtgctcagcgctgtccaaactgaacgccgaggtggcctgtgtcgccgtgcacgatgagagcgcctttgtggtgggcacagagaaggggagaatgttcctgaatgcccggaaggagctacagtcagacttcctcaggttctgccgagggcccccgtggaaggatccggaggcagagcaccccaagaaggtgcagcggggcgagggtggaggccgtagcctccctcggtcctccctggaacatggctcagatgtgtaccttctgcggaagatggtagaggaggtgtttgatgttctttatagcgaggccctgggaagggccagtgtggtgccactgccctatgagaggctgctcagggagccagggctgctggccgtgcaggggctgcccgaaggcctggccttccgaaggccagccgagtatgaccccaaggccctcatggccatcctggaacacagccaccgcatccgcttcaagctcaagaggccacttgaggatggcgggcgggactcgaaggccctggtggagctgaacggtgtctccctgattcccaaggggtcacgggactgtggcctgcatggccaggcccccaaggtgccaccccaggacctgcccccaaccgccacctcctcctccatggccagcttcctgtacagcacggcgctccccaaccacgccatccgagagctcaagcaggaagcaccttcctgcccccttgcccccagcgacctgggcctgagtcggcccatgccagagcccaaggccaccggtgcccaagacttctccgactgttgtggacagaagcccactgggcctggtgggcctctcatccagaacgtccatgcctccaagcgcattctcttctccatcgtccatgacaagtcagagaagtgggacgccttcataaaggaaaccgaggacatcaacacgctccgggagtgtgtgcagatcctgtttaacagcagatatgcggaagccctgggcctggaccacatggtccccgtgccctaccggaagattgcctgtgacccggaggctgtggagatcgtgggcatcccggacaagatccccttcaagcgcccctgcacttatggagtccccaagctgaagcggatcctggaggagcgccatagtatccacttcatcattaagaggatgtttgatgagcgaattttcacagggaacaagtttaccaaagacaccacgaagctggagccagccagcccgccagaggacacctctgcagaggtctctagggccaccgtccttgaccttgctgggaatgctcggtcagacaagggcagcatgtctgaagactgtgggccaggaacctccggggagctgggcgggctgaggccgatcaaaattgagccagaggatctggacatcattcaggtcaccgtcccagacccctcgccaacctctgaggaaatgacagactcgatgcctgggcacctgccatcggaggattctggttatgggatggagatgctgacagacaaaggtctgagtgaggacgcgcggcccgaggagaggcccgtggaggacagccacggtgacgtgatccggcccctgcggaagcaggtggagctgctcttcaacacacgatacgccaaggccattggcatctcggagcccgtcaaggtgccgtactccaagtttctgatgcacccggaggagctgtttgtggtgggactgcctgaaggcatctccctccgcaggcccaactgcttcgggatcgccaagctccggaagattctggaggccagcaacagcatccagtttgtcatcaagaggcccgagctgctcactgagggagtcaaagagcccatcatggatagtcaagagagggattccggggaccctctggtggacgagagcctgaagagacagggctttcaagaaaattatgacgcgaggctctcacggatcgacatcgccaacacactaagggagcaggtccaggaccttttcaataagaaatacggggaagccttgggcatcaagtacccggtccaggtcccctacaagcggatcaagagtaaccccggctccgtgatcatcgaggggctgcccccaggaatcccgttccgaaagccctgtaccttcggctcccagaacctggagaggattcttgctgtggctgacaagatcaagttcacagtcaccaggcctttccaaggactcatcccaaagcctgatgaagatgacgccaacagactcggggagaaggtgatcctgcgggagcaggtgaaggaactcttcaacgagaaatacggtgaggccctgggcctgaaccggccggtgctggtcccttataaactaatccgggacagcccagacgccgtggaggtcacgggtctgcctgatgacatccccttccggaaccccaacacgtacgacatccaccggctggagaagatcctgaaggcccgagagcatgtccgcatggtcatcattaaccagctccaaccctttgcagaaatctgcaatgatgccaaggtgccagccaaagacagcagcattcccaagcgcaagagaaagcgggtctcggaaggaaattccgtctcctcttcctcctcgtcttcctcttcctcgtcctctaacccggattcagtggcatcggccaaccagatctcactcgtgcaatggccaatgtacatggtggactatgccggcctgaacgtgcagctcccgggacctcttaattactagtaatgaactagtccgtaacttgaaagtatttcgatttcttggctttatatatcttgtggaaaggacgagctatagccaaggctccctaaagt

SEQ ID NO: 1192 - DNA, 2981 bp, Homo sapiens
  source 1..2981: mol_type = genomic DNA
accgccaccatggccttgctgggtaagcgctgtgacgtccccaccaacggctgcggacccgaccgctggaactccgcgttcacccgcaaagacgagatcatcaccagcctcgtgtctgccttagactccatgtgctcagcgctgtccaaactgaacgccgaggtggcctgtgtcgccgtgcacgatgagagcgcctttgtggtgggcacagagaaggggagaatgttcctgaatgcccggaaggagctacagtcagacttcctcaggttctgccgagggcccccgtggaaggatccggaggcagagcaccccaagaaggtgcagcggggcgagggtggaggccgtagcctccctcggtcctccctggaacatggctcagatgtgtaccttctgcggaagatggtagaggaggtgtttgatgttctttatagcgaggccctgggaagggccagtgtggtgccactgccctatgagaggctgctcagggagccagggctgctggccgtgcaggggctgcccgaaggcctggccttccgaaggccagccgagtatgaccccaaggccctcatggccatcctggaacacagccaccgcatccgcttcaagctcaagaggccacttgaggatggcgggcgggactcgaaggccctggtggagctgaacggtgtctccctgattcccaaggggtcacgggactgtggcctgcatggccaggcccccaaggtgccaccccaggacctgcccccaaccgccacctcctcctccatggccagcttcctgtacagcacggcgctccccaaccacgccatccgagagctcaagcaggaagcaccttcctgcccccttgcccccagcgacctgggcctgagtcggcccatgccagagcccaaggccaccggtgcccaagacttctccgactgttgtggacagaagcccactgggcctggtgggcctctcatccagaacgtccatgcctccaagcgcattctcttctccatcgtccatgacaagtcagagaagtgggacgccttcataaaggaaaccgaggacatcaacacgctccgggagtgtgtgcagatcctgtttaacagcagatatgcggaagccctgggcctggaccacatggtccccgtgccctaccggaagattgcctgtgacccggaggctgtggagatcgtgggcatcccggacaagatccccttcaagcgcccctgcacttatggagtccccaagctgaagcggatcctggaggagcgccatagtatccacttcatcattaagaggatgtttgatgagcgaattttcacagggaacaagtttaccaaagacaccacgaagctggagccagccagcccgccagaggacacctctgcagaggtctctagggccaccgtccttgaccttgctgggaatgctcggtcagacaagggcagcatgtctgaagactgtgggccaggaacctccggggagctgggcgggctgaggccgatcaaaattgagccagaggatctggacatcattcaggtcaccgtcccagacccctcgccaacctctgaggaaatgacagactcgatgcctgggcacctgccatcggaggattctggttatgggatggagatgctgacagacaaaggtctgagtgaggacgcgcggcccgaggagaggcccgtggaggacagccacggtgacgtgatccggcccctgcggaagcaggtggagctgctcttcaacacacgatacgccaaggccattggcatctcggagcccgtcaaggtgccgtactccaagtttctgatgcacccggaggagctgtttgtggtgggactgcctgaaggcatctccctccgcaggcccaactgcttcgggatcgccaagctccggaagattctggaggccagcaacagcatccagtttgtcatcaagaggcccgagctgctcactgagggagtcaaagagcccatcatggatagtcaaggaactgcctcctcacttggcttctctccccctgccctgcccccagagagggattccggggaccctctggtggacgagagcctgaagagacagggctttcaagaaaattatgacgcgaggctctcacggatcgacatcgccaacacactaagggagcaggtccaggaccttttcaataagaaatacggggaagccttgggcatcaagtacccggtccaggtcccctacaagcggatcaagagtaaccccggctccgtgatcatcgaggggctgcccccaggaatcccgttccgaaagccctgtaccttcggctcccagaacctggagaggattcttgctgtggctgacaagatcaagttcacagtcaccaggcctttccaaggactcatcccaaagcctgatgaagatgacgccaacagactcggggagaaggtgatcctgcgggagcaggtgaaggaactcttcaacgagaaatacggtgaggccctgggcctgaaccggccggtgctggtcccttataaactaatccgggacagcccagacgccgtggaggtcacgggtctgcctgatgacatccccttccggaaccccaacacgtacgacatccaccggctggagaagatcctgaaggcccgagagcatgtccgcatggtcatcattaaccagctccaaccctttgcagaaatctgcaatgatgccaaggtgccagccaaagacagcagcattcccaagcgcaagagaaagcgggtctcggaaggaaattccgtctcctcttcctcctcgtcttcctcttcctcgtcctctaacccggattcagtggcatcggccaaccagatctcactcgtgcaatggccaatgtacatggtggactatgccggcctgaacgtgcagctcccgggacctcttaattactagtaatgaactagtccgtaacttgaaagtatttcgatttcttggctttatatatcttgtggaaaggacgagctggtggagaacttctcatcgta

SEQ ID NO: 1193 - DNA, 3032 bp, Homo sapiens
  source 1..3032: mol_type = genomic DNA
accgccaccatggccttgctgggtaagcgctgtgacgtccccaccaacggctgcggacccgaccgctggaactccgcgttcacccgcaaagacgagatcatcaccagcctcgtgtctgccttagactccatgtgctcagcgctgtccaaactgaacgccgaggtggcctgtgtcgccgtgcacgatgagagcgcctttgtggtgggcacagagaaggggagaatgttcctgaatgcccggaaggagctacagtcagacttcctcaggttctgcctctccgcagctcagcacagggcagcgacatcccagctcgaaggccgggtggtgagacgggtgctcactgtggcctcgcgtgctctgtgtcccacaggagggcccccgtggaaggatccggaggcagagcaccccaagaaggtgcagcggggcgagggtggaggccgtagcctccctcggtcctccctggaacatggctcagatgtgtaccttctgcggaagatggtagaggaggtgtttgatgttctttatagcgaggccctgggaagggccagtgtggtgccactgccctatgagaggctgctcagggagccagggctgctggccgtgcaggggctgcccgaaggcctggccttccgaaggccagccgagtatgaccccaaggccctcatggccatcctggaacacagccaccgcatccgcttcaagctcaagaggccacttgaggatggcgggcgggactcgaaggccctggtggagctgaacggtgtctccctgattcccaaggggtcacgggactgtggcctgcatggccaggcccccaaggtgccaccccaggacctgcccccaaccgccacctcctcctccatggccagcttcctgtacagcacggcgctccccaaccacgccatccgagagctcaagcaggaagcaccttcctgcccccttgcccccagcgacctgggcctgagtcggcccatgccagagcccaaggccaccggtgcccaagacttctccgactgttgtggacagaagcccactgggcctggtgggcctctcatccagaacgtccatgcctccaagcgcattctcttctccatcgtccatgacaagtcagagaagtgggacgccttcataaaggaaaccgaggacatcaacacgctccgggagtgtgtgcagatcctgtttaacagcagatatgcggaagccctgggcctggaccacatggtccccgtgccctaccggaagattgcctgtgacccggaggctgtggagatcgtgggcatcccggacaagatccccttcaagcgcccctgcacttatggagtccccaagctgaagcggatcctggaggagcgccatagtatccacttcatcattaagaggatgtttgatgagcgaattttcacagggaacaagtttaccaaagacaccacgaagctggagccagccagcccgccagaggacacctctgcagaggtctctagggccaccgtccttgaccttgctgggaatgctcggtcagacaagggcagcatgtctgaagactgtgggccaggaacctccggggagctgggcgggctgaggccgatcaaaattgagccagaggatctggacatcattcaggtcaccgtcccagacccctcgccaacctctgaggaaatgacagactcgatgcctgggcacctgccatcggaggattctggttatgggatggagatgctgacagacaaaggtctgagtgaggacgcgcggcccgaggagaggcccgtggaggacagccacggtgacgtgatccggcccctgcggaagcaggtggagctgctcttcaacacacgatacgccaaggccattggcatctcggagcccgtcaaggtgccgtactccaagtttctgatgcacccggaggagctgtttgtggtgggactgcctgaaggcatctccctccgcaggcccaactgcttcgggatcgccaagctccggaagattctggaggccagcaacagcatccagtttgtcatcaagaggcccgagctgctcactgagggagtcaaagagcccatcatggatagtcaagagagggattccggggaccctctggtggacgagagcctgaagagacagggctttcaagaaaattatgacgcgaggctctcacggatcgacatcgccaacacactaagggagcaggtccaggaccttttcaataagaaatacggggaagccttgggcatcaagtacccggtccaggtcccctacaagcggatcaagagtaaccccggctccgtgatcatcgaggggctgcccccaggaatcccgttccgaaagccctgtaccttcggctcccagaacctggagaggattcttgctgtggctgacaagatcaagttcacagtcaccaggcctttccaaggactcatcccaaagcctgatgaagatgacgccaacagactcggggagaaggtgatcctgcgggagcaggtgaaggaactcttcaacgagaaatacggtgaggccctgggcctgaaccggccggtgctggtcccttataaactaatccgggacagcccagacgccgtggaggtcacgggtctgcctgatgacatccccttccggaaccccaacacgtacgacatccaccggctggagaagatcctgaaggcccgagagcatgtccgcatggtcatcattaaccagctccaaccctttgcagaaatctgcaatgatgccaaggtgccagccaaagacagcagcattcccaagcgcaagagaaagcgggtctcggaaggaaattccgtctcctcttcctcctcgtcttcctcttcctcgtcctctaacccggattcagtggcatcggccaaccagatctcactcgtgcaatggccaatgtacatggtggactatgccggcctgaacgtgcagctcccgggacctcttaattactagtaatgaactagtccgtaacttgaaagtatttcgatttcttggctttatatatcttgtggaaaggacgaccgcctagtaggcagagccttaat

SEQ ID NO: 1194 - DNA, 2951 bp, Homo sapiens
  source 1..2951: mol_type = genomic DNA
accgccaccatggcccaggtagcagtgtccaccctgcctgttgaagaagagtcctcctcagagaccaggatggtggtgacattcctcgtgtctgccctcgaatccatgtgtaaagaactggccaagtccaaggcagaagtggcctgcatcgcagtgtacgaaacagacgtgtttgtcgtcggaaccgagagaggatgcgcttttgttaatgccaggacggattttcagaaagattttgcaaaatactgcgttgcagagggactgtgtgaggtgaaacctccctgccctgtgaacgggatgcaggtccactcaggcgaaacggaaatactcaggaaggcagtggaggactatttctgcttttgttatggtaaagccttagggacaacagtgatggtgcctgttccctatgagaagatgctgcgagaccagtcggctgtggtagtgcaggggcttccggaaggcgttgcctttcaacaccctgagaattacgaccttgcaaccctgaaatggattttggagaacaaagcagggatttcattcatcataaatagacccttcctaggaccagagagtcagctgggtggccctgggatggtaacagatgcggagagatccatagtatcaccaagtgaaagctgcggccccatcaatgtgaaaactgaacccatggaagattctggcatttcactgaaagcagaagctgtctcagtcaagaaagaatcagaagatcctaattactatcaatataatatgcaaggaagccacccttcttccacaagcaatgaagtaatagaaatggaattaccaatggaagattccactccgctggtcccttcagaagaaccaaatgaggaccctgaagccgaggtgaaaatcgaaggaaacacaaattcatccagtgttacaaattctgcagcaggtgttgaagatcttaacatcgttcaagtgactgttccagataatgagaaggaaagattatcaagcattgaaaagattaaacagctaagagaacaagttaatgacctctttagccgaaaatttggtgaagcaattggcgtggatttccctgtgaaagttccctacaggaagatcacattcaaccctggctgtgtggtgattgatggcatgcccccgggggtggtattcaaggcccccggctatctggaaatcagttccatgaggaggatcttggaggcagctgagtttatcaaattcacagtcatcaggccgcttccagggcttgagctcagtaatgtgggaaaacgcaagatagaccaggagggccgtgtgtttcaagaaaagtgggagagagcgtatttcttcgtggaagtacagaatattccaacatgtctcatatgcaaacaaagcatgtctgtgtccaaagaatataacctaagacgccactatcaaaccaatcacagcaagcattatgaccagtatatggaaagaatgcgtgacgagaagcttcacgagctgaaaaaagggctcaggaagtatctcttaggctcatcagacaccgagtgtcccgagcaaaaacaagtgtttgcaaacccaagtccaacccagaaatcccccgtgcagcctgtagaggacctagctgggaacttatgggagaagttacgtgaaaaaatcaggtcttttgtggcatattctatcgcaatcgatgagatcacggatataaataataccacccagttggccatattcatccgtggtgtcgatgagaatttcgatgtgtccgaagaacttctggacacggtgcccatgacgggtacaaaatctggcaacgagatcttttcgcgtgttgagaaaagcctgaaaaacttctgtatcgactggtcgaaattagtaagcgtggcctccactggcaccccagcgatggtggatgccaataacgggcttgtcacaaaactgaagtccagggtggcgacgttctgcaagggtgcggaactgaagtccatctgttgtataattcatccggaatcactctgtgctcagaagttgaagatggaccacgtcatggacgtggtagtgaagtccgtgaactggatatgctcccggggactgaaccacagtgagttcacaaccttgctctatgagctggacagccagtatggtagcctcctgtactacacggagattaagtggctcagtcgcgggctcgtgctaaagagatttttcgaatccttggaagaaatcgactccttcatgtcatccagagggaaacccctgcctcaactgagctccatagattggatccgagacctggccttcttggttgacatgacgatgcatctgaacgctttgaacatctctctccaaggacactcccaaatcgtcacgcagatgtatgacctgatccgggcgttcctagcaaaactgtgcctctgggagactcatttgacgaggaataatctggcccactttcccaccctgaaattggcttccagaaatgaaagcgatggcctgaactacattcccaaaatcgcggaactccagaccgaattccagaaaaggctgtctgatttcaaactctacgaaagcgaactgactctgttcagctccccgttctccacgaagatcgacagtgtgcacgaggagctccagatggaggttatcgacctgcaatgcaacacggtcctgaagacgaaatacgacaaggtgggaataccagaattctacaagtacctctggggtagctacccgaaatacaagcaccattgcgcaaagattctttccatgttcgggagcacctacatctgcgaacagctgttctccattatgaaactgagcaaaacaaaatactgctcccagttaaaggattcccagtgggattctgtactccacatcgcaacgtagtaatgaactagtccgtaacttgaaagtatttcgatttcttggctttatatatcttgtggaaaggacgatgagggttacctgtgatatccgcg

SEQ ID NO: 1195 - DNA, 428 bp, Homo sapiens
  source 1..428: mol_type = genomic DNA
accgccaccatggcccaggtagcagtgtccaccctgcctgttgaagaagagtcctcctcagagaccaggatggtggtgacattcctcgtgtctgccctcgaatccatgtgtaaagaactggccaagtccaaggcagaagtggcctgcatcgcagtgtacgaaacagacgtgtttgtcgtcggaaccgagagaggatgcgcttttgttaatgccaggacggattttcagaaagattttgcaaaatactgtaggtgttttaattttatcctttgtattcccaatctcaaaaggatcgcaggcaagacttccacagtattttcttctaagctatcatagtaatgaactagtccgtaacttgaaagtatttcgatttcttggctttatatatcttgtggaaaggacgagtttgaattcatgcagcgaccatt

SEQ ID NO: 1196 - DNA, 2714 bp, Homo sapiens
  source 1..2714: mol_type = genomic DNA
accgccaccatgacagctgacaaggagaagaaaaggagtagctcggagaggaggaaggagaagtcccgggatgctgcgcggtgccggcggagcaaggagacggaggtgttctatgagctggcccatgagctgcctctgccccacagtgtgagctcccatctggacaaggcctccatcatgcgactggcaatcagcttcctgcgaacacacaagctcctctcctcagtttgctctgaaaacgagtccgaagccgaagctgaccagcagatggacaacttgtacctgaaagccttggagggtttcattgccgtggtgacccaagatggcgacatgatctttctgtcagaaaacatcagcaagttcatgggacttacacaggtggagctaacaggacatagtatctttgacttcactcatccctgcgaccatgaggagattcgtgagaacctgagtctcaaaaatggctctggttttgggaaaaaaagcaaagacatgtccacagagcgggacttcttcatgaggatgaagtgcacggtcaccaacagaggccgtactgtcaacctcaagtcagccacctggaaggtcttgcactgcacgggccaggtgaaagtctacaacaactgccctcctcacaatagtctgtgtggctacaaggagcccctgctgtcctgcctcatcatcatgtgtgaaccaatccagcacccatcccacatggacatccccctggatagcaagaccttcctgagccgccacagcatggacatgaagttcacctactgtgatgacagaatcacagaactgattggttaccaccctgaggagctgcttggccgctcagcctatgaattctaccatgcgctagactccgagaacatgaccaagagtcaccagaacttgtgcaccaagggtcaggtagtaagtggccagtaccggatgctcgcaaagcatgggggctacgtgtggctggagacccaggggacggtcatctacaaccctcgcaacctgcagccccagtgcatcatgtgtgtcaactacgtcctgagtgagattgagaagaatgacgtggtgttctccatggaccagactgaatccctgttcaagccccacctgatggccatgaacagcatctttgatagcagtggcaagggggctgtgtctgagaagagtaacttcctattcaccaagctaaaggaggagcccgaggagctggcccagctggctcccaccccaggagacgccatcatctctctggatttcgggaatcagaacttcgaggagtcctcagcctatggcaaggccatcctgcccccgagccagccatgggccacggagttgaggagccacagcacccagagcgaggctgggagcctgcctgccttcaccgtgccccaggcagctgccccgggcagcaccacccccagtgccaccagcagcagcagcagctgctccacgcccaatagccctgaagactattacacatctttggataacgacctgaagattgaagtgattgagaagctcttcgccatggacacagaggccaaggaccaatgcagtacccagacggatttcaatgagctggacttggagacactggcaccctatatccccatggacggggaagacttccagctaagccccatctgccccgaggagcggctcttggcggagaacccacagtccaccccccagcactgcttcagtgccatgacaaacatcttccagccactggcccctgtagccccgcacagtcccttcctcctggacaagtttcagcagcagctggagagcaagaagacagagcccgagcaccggcccatgtcctccatcttctttgatgccggaagcaaagcatccctgccaccgtgctgtggccaggccagcacccctctctcttccatggggggcagatccaatacccagtggcccccagatccaccattacattttgggcccacaaagtgggccgtcggggatcagcgcacagagttcttgggagcagcgccgttggggccccctgtctctccaccccatgtctccaccttcaagacaaggtctgcaaagggttttggggctcgaggcccagacgtgctgagtccggccatggtagccctctccaacaagctgaagctgaagcgacagctggagtatgaagagcaagccttccaggacctgagcgggggggacccacctggtggcagcacctcacatttgatgtggaaacggatgaagaacctcaggggtgggagctgccctttgatgccggacaagccactgagcgcaaatgtacccaatgataagttcacccaaaaccccatgaggggcctgggccatcccctgagacatctgccgctgccacagcctccatctgccatcagtcccggggagaacagcaagagcaggttccccccacagtgctacgccacccagtaccaggactacagcctgtcgtcagcccacaaggtgtcaggcatggcaagccggctgctcgggccctcatttgagtcctacctgctgcccgaactgaccagatatgactgtgaggtgaacgtgcccgtgctgggaagctccacgctcctgcaaggaggggacctcctcagagccctggaccaggccacctagtaatgaactagtccgtaacttgaaagtatttcgatttcttggctttatatatcttgtggaaaggacgaattatcgtggatcaagtttccatc

SEQ ID NO: 1197 - DNA, 428 bp, Homo sapiens
  source 1..428: mol_type = genomic DNA
accgccaccatgatcacatcccagggatcagtgtcgtttagggatgtgactgtgggcttcactcaagaggagtggcagcatctggaccctgctcagaggaccctgtacagggatgtgatgctggagaactacagccaccttgtctcagtagggtattgcattcctaaaccagaagtgattctcaagttggagaaaggcgaggagccatggatattagaggaaaaatttccaagccagagtcatctgggctccacaaggctgacttcaggacctgggcctgcatggatttgtgccgagaccagctcggtcgtggagactccaaccgagcggcactagtaatgaactagtccgtaacttgaaagtatttcgatttcttggctttatatatcttgtggaaaggacgatcagctatgcggcgctaagacgag

SEQ ID NO: 1198 - DNA, 7430 bp, Homo sapiens
  source 1..7430: mol_type = genomic DNA
accgccaccatggctgagaacttgctggacggaccgcccaaccccaaaagagccaaactcagctcgcccggtttctcggcgaatgacagcacagattttggatcattgtttgacttggaaaatgatcttcctgatgagctgatacccaatggaggagaattaggccttttaaacagtgggaaccttgttccagatgctgcttccaaacataaacaactgtcggagcttctacgaggaggcagcggctctagtatcaacccaggaataggaaatgtgagcgccagcagccccgtgcagcagggcctgggtggccaggctcaagggcagccgaacagtgctaacatggccagcctcagtgccatgggcaagagccctctgagccagggagattcttcagcccccagcctgcctaaacaggcagccagcacctctgggcccacccccgctgcctcccaagcactgaatccgcaagcacaaaagcaagtggggctggcgactagcagccctgccacgtcacagactggacctggtatctgcatgaatgctaactttaaccagacccacccaggcctcctcaatagtaactctggccatagcttaattaatcaggcttcacaagggcaggcgcaagtcatgaatggatctcttggggctgctggcagaggaaggggagctggaatgccgtaccctactccagccatgcagggcgcctcgagcagcgtgctggctgagaccctaacgcaggtttccccgcaaatgactggtcacgcgggactgaacaccgcacaggcaggaggcatggccaagatgggaataactgggaacacaagtccatttggacagccctttagtcaagctggagggcagccaatgggagccactggagtgaacccccagttagccagcaaacagagcatggtcaacagtttgcccaccttccctacagatatcaagaatacttcagtcaccaacgtgccaaatatgtctcagatgcaaacatcagtgggaattgtacccacacaagcaattgcaacaggccccactgcagatcctgaaaaacgcaaactgatacagcagcagctggttctactgcttcatgctcataagtgtcagagacgagagcaagcaaacggagaggttcgggcctgctcgctcccgcattgtcgaaccatgaaaaacgttttgaatcacatgacgcattgtcaggctgggaaagcctgccaagttgcccattgtgcatcttcacgacaaatcatctctcattggaagaactgcacacgacatgactgtcctgtttgcctccctttgaaaaatgccagtgacaagcgaaaccaacaaaccatcctggggtctccagctagtggaattcaaaacacaattggttctgttggcacagggcaacagaatgccacttctttaagtaacccaaatcccatagaccccagctccatgcagcgagcctatgctgctctcggactcccctacatgaaccagccccagacgcagctgcagcctcaggttcctggccagcaaccagcacagcctcaaacccaccagcagatgaggactctcaaccccctgggaaataatccaatgaacattccagcaggaggaataacaacagatcagcagcccccaaacttgatttcagaatcagctcttccgacttccctgggggccacaaacccactgatgaacgatggctccaactctggtaacattggaaccctcagcactataccaacagcagctcctccttctagcaccggtgtaaggaaaggctggcacgaacatgtcactcaggacctgcggagccatctagtgcataaactcgtccaagccatcttcccaacacctgatcccgcagctctaaaggatcgccgcatggaaaacctggtagcctatgctaagaaagtggaaggggacatgtacgagtctgccaacagcagggatgaatattatcacttattagcagagaaaatctacaagatacaaaaagaactagaagaaaaacggaggtcgcgtttacataaacaaggcatcttggggaaccagccagccttaccagccccgggggctcagccccctgtgattccacaggcacaacctgtgagacctccaaatggacccctgtccctgccagtgaatcgcatgcaagtttctcaagggatgaattcatttaaccccatgtccttggggaacgtccagttgccacaagcacccatgggacctcgtgcagcctccccaatgaaccactctgtccagatgaacagcatgggctcagtgccagggatggccatttctccttcccgaatgcctcagcctccgaacatgatgggtgcacacaccaacaacatgatggcccaggcgcccgctcagagccagtttctgccacagaaccagttcccgtcatccagcggggcgatgagtgtgggcatggggcagccgccagcccaaacaggcgtgtcacagggacaggtgcctggtgctgctcttcctaaccctctcaacatgctggggcctcaggccagccagctaccttgccctccagtgacacagtcaccactgcacccaacaccgcctcctgcttccacggctgctggcatgccatctctccagcacacgacaccacctgggatgactcctccccagccagcagctcccactcagccatcaactcctgtgtcgtcttccgggcagactcccaccccgactcctggctcagtgcccagtgctacccaaacccagagcacccctacagtccaggcagcagcccaggcccaggtgaccccgcagcctcaaaccccagttcagcccccgtctgtggctacccctcagtcatcgcagcaacagccgacgcctgtgcacgcccagcctcctggcacaccgctttcccaggcagcagccagcattgataacagagtccctaccccctcctcggtggccagcgcagaaaccaattcccagcagccaggacctgacgtacctgtgctggaaatgaagacggagacccaagcagaggacactgagcccgatcctggtgaatccaaaggggagcccaggtctgagatgatggaggaggatttgcaaggagcttcccaagttaaagaagaaacagacatagcagagcagaaatcagaaccaatggaagtggatgaaaagaaacctgaagtgaaagtagaagttaaagaggaagaagagagtagcagtaacggcacagcctctcagtcaacatctccttcgcagccgcgcaaaaaaatctttaaaccagaggagttacgccaggccctcatgccaaccctagaagcactgtatcgacaggacccagagtcattacctttccggcagcctgtagatccccagctcctcggaattccagactattttgacatcgtaaagaatcccatggacctctccaccatcaagcggaagctggacacagggcaataccaagagccctggcagtacgtggacgacgtctggctcatgttcaacaatgcctggctctataatcgcaagacatcccgagtctataagttttgcagtaagcttgcagaggtctttgagcaggaaattgaccctgtcatgcagtcccttggatattgctgtggacgcaagtatgagttttccccacagactttgtgctgctatgggaagcagctgtgtaccattcctcgcgatgctgcctactacagctatcagaataggtatcatttctgtgagaagtgtttcacagagatccagggcgagaatgtgaccctgggtgacgacccttcacagccccagacgacaatttcaaaggatcagtttgaaaagaagaaaaatgataccttagaccccgaacctttcgttgattgcaaggagtgtggccggaagatgcatcagatttgcgttctgcactatgacatcatttggccttcaggttttgtgtgcgacaactgcttgaagaaaactggcagacctcgaaaagaaaacaaattcagtgctaagaggctgcagaccacaagactgggaaaccacttggaagaccgagtgaacaaatttttgcggcgccagaatcaccctgaagccggggaggtttttgtccgagtggtggccagctcagacaagacggtggaggtcaagcccgggatgaagtcacggtttgtggattctggggaaatgtctgaatctttcccatatcgaaccaaagctctgtttgcttttgaggaaattgacggcgtggatgtctgcttttttggaatgcacgtccaagaatacggctctgattgcccccctccaaacacgaggcgtgtgtacatttcttatctggatagtattcatttcttccggccacgttgcctccgcacagccgtttaccatgagatccttattggatatttagagtatgtgaagaaattagggtatgtgacagggcacatctgggcctgtcctccaagtgaaggagatgattacatcttccattgccacccacctgatcaaaaaatacccaagccaaaacgactgcaggagtggtacaaaaagatgctggacaaggcgtttgcagagcggatcatccatgactacaaggatattttcaaacaagcaactgaagacaggctcaccagtgccaaggaactgccctattttgaaggtgatttctggcccaatgtgttagaagagagcattaaggaactagaacaagaagaagaggagaggaaaaaggaagagagcactgcagccagtgaaaccactgagggcagtcagggcgacagcaagaatgccaagaagaagaacaacaagaaaaccaacaagaacaaaagcagcatcagccgcgccaacaagaagaagcccagcatgcccaacgtgtccaatgacctgtcccagaagctgtatgccaccatggagaagcacaaggaggtcttcttcgtgatccacctgcacgctgggcctgtcatcaacaccctgccccccatcgtcgaccccgaccccctgctcagctgtgacctcatggatgggcgcgacgccttcctcaccctcgccagagacaagcactgggagttctcctccttgcgccgctccaagtggtccacgctctgcatgctggtggagctgcacacccagggccaggaccgctttgtctacacctgcaacgagtgcaagcaccacgtggagacgcgctggcactgcactgtgtgcgaggactacgacctctgcatcaactgctataacacgaagagccatgcccataagatggtgaagtgggggctgggcctggatgacgagggcagcagccagggcgagccacagtcaaagagcccccaggagtcacgccggctgagcatccagcgctgcatccagtcgctggtgcacgcgtgccagtgccgcaacgccaactgctcgctgccatcctgccagaagatgaagcgggtggtgcagcacaccaagggctgcaaacgcaagaccaacgggggctgcccggtgtgcaagcagctcatcgccctctgctgctaccacgccaagcactgccaagaaaacaaatgccccgtgcccttctgcctcaacatcaaacacaagctccgccagcagcagatccagcaccgcctgcagcaggcccagctcatgcgccggcggatggccaccatgaacacccgcaacgtgcctcagcagagtctgccttctcctacctcagcaccgcccgggacccccacacagcagcccagcacaccccagacgccgcagccccctgcccagccccaaccctcacccgtgagcatgtcaccagctggcttccccagcgtggcccggactcagccccccaccacggtgtccacagggaagcctaccagccaggtgccggcccccccacccccggcccagccccctcctgcagcggtggaagcggctcggcagatcgagcgtgaggcccagcagcagcagcacctgtaccgggtgaacatcaacaacagcatgcccccaggacgcacgggcatggggaccccggggagccagatggcccccgtgagcctgaatgtgccccgacccaaccaggtgagcgggcccgtcatgcccagcatgcctcccgggcagtggcagcaggcgccccttccccagcagcagcccatgccaggcttgcccaggcctgtgatatccatgcaggcccaggcggccgtggctgggccccggatgcccagcgtgcagccacccaggagcatctcacccagcgctctgcaagacctgctgcggaccctgaagtcgcccagctcccctcagcagcaacagcaggtgctgaacattctcaaatcaaacccgcagctaatggcagctttcatcaaacagcgcacagccaagtacgtggccaatcagcccggcatgcagccccagcctggcctccagtcccagcccggcatgcaaccccagcctggcatgcaccagcagcccagcctgcagaacctgaatgccatgcaggctggcgtgccgcggcccggtgtgcctccacagcagcaggcgatgggaggcctgaacccccagggccaggccttgaacatcatgaacccaggacacaaccccaacatggcgagtatgaatccacagtaccgagaaatgttacggaggcagctgctgcagcagcagcagcaacagcagcagcaacaacagcagcaacagcagcagcagcaagggagtgccggcatggctgggggcatggcggggcacggccagttccagcagcctcaaggacccggaggctacccaccggccatgcagcagcagcagcgcatgcagcagcatctccccctccagggcagctccatgggccagatggcggctcagatgggacagcttggccagatggggcagccggggctgggggcagacagcacccccaacatccagcaagccctgcagcagcggattctgcagcaacagcagatgaagcagcagattgggtccccaggccagccgaaccccatgagcccccagcaacacatgctctcaggacagccacaggcctcgcatctccctggccagcagatcgccacgtcccttagtaaccaggtgcggtctccagcccctgtccagtctccacggccccagtcccagcctccacattccagcccgtcaccacggatacagccccagccttcgccacaccacgtctcaccccagactggttccccccaccccggactcgcagtcaccatggccagctccatagatcagggacacttggggaaccccgaacagagtgcaatgctcccccagctgaacacccccagcaggagtgcgctgtccagcgaactgtccctggtcggggacaccacgggggacacgctagagaagtttgtggagggcttgtagtaatgaactagtccgtaacttgaaagtatttcgatttcttggctttatatatcttgtggaaaggacgaatccgaccactgactatcgagtcc

SEQ ID NO: 1199 - DNA, 7316 bp, Homo sapiens
  source 1..7316: mol_type = genomic DNA
accgccaccatggctgagaacttgctggacggaccgcccaaccccaaaagagccaaactcagctcgcccggtttctcggcgaatgacagcacagattttggatcattgtttgacttggaaaatgatcttcctgatgagctgatacccaatggaggagaattaggccttttaaacagtgggaaccttgttccagatgctgcttccaaacataaacaactgtcggagcttctacgaggaggcagcggctctagtatcaacccaggaataggaaatgtgagcgccagcagccccgtgcagcagggcctgggtggccaggctcaagggcagccgaacagtgctaacatggccagcctcagtgccatgggcaagagccctctgagccagggagattcttcagcccccagcctgcctaaacaggcagccagcacctctgggcccacccccgctgcctcccaagcactgaatccgcaagcacaaaagcaagtggggctggcgactagcagccctgccacgtcacagactggacctggtatctgcatgaatgctaactttaaccagacccacccaggcctcctcaatagtaactctggccatagcttaattaatcaggcttcacaagggcaggcgcaagtcatgaatggatctcttggggctgctggcagaggaaggggagctggaatgccgtaccctactccagccatgcagggcgcctcgagcagcgtgctggctgagaccctaacgcaggtttccccgcaaatgactggtcacgcgggactgaacaccgcacaggcaggaggcatggccaagatgggaataactgggaacacaagtccatttggacagccctttagtcaagctggagggcagccaatgggagccactggagtgaacccccagttagccagcaaacagagcatggtcaacagtttgcccaccttccctacagatatcaagaatacttcagtcaccaacgtgccaaatatgtctcagatgcaaacatcagtgggaattgtacccacacaagcaattgcaacaggccccactgcagatcctgaaaaacgcaaactgatacagcagcagctggttctactgcttcatgctcataagtgtcagagacgagagcaagcaaacggagaggttcgggcctgctcgctcccgcattgtcgaaccatgaaaaacgttttgaatcacatgacgcattgtcaggctgggaaagcctgccaagccatcctggggtctccagctagtggaattcaaaacacaattggttctgttggcacagggcaacagaatgccacttctttaagtaacccaaatcccatagaccccagctccatgcagcgagcctatgctgctctcggactcccctacatgaaccagccccagacgcagctgcagcctcaggttcctggccagcaaccagcacagcctcaaacccaccagcagatgaggactctcaaccccctgggaaataatccaatgaacattccagcaggaggaataacaacagatcagcagcccccaaacttgatttcagaatcagctcttccgacttccctgggggccacaaacccactgatgaacgatggctccaactctggtaacattggaaccctcagcactataccaacagcagctcctccttctagcaccggtgtaaggaaaggctggcacgaacatgtcactcaggacctgcggagccatctagtgcataaactcgtccaagccatcttcccaacacctgatcccgcagctctaaaggatcgccgcatggaaaacctggtagcctatgctaagaaagtggaaggggacatgtacgagtctgccaacagcagggatgaatattatcacttattagcagagaaaatctacaagatacaaaaagaactagaagaaaaacggaggtcgcgtttacataaacaaggcatcttggggaaccagccagccttaccagccccgggggctcagccccctgtgattccacaggcacaacctgtgagacctccaaatggacccctgtccctgccagtgaatcgcatgcaagtttctcaagggatgaattcatttaaccccatgtccttggggaacgtccagttgccacaagcacccatgggacctcgtgcagcctccccaatgaaccactctgtccagatgaacagcatgggctcagtgccagggatggccatttctccttcccgaatgcctcagcctccgaacatgatgggtgcacacaccaacaacatgatggcccaggcgcccgctcagagccagtttctgccacagaaccagttcccgtcatccagcggggcgatgagtgtgggcatggggcagccgccagcccaaacaggcgtgtcacagggacaggtgcctggtgctgctcttcctaaccctctcaacatgctggggcctcaggccagccagctaccttgccctccagtgacacagtcaccactgcacccaacaccgcctcctgcttccacggctgctggcatgccatctctccagcacacgacaccacctgggatgactcctccccagccagcagctcccactcagccatcaactcctgtgtcgtcttccgggcagactcccaccccgactcctggctcagtgcccagtgctacccaaacccagagcacccctacagtccaggcagcagcccaggcccaggtgaccccgcagcctcaaaccccagttcagcccccgtctgtggctacccctcagtcatcgcagcaacagccgacgcctgtgcacgcccagcctcctggcacaccgctttcccaggcagcagccagcattgataacagagtccctaccccctcctcggtggccagcgcagaaaccaattcccagcagccaggacctgacgtacctgtgctggaaatgaagacggagacccaagcagaggacactgagcccgatcctggtgaatccaaaggggagcccaggtctgagatgatggaggaggatttgcaaggagcttcccaagttaaagaagaaacagacatagcagagcagaaatcagaaccaatggaagtggatgaaaagaaacctgaagtgaaagtagaagttaaagaggaagaagagagtagcagtaacggcacagcctctcagtcaacatctccttcgcagccgcgcaaaaaaatctttaaaccagaggagttacgccaggccctcatgccaaccctagaagcactgtatcgacaggacccagagtcattacctttccggcagcctgtagatccccagctcctcggaattccagactattttgacatcgtaaagaatcccatggacctctccaccatcaagcggaagctggacacagggcaataccaagagccctggcagtacgtggacgacgtctggctcatgttcaacaatgcctggctctataatcgcaagacatcccgagtctataagttttgcagtaagcttgcagaggtctttgagcaggaaattgaccctgtcatgcagtcccttggatattgctgtggacgcaagtatgagttttccccacagactttgtgctgctatgggaagcagctgtgtaccattcctcgcgatgctgcctactacagctatcagaataggtatcatttctgtgagaagtgtttcacagagatccagggcgagaatgtgaccctgggtgacgacccttcacagccccagacgacaatttcaaaggatcagtttgaaaagaagaaaaatgataccttagaccccgaacctttcgttgattgcaaggagtgtggccggaagatgcatcagatttgcgttctgcactatgacatcatttggccttcaggttttgtgtgcgacaactgcttgaagaaaactggcagacctcgaaaagaaaacaaattcagtgctaagaggctgcagaccacaagactgggaaaccacttggaagaccgagtgaacaaatttttgcggcgccagaatcaccctgaagccggggaggtttttgtccgagtggtggccagctcagacaagacggtggaggtcaagcccgggatgaagtcacggtttgtggattctggggaaatgtctgaatctttcccatatcgaaccaaagctctgtttgcttttgaggaaattgacggcgtggatgtctgcttttttggaatgcacgtccaagaatacggctctgattgcccccctccaaacacgaggcgtgtgtacatttcttatctggatagtattcatttcttccggccacgttgcctccgcacagccgtttaccatgagatccttattggatatttagagtatgtgaagaaattagggtatgtgacagggcacatctgggcctgtcctccaagtgaaggagatgattacatcttccattgccacccacctgatcaaaaaatacccaagccaaaacgactgcaggagtggtacaaaaagatgctggacaaggcgtttgcagagcggatcatccatgactacaaggatattttcaaacaagcaactgaagacaggctcaccagtgccaaggaactgccctattttgaaggtgatttctggcccaatgtgttagaagagagcattaaggaactagaacaagaagaagaggagaggaaaaaggaagagagcactgcagccagtgaaaccactgagggcagtcagggcgacagcaagaatgccaagaagaagaacaacaagaaaaccaacaagaacaaaagcagcatcagccgcgccaacaagaagaagcccagcatgcccaacgtgtccaatgacctgtcccagaagctgtatgccaccatggagaagcacaaggaggtcttcttcgtgatccacctgcacgctgggcctgtcatcaacaccctgccccccatcgtcgaccccgaccccctgctcagctgtgacctcatggatgggcgcgacgccttcctcaccctcgccagagacaagcactgggagttctcctccttgcgccgctccaagtggtccacgctctgcatgctggtggagctgcacacccagggccaggaccgctttgtctacacctgcaacgagtgcaagcaccacgtggagacgcgctggcactgcactgtgtgcgaggactacgacctctgcatcaactgctataacacgaagagccatgcccataagatggtgaagtgggggctgggcctggatgacgagggcagcagccagggcgagccacagtcaaagagcccccaggagtcacgccggctgagcatccagcgctgcatccagtcgctggtgcacgcgtgccagtgccgcaacgccaactgctcgctgccatcctgccagaagatgaagcgggtggtgcagcacaccaagggctgcaaacgcaagaccaacgggggctgcccggtgtgcaagcagctcatcgccctctgctgctaccacgccaagcactgccaagaaaacaaatgccccgtgcccttctgcctcaacatcaaacacaagctccgccagcagcagatccagcaccgcctgcagcaggcccagctcatgcgccggcggatggccaccatgaacacccgcaacgtgcctcagcagagtctgccttctcctacctcagcaccgcccgggacccccacacagcagcccagcacaccccagacgccgcagccccctgcccagccccaaccctcacccgtgagcatgtcaccagctggcttccccagcgtggcccggactcagccccccaccacggtgtccacagggaagcctaccagccaggtgccggcccccccacccccggcccagccccctcctgcagcggtggaagcggctcggcagatcgagcgtgaggcccagcagcagcagcacctgtaccgggtgaacatcaacaacagcatgcccccaggacgcacgggcatggggaccccggggagccagatggcccccgtgagcctgaatgtgccccgacccaaccaggtgagcgggcccgtcatgcccagcatgcctcccgggcagtggcagcaggcgccccttccccagcagcagcccatgccaggcttgcccaggcctgtgatatccatgcaggcccaggcggccgtggctgggccccggatgcccagcgtgcagccacccaggagcatctcacccagcgctctgcaagacctgctgcggaccctgaagtcgcccagctcccctcagcagcaacagcaggtgctgaacattctcaaatcaaacccgcagctaatggcagctttcatcaaacagcgcacagccaagtacgtggccaatcagcccggcatgcagccccagcctggcctccagtcccagcccggcatgcaaccccagcctggcatgcaccagcagcccagcctgcagaacctgaatgccatgcaggctggcgtgccgcggcccggtgtgcctccacagcagcaggcgatgggaggcctgaacccccagggccaggccttgaacatcatgaacccaggacacaaccccaacatggcgagtatgaatccacagtaccgagaaatgttacggaggcagctgctgcagcagcagcagcaacagcagcagcaacaacagcagcaacagcagcagcagcaagggagtgccggcatggctgggggcatggcggggcacggccagttccagcagcctcaaggacccggaggctacccaccggccatgcagcagcagcagcgcatgcagcagcatctccccctccagggcagctccatgggccagatggcggctcagatgggacagcttggccagatggggcagccggggctgggggcagacagcacccccaacatccagcaagccctgcagcagcggattctgcagcaacagcagatgaagcagcagattgggtccccaggccagccgaaccccatgagcccccagcaacacatgctctcaggacagccacaggcctcgcatctccctggccagcagatcgccacgtcccttagtaaccaggtgcggtctccagcccctgtccagtctccacggccccagtcccagcctccacattccagcccgtcaccacggatacagccccagccttcgccacaccacgtctcaccccagactggttccccccaccccggactcgcagtcaccatggccagctccatagatcagggacacttggggaaccccgaacagagtgcaatgctcccccagctgaacacccccagcaggagtgcgctgtccagcgaactgtccctggtcggggacaccacgggggacacgctagagaagtttgtggagggcttgtagtaatgaactagtccgtaacttgaaagtatttcgatttcttggctttatatatcttgtggaaaggacgaactagacgaggcacagataggtcg

SEQ ID NO: 1200 - DNA, 839 bp, Homo sapiens
  source 1..839: mol_type = genomic DNA
accgccaccatgtgtgctgaggtgggccctgctctctgcaggggtatggagagaaatagcttggggtgctgtgaggccccgaagaagctgagcctgtccttctccattgaggcgatcctaaagaggcctgccaggaggagtgatatggacagaccagaagggccaggtgaagagggccccggagaagctgcggcctcaggctctgggctagaaaagcctccaaaggaccagccccaggaaggaaggaagagcaagcggagggttcgtaccaccttcaccactgagcagctgcatgagctggagaagatcttccactttacccactacccagacgttcacatccgcagccagctggcagccaggatcaacctcccagaagctcgggtgcagatctggttccagaatcagcgagccaagtggcggaagcaggagaagattggcaacctgggggctccacagcagctgagtgaagccagtgtggccctgcccacaaatctggatgtggctgggcccacgtggacatccactgctctgcgcaggctggctcctcccacgagctgttgtccatcggctcaagatcagctggcctctgcctggttccctgcctggatcaccctcctcccagcgcacccatgggaaacacagcctgtcccaggtcttcccatccatcaaacttgcatccctgtgctatgcatccttccacctccacaccccaaatggggcagcatctgtgctacttcaacatagtaatgaactagtccgtaacttgaaagtatttcgatttcttggctttatatatcttgtggaaaggacgatgacagcagaacaccctggcgtcc

SEQ ID NO: 1201 - DNA, 1451 bp, Homo sapiens
  source 1..1451: mol_type = genomic DNA
accgccaccatgcccggcatgatggagaaagggcccgagttactggggaagaaccgatcggccaacggcagcgccaagagcccggcaggcggcggcggcagcggcgcctcgtccaccaacggcgggctgcactactcagagcccgagagcggctgcagcagcgacgacgagcacgatgttgggatgagagtcggagccgaataccaagctcggatccctgaatttgatccaggtgctacaaagtacacagataaagacaatggagggatgcttgtatggtctccatatcacagtatcccagatgccaaattggatgaatacattgcaattgcaaaggaaaagcatggctacaatgtggaacaggcacttggcatgttgttctggcataaacataacattgagaagtcccttgctgatctccctaatttcactccctttccggatgagtggacagtggaagataaagtcctatttgaacaagcctttagttttcatggaaagagctttcacaggattcagcaaatgcttccagataagacaattgcaagccttgtaaaatattactattcttggaaaaaaactcgctctaggacaagtttgatggatcgccaggctcgtaaactagctaatagacataatcagggtgacagtgatgatgatgtagaagaaacacatccaatggatgggaatgatagtgattatgatcccaaaaaagaagccaaaaaagagggtaatactgaacaacctgtccaaactagcaagattggacttggaagaagagagtatcagagtttacaacatcgccatcattctcagcgttctaagtgccgtccacctaagggcatgtatttaacccaggaagatgtggtagcagtttcctgtagtcccaatgcagccaacaccatcctgaggcaactggacatggagttgatctctctaaaacgtcaggttcagaatgctaagcaagtaaacagtgcacttaaacagaaaatggaaggtggaattgaagaattcaaacctcctgagtcaaatcagaaaattaatgcccgttggaccacagaggagcagcttctagcagtgcaaggtgtccgcaaatatggtaaagattttcaagctattgcagatgtaattggcaacaagactgttggccaagtgaagaacttctttgtaaactacaggcgtcggtttaacttagaggaggtattgcaggagtgggaagcagaacaaggaacccaggcttctaatggtgatgcttctactttaggggaggagacaaaaagtgcttctaatgtgccatcagggaagagcactgatgaagaagaggaggtgtgtttgtgtatggaatttgagctaatatagtaatgaactagtccgtaacttgaaagtatttcgatttcttggctttatatatcttgtggaaaggacgatgctgaatcggtttcggaacgaat

SEQ ID NO: 1202 - DNA, 1589 bp, Homo sapiens
  source 1..1589: mol_type = genomic DNA
accgccaccatgagagtcggagccgaataccaagctcggatccctgaatttgatccaggtgctacaaagtacacagataaagacaatggagggatgcttgtatggtctccatatcacagtatcccagatgccaaattggatgaatacattgcaattgcaaaggaaaagcatggctacaatgtggaacaggcacttggcatgttgttctggcataaacataacattgagaagtcccttgctgatctccctaatttcactccctttccggatgagtggacagtggaagataaagtcctatttgaacaagcctttagttttcatggaaagagctttcacaggattcagcaaatgcttccagataagacaattgcaagccttgtaaaatattactattcttggaaaaaaactcgctctaggacaagtttgatggatcgccaggctcgtaaactagctaatagacataatcagggtgacagtgatgatgatgtagaagaaacacatccaatggatgggaatgatagtgattatgatcccaaaaaagaagccaaaaaagagggtaatactgaacaacctgtccaaactagcaagattggacttggaagaagagagtatcagagtttacaacatcgccatcattctcagcgttctaagtgccgtccacctaagggcatgtatttaacccaggaagatgtggtagcagtttcctgtagtcccaatgcagccaacaccatcctgaggcaactggacatggagttgatctctctaaaacgtcaggttcagaatgctaagcaagtaaacagtgcacttaaacagaaaatggaaggtggaattgaagaattcaaacctcctgagtcaaatcagaaaattaatgcccgttggaccacagaggagcagcttctagcagtgcaaggtgtccgcaaatatggtaaagattttcaagctattgcagatgtaattggcaacaagactgttggccaagtgaagaacttctttgtaaactacaggcgtcggtttaacttagaggaggtattgcaggagtgggaagcagaacaaggaacccaggcttctaatggtgatgcttctactttaggggaggagacaaaaagtgcttctaatgtgccatcagggaagagcactgatgaagaagaggaggcacagaccccacaggctcctcggacactgggtccatcacctcctgccccatcatccactccaacaccaacagcccctattgccactctgaaccagcctccaccacttcttcgtccaacactgcctgctgccccggctcttcaccggcagcctcctccactccagcagcaggctcggttcatccagccccggccaactttaaatcagcctccaccacctcttattcgccctgctaattccatgccaccccgtctaaacccaagaccggtgttgtccacggttggtggtcaacagccaccatcacttattggaattcagacagattcacagtcctcactgcactagtaatgaactagtccgtaacttgaaagtatttcgatttcttggctttatatatcttgtggaaaggacgactggcgtacgccgccaaggcggca

SEQ ID NO: 1203 - DNA, 1763 bp, Homo sapiens
  source 1..1763: mol_type = genomic DNA
accgccaccatgcccggcatgatggagaaagggcccgagttactggggaagaaccgatcggccaacggcagcgccaagagcccggcaggcggcggcggcagcggcgcctcgtccaccaacggcgggctgcactactcagagcccgagagcggctgcagcagcgacgacgagcacgatgttgggatgagagtcggagccgaataccaagctcggatccctgaatttgatccaggtgctacaaagtacacagataaagacaatggagggatgcttgtatggtctccatatcacagtatcccagatgccaaattggatgaatacattgcaattgcaaaggaaaagcatggctacaatgtggaacaggcacttggcatgttgttctggcataaacataacattgagaagtcccttgctgatctccctaatttcactccctttccggatgagtggacagtggaagataaagtcctatttgaacaagcctttagttttcatggaaagagctttcacaggattcagcaaatgcttccagataagacaattgcaagccttgtaaaatattactattcttggaaaaaaactcgctctaggacaagtttgatggatcgccaggctcgtaaactagctaatagacataatcagggtgacagtgatgatgatgtagaagaaacacatccaatggatgggaatgatagtgattatgatcccaaaaaagaagccaaaaaagagggtaatactgaacaacctgtccaaactagcaagattggacttggaagaagagagtatcagagtttacaacatcgccatcattctcagcgttctaagtgccgtccacctaagggcatgtatttaacccaggaagatgtggtagcagtttcctgtagtcccaatgcagccaacaccatcctgaggcaactggacatggagttgatctctctaaaacgtcaggttcagaatgctaagcaagtaaacagtgcacttaaacagaaaatggaaggtggaattgaagaattcaaacctcctgagtcaaatcagaaaattaatgcccgttggaccacagaggagcagcttctagcagtgcaaggtgtccgcaaatatggtaaagattttcaagctattgcagatgtaattggcaacaagactgttggccaagtgaagaacttctttgtaaactacaggcgtcggtttaacttagaggaggtattgcaggagtgggaagcagaacaaggaacccaggcttctaatggtgatgcttctactttaggggaggagacaaaaagtgcttctaatgtgccatcagggaagagcactgatgaagaagaggaggcacagaccccacaggctcctcggacactgggtccatcacctcctgccccatcatccactccaacaccaacagcccctattgccactctgaaccagcctccaccacttcttcgtccaacactgcctgctgccccggctcttcaccggcagcctcctccactccagcagcaggctcggttcatccagccccggccaactttaaatcagcctccaccacctcttattcgccctgctaattccatgccaccccgtctaaacccaagaccggtgttgtccacggttggtggtcaacagccaccatcacttattggaattcagacagattcacagtcctcactgcactagtaatgaactagtccgtaacttgaaagtatttcgatttcttggctttatatatcttgtggaaaggacgaaaactagcctatacatcgaagaaa

SEQ ID NO: 1204 - DNA, 1412 bp, Homo sapiens
  source 1..1412: mol_type = genomic DNA
accgccaccatgcccggcatgatggagaaagggcccgagttactggggaagaaccgatcggccaacggcagcgccaagagcccggcaggcggcggcggcagcggcgcctcgtccaccaacggcgggctgcactactcagagcccgagagcggctgcagcagcgacgacgagcacgatgttgggatgagagtcggagccgaataccaagctcggatccctgaatttgatccaggtgctacaaagtacacagataaagacaatggagggatgcttgtatggtctccatatcacagtatcccagatgccaaattggatgaatacattgcaattgcaaaggaaaagcatggctacaatgtggaacaggcacttggcatgttgttctggcataaacataacattgagaagtcccttgctgatctccctaatttcactccctttccggatgagtggacagtggaagataaagtcctatttgaacaagcctttagttttcatggaaagagctttcacaggattcagcaaatgcttccagataagacaattgcaagccttgtaaaatattactattcttggaaaaaaactcgctctaggacaagtttgatggatcgccaggctcgtaaactagctaatagacataatcagggtgacagtgatgatgatgtagaagaaacacatccaatggatgggaatgatagtgattatgatcccaaaaaagaagccaaaaaagagggtaatactgaacaacctgtccaaactagcaagattggacttggaagaagagagtatcagagtttacaacatcgccatcattctcagcgttctaagtgccgtccacctaagggcatgtatttaacccaggaagatgtggtagcagtttcctgtagtcccaatgcagccaacaccatcctgaggcaactggacatggagttgatctctctaaaacgtcaggttcagaatgctaagcaagtaaacagtgcacttaaacagaaaatggaaggtggaattgaagaattcaaacctcctgagtcaaatcagaaaattaatgcccgttggaccacagaggagcagcttctagcagtgcaaggcacagaccccacaggctcctcggacactgggtccatcacctcctgccccatcatccactccaacaccaacagcccctattgccactctgaaccagcctccaccacttcttcgtccaacactgcctgctgccccggctcttcaccggcagcctcctccactccagcagcaggctcggttcatccagccccggccaactttaaatcagcctccaccacctcttattcgccctgctagtaatgaactagtccgtaacttgaaagtatttcgatttcttggctttatatatcttgtggaaaggacgatggccaccgatcacgcagggagcg

SEQ ID NO: 1205 - DNA, 1673 bp, Homo sapiens
  source 1..1673: mol_type = genomic DNA
accgccaccatgccctcagtgatggagaagccgagcgcgggctctgggatcctgtcccgtagccgggccaagacggtgcccaacggcggacagccccactcggaggatgacagcagcgaggaggagcactcgcacgacagcatgatccgcgttggaaccaattaccaggccgtaattccggagtgcaagcctgagagccccgcacgctacagcaacaaggagctgaaggggatgctggtgtggtcacccaaccactgtgtgtcagatgccaagcttgacaagtacattgcgatggccaaggagaagcatggctacaacattgagcaggcgctgggcatgcttctgtggcataagcacgatgtggagaagtcgctggccgacctggccaacttcaccccattccctgacgagtggacagtagaggacaaggtgctgtttgaacaggcctttggcttccatggcaaatgcttccagcggatccagcagatgctgcctgacaagttgattcccagcctggtgaaatactactactcttggaagaagacccgcagccgaactagtgtgatggacagacaggcccggcggctggggggccgcaaggacaaagaagacagtgatgagctcgaagagggtcgaggaggcgtgagtgagggagagcccgatcctgcagatcccaagagagagcctctaccctctcggcccctgaatgcacgcccaggccctgggaaaaaggaggtccaggtgtctcagtaccgccaccatcccttgcgaacccggcgtcgcccacccaagggcatgtacctgagccctgaaggcctcacggcagtgtcaggaagcccggaccttgccaacctcacgctccgaggtcttgactctcagctcatctccctcaagcgccaggtacagagcatgaagcagacgaacagcagcctgcgccaagccctggagggcggtattgatccactacgccccccggaggccaacaccaagttcaactcccgctggaccacagatgagcagcttttggctgttcaagccatccgtaggtatggcaaagactttggggctattgcagaggtgattgggaacaagactctgacccaggtgaagactttctttgtgagctaccggcgccgcttcaatctggaggaggtgctgcaggaatgggaggctgagcaggatggggcccctggagccccagtccccatggaggaggctaggagaggggctccattgccagccccagccctagaggaagatgatgaggtccagattacatcggtctccacgtccgtgccccgatcagtgccccctgcgccaccaccccctccacctcccacctcgctgtcccagccacccccgctgctgaggccacctttgcccacggctcccactctgctccgacagccacccccactgcagcagggccgcttcctccagccccggctggcccccaaccagcccccaccgcctctcatccgccccgctctggctgccccccgccacagcgcccgccctggccctcagcccccacccaccctgattggaacccctctggagcccccagcaccctcactctagtaatgaactagtccgtaacttgaaagtatttcgatttcttggctttatatatcttgtggaaaggacgacgttgcggcctcggatagcggttt

SEQ ID NO: 1206 - DNA, 1559 bp, Homo sapiens
  source 1..1559: mol_type = genomic DNA
accgccaccatgccggccatggtggagaagggccccgaggtctcagggaagcggagagggaggaacaacgcggccgcctccgcctccgccgccgccgcctccgccgccgcctcggccgcctgcgcctcgccagccgccactgccgcctcgggcgccgccgcctcctcagcctcggccgccgccgcctcagccgccgccgcccccaataatggccagaataaaagtttggcggcggcggcgcccaatggcaacagcagcagcaactcctgggaggaaggcagctcgggctcgtccagcgacgaggagcacggtggcggtggcatgagggtcggaccccagtaccaggcggtggtgcccgacttcgaccccgccaaactggcaagacgcagtcaagaacgggacaatcttggcatgttggtctggtcacccaatcaaaatctgtcagaagcaaagttggatgaatacattgccattgccaaagaaaagcatgggtacaacatggaacaggctcttgggatgctcttctggcataaacataatatcgaaaagtcattggctgatttgcccaactttacccctttcccagatgagtggactgtggaagataaagtcttatttgagcaagcctttagttttcatgggaaaacttttcatagaatccaacaaatgcttccagataaatctatagcaagtctggtgaaattttactattcttggaagaagacgaggactaaaactagtgtgatggatcgccatgcccggaaacaaaaacgggagcgggaggagagcgaggatgaactggaagaggcaaatggaaacaatcccattgacattgaggttgatcaaaacaaggaaagcaaaaaggaggttccccctactgagacagttcctcaggtcaaaaaagaaaaacatagcacacaagctaaaaatagagcaaaaaggaaacctccaaaaggaatgtttctttctcaagaagatgtggaggctgtttctgccaatgccactgctgctaccacggtgctgagacaactagacatggaattggtttcagtcaaacgacagatccagaatattaaacagacaaacagtgctctcaaagaaaaacttgatggtggaatagaaccatatcgacttccagaggtcattcagaaatgtaatgcacgttggactacagaagagcagcttctcgccgtacaagccatcaggaaatatggccgagattttcaggcaatctcagacgtgattgggaacaaatcagtggtacaagtgaaaaacttttttgtaaattatcgacgccgcttcaacatagatgaagttttacaagaatgggaggcagaacatggtaaagaagagaccaatgggcccagtaaccagaagcctgtgaagtccccagataattccattaagatgcccgaagaggaagacgaggctcctgttctggatgtcagatatgcatctgcctcctagtaatgaactagtccgtaacttgaaagtatttcgatttcttggctttatatatcttgtggaaaggacgaaaggcagccgcaatgtgcgctaac

SEQ ID NO: 1207 - DNA, 3851 bp, Homo sapiens
  source 1..3851: mol_type = genomic DNA
accgccaccatgtcttcaatgtggtctgaatatacaattggtggggtgaagatttactttccttataaagcttacccgtcacagcttgctatgatgaattctattctcagaggattaaacagcaagcaacattgtttgttggagagtcccacaggaagtggaaaaagcttagccttactttgttctgctttagcatggcaacaatctcttagtgggaaaccagcagatgagggcgtaagtgaaaaagctgaagtacaattgtcatgttgttgtgcatgccattcaaaggattttacaaacaatgacatgaaccaaggaacttcacgtcatttcaactatccaagcacaccaccttctgaaagaaatggcacttcatcaacttgtcaagactcccctgaaaaaaccactctggctgcaaagttatctgctaagaaacaggcatccatatacagagatgaaaatgatgattttcaagtagagaagaaaagaattcgacccttagaaactacacagcagattagaaaacgtcattgctttggaacagaagtacacaatttggatgcaaaagttgattcaggaaagactgtaaaactcaactctccactggaaaagataaactccttttcgccacagaaaccccctggccactgttctaggtgctgttgttctactaaacaaggaaacagtcaagagtcatcgaataccattaagaaggatcatacagggaaatccaagatacccaaaatatattttgggacacgcacacacaagcagattgctcagattactagagagctccggaggacggcatattcaggggttccaatgactattctttccagcagggatcatacttgtgtccatcctgaggtagtcggtaacttcaacagaaatgagaagtgcatggaattgctagatgggaaaaacggaaaatcctgctatttttatcatggagttcataaaattagtgatcagcacacattacagactttccaagggatgtgcaaagcctgggatatagaagaacttgtcagcctggggaagaaactaaaggcctgtccatattacacagcccgagaactaatacaagatgctgacatcatattttgtccctacaactatcttctagatgcacaaataagggaaagtatggatttaaatctgaaagaacaggttgtcattttagatgaagctcataacatcgaggactgtgctcgggaatcagcaagttacagtgtaacagaagttcagcttcggtttgctcgggatgaactagatagtatggtcaacaataatataaggaagaaagatcatgaacccctacgagctgtgtgctgtagcctcattaattggttagaagcaaacgctgaatatcttgtagaaagagattatgaatcagcttgtaaaatatggagtggaaatgaaatgctcttaactttacacaaaatgggtatcaccactgctacttttcccattttgcagggacatttttctgctgttcttcaaaaagaggaaaaaatctcaccaatttatggtaaagaggaggcaagagaagtacctgttattagtgcatcaactcaaataatgcttaaaggactttttatggtacttgactatctttttaggcaaaatagcagatttgcagatgattataaaattgcgattcaacagacttactcctggacaaatcagattgatatttcagacaaaaatgggttgttggttctaccaaaaaataagaaacgttcacgacagaaaactgcagttcatgtgctaaacttttggtgcttaaatccagctgtggccttttcagatattaatggcaaagttcagaccattgttttgacatctggtacattatcaccaatgaaatccttttcgtcagaacttggtgttacatttactatccagctggaggctaatcatatcattaaaaattcacaggtttgggttggtaccattgggtcaggccccaagggtcggaatctctgtgctaccttccagaatactgaaacatttgagttccaagatgaagtgggagcacttttgttatctgtgtgccagactgtgagccaaggaattttgtgtttcttgccatcttacaagttattagaaaaattaaaagaacgttggctctctactggtttatggcataatctggagttggtgaagacagtcattgtagaaccacagggaggagaaaaaacaaattttgatgaattactgcaggtgtactatgacgcaatcaaatacaaaggagagaaagatggagctctcctggtagcagtttgtcgtggtaaagtgagtgagggtctggatttctcagatgacaatgcccgtgctgtcataacaataggaattccttttccaaatgtgaaagatctacaggttgaactaaaacgacaatacaatgaccaccattcaaaattgagaggtcttctacctggccgtcagtggtatgaaattcaagcatacagggccttaaaccaggcccttggtagatgtattagacacagaaatgattggggagctcttattctagtggatgatcgctttaggaataacccaagtcgctatatatctggactttctaaatgggtacggcagcagattcagcaccattcaacctttgaaagtgcactggaatccttggctgaattttccaaaaagcatcaaaaagttcttaatgtatccataaaggacagaaccaatatacaggacaatgagtctacacttgaagtgacctctttaaagtacagtacctcaccttatttactggaagcagcaagtcatctatcaccagaaaattttgtggaagatgaagcaaagatatgtgtccaggaactacagtgtcctaaaattattaccaaaaattcacctctaccaagtagcattatctccagaaaggagaaaaatgatccagtattcctggaagaagcagggaaagcagaaaaaattgtgatttccagatccacaagcccaactttcaacaaacaaacaaagagagttagctggtcaagctttaattctttgggacagtattttactggtaaaataccgaaggcaacacctgagctcgggtcatcagagaatagtgcctctagtcctccccgtttcaaaacagagaagatggaaagtaaaactgttttgcccttcactgataaatgtgaatcctcaaatctgacagtaaacacatcgtttggatcatgccctcaatcagaaaccattatttcatcattaaagattgatgccacccttactagaaaaaatcattctgaacatccgctctgttctgaagaagccctggatccagacattgaattgtctctagtaagtgaagaagataaacagtccacttcaaatagagattttgaaacagaagcagaagatgaatctatctattttacacctgaactttatgatcctgaagatacagatgaagaaaaaaatgacctagctgaaactgatagaggaaatagattggctaacaattcagattgcattttagctaaagacctttttgaaattagaactataaaagaagtagattcagccagagaagtgaaagctgaggattgcatagatacaaagttgaatggaattctgcatattgaagaaagtaaaattgatgacattgatggtaatgtaaaaacaacttggataaatgaactggaactgggaaaaactcatgaaatagaaataaagaactttaaaccatctccttccaaaaataaaggcatgtttcctggttttaagtagtaatgaactagtccgtaacttgaaagtatttcgatttcttggctttatatatcttgtggaaaggacgaaagacctagacggcgattcatccg

SEQ ID NO: 1208 - DNA, 734 bp, Homo sapiens
  source 1..734: mol_type = genomic DNA
accgccaccatggaccaaccattggctgaacatttcagtactctcgcaaaaaactcaaatttagtgcgacttaacctttctgggtgttctggattctctgaatttgccctgcagactttgctaagcagctgttccagactggatgagctgaacctctcctggtgttttgatttcactgaaaagcatgtacaggtggctgttgcgcatgtgtcagagaccatcacccagctgaatcttagcggctacagaaagaatctccagaaatcagatctctctactttagttagaagatgccccaatcttgtccatctagacttaagtgatagtgtcatgctaaagaatgactgctttcaggaatttttccagctcaactacctccaacacctatcactcagtcggtgctatgatataatacctgaaactttacttgaacttggagaaattcccacactaaaaacactacaagtttttggaatcgtgccagatggtacccttcaactgttaaaggaagcccttcctcatctacagattaattgctcccatttcaccaccattgccaggccaactattggcaacaaaaagaaccaggagatatggggcatcaaatgccgactgacactgcaaaagcccagttgtctatagtaatgaactagtccgtaacttgaaagtatttcgatttcttggctttatatatcttgtggaaaggacgacccaacacaaacatcacctcttcg

SEQ ID NO: 1209 - DNA, 1769 bp, Homo sapiens
  source 1..1769: mol_type = genomic DNA
accgccaccatgaatgtgatgttagagaactacaaaaacctggtcttcttggcaggtattgctgtctctaagcaagacccgatcaccagtctagagcaagaaaaagagccctggaatatgaagatatgtgagatggtggatgaatccccagctatgtgttcttcttttaccagagacctttggccagagcaagacataaaagattcttttcaacaagtgatactgagaagacatggcaaatgtgaacatgagaatttacagttaagaaaaggctccgcaaatgtggttgagtgtaaggtgtacaaaaaaggttataatgaactaaaccagtgtttgacaactacccagagcaaaatatttccatgtgataaatatataaaagtctttcataaaattttcaattcaaatagacacaagacaagacatactggagagaaacctttcaaatgtaaaaaatgtgatgaatcattttgcatgcttttacacctacatcaacataaaagaattcatattagagagaattcttaccaatgtgaagaatgtgacaaagtgtttaagcggttctcaacccttactagacacaagagagttcatactggagagaaacccttcaaatgtgaagaatgtggcaaagcttttaagcactcctcaacccttactacacataagatgattcatactggagagaaaccctacagatgtgaagaatgtggcaaagccttctaccattcttcacaccttactacacataaggtaattcatactggagagaagcccttcaaatgtgaagaatgtggtaaagcttttaaccacccttcagcccttactacacataagttcattcatgttaaagaaaaaccctacaaatgtgaagaatgtgacaaagcttttaaccgattctcataccttactaaacataagataattcattctggagagaaatcttacaaatgtgaacaatgtggcaaaggctttaactggtcttcaacccttacaaaacataaaagaattcatactggagagaaaccctacaaatgtgaagaatgtggcaaagcctttaatgtgtcttcacaccttactacacataagatgattcatactggagagaaaccctacaaatgtgaagaatgtggcaaagcctttaaccactcctcaaaacttactatacataagataattcatactggagagaaaccttacaaatgtgaagaatgtggcaaagcttttaaccaatcctcaaaccttaccaaacataagataattcatactggagagaaactctacaaatgtgaagaatgtggcaaagcttttaaccgatcctcaaaccttactacacataagagaattcacactggagagaaaccctacaaatgtgaagaatgtggcaaagctttcaaccgatcctcaaaccttactaaacataacataattcatactggagagaaatcttacaaatgtgaagaatgtggtaaagcctttaaccaatcctcaactcttactaaacataggaaaattcagcagggcatggtggctcatgcctgtaatcccaacactttgagaggactaggtgagcagatcgcgaggtcaggagttcaagaccagcctggccaacatggtaaaaccccatctctactaaaaatacaaaaatttgctgggtgtggtggcaggcgcctgtagtaatgaactagtccgtaacttgaaagtatttcgatttcttggctttatatatcttgtggaaaggacgattatgcgaatggcttgttaggttt

SEQ ID NO: 1210 - DNA, 2291 bp, Homo sapiens
  source 1..2291: mol_type = genomic DNA
accgccaccatgggaaaaaaatacaagaacattgttctactaaaaggattagaggtcatcaatgattatcattttagaatggttaagtccttactgagcaacgatttaaaacttaatttaaaaatgagagaagagtatgacaaaattcagattgctgacttgatggaagaaaagttccgaggtgatgctggtttgggcaaactaataaaaattttcgaagatataccaacgcttgaagacctggctgaaactcttaaaaaagaaaagttaaaagtaaaaggaccagccctatcaagaaagaggaagaaggaagtggatgctacttcacctgcaccctccacaagcagcactgtcaaaactgaaggagcagaggcaactcctggagctcagaacccgaaaacagtggccaaatgtcaggtaactcccagaagaaatgttctccaaaaacgcccagtgatagtgaaggtactgagtacaacaaagccatttgaatatgagaccccagaaatggagaaaaaaataatgtttcatgctacagtggctacacagacacagttcttccatgtgaaggttttaaacaccagcttgaaggagaaattcaatggaaagaaaatcatcatcatatcagattatttggaatatgatagtctcctagaggtcaatgaagaatctactgtatctgaagctggtcctaaccaaacgtttgaggttccaaataaaatcatcaacagagcaaaggaaactctgaagattgatattcttcacaaacaagcttcaggaaatattgtatatggggtatttatgctacataagaaaacagtaaatcagaagaccacaatctacgaaattcaggatgatagaggaaaaatggatgtagtggggacaggacaatgtcacaatatcccctgtgaagaaggagataagctccaacttttctgctttcgacttagaaaaaagaaccagatgtcaaaactgatttcagaaatgcatagttttatccagataaagaaaaaaacaaacccgagaaacaatgaccccaagagcatgaagctaccccaggaacagcgtcagcttccatatccttcagaggccagcacaaccttccctgagagccatcttcggactcctcagatgccaccaacaactccatccagcagtttcttcaccaagaaaagtgaagacacaatctccaaaatgaatgacttcatgaggatgcagatactgaaggaagggagtcattttccaggaccgttcatgaccagcataggcccagctgagagccatccccacactcctcagatgcctccatcaacaccaagcagcagtttcttaaccacgaaaagtgaagacacaatctccaaaatgaatgacttcatgaggatgcagatactgaaggaagggagtcattttccaggaccgttcatgaccagcataggcccagctgagagccatccccacactcctcagatgcctccatcaacaccaagcagcagtttcttaaccacgttgaaaccaagactgaagactgaacctgaagaagtttccatagaagacagtgcccagagtgacctcaaagaagtgatggtgctgaacgcaacagaatcatttgtatatgagcccaaagagcagaagaaaatgtttcatgccacagtggcaactgagaatgaagtcttccgagtgaaggtttttaatattgacctaaaggagaagttcaccccaaagaagatcattgccatagcaaattatgtttgccgcaatgggttcctggaggtatatcctttcacacttgtggctgatgtgaatgctgaccgaaacatggagatcccaaaaggattgattagaagtgccagcgtaactcctaaaatcaatcagctttgctcacaaactaaaggaagttttgtgaatggggtgtttgaggtacataagaaaaatgtaaggggtgaattcacttattatgaaatacaagataatacagggaagatggaagtggtggtgcatggacgactgaccacaatcaactgtgaggaaggagataaactgaaactcacctgctttgaattggcaccgaaaagtgggaataccggggagttgagatctgtaattcatagtcacatcaaggtcatcaagaccaggaaaaacaagaaagacatactcaatcctgattcaagtatggaaacttcaccagactttttcttctagtaatgaactagtccgtaacttgaaagtatttcgatttcttggctttatatatcttgtggaaaggacgattgtgaggttcttcggcacaaggt

SEQ ID NO: 1211 - DNA, 2291 bp, Homo sapiens
  source 1..2291: mol_type = genomic DNA
accgccaccatgggaaaaaaatacaagaacattgttctactaaaaggattagaggtcatcaatgattatcattttagaatggttaagtccttactgagcaacgatttaaaacttaatttaaaaatgagagaagagtatgacaaaattcagattgctgacttgatggaagaaaagttccgaggtgatgctggtttgggcaaactaataaaaattttcgaagatataccaacgcttgaagacctggctgaaactcttaaaaaagaaaagttaaaagtaaaaggaccagccctatcaagaaagaggaagaaggaagtggatgctacttcacctgcaccctccacaagcagcactgtcaaaactgaaggagcagaggcaactcctggagctcagaaaagaaaaaaatcaaccaaagaaaaggctggacccaaagggagtaaggtgtccgaggaacagactcagcctccctctcctgcaggagccggcatgtccacagccatgggccgttccccatctcccaagacctcattgtcagctccacccaacagttcttcaactgagaacccgaaaacagtggccaaatgtcaggtaactcccagaagaaatgttctccaaaaacgcccagtgatagtgaaggtactgagtacaacaaagccatttgaatatgagaccccagaaatggagaaaaaaataatgtttcatgctacagtggctacacagacacagttcttccatgtgaaggttttaaacaccagcttgaaggagaaattcaatggaaagaaaatcatcatcatatcagattatttggaatatgatagtctcctagaggtcaatgaagaatctactgtatctgaagctggtcctaaccaaacgtttgaggttccaaataaaatcatcaacagagcaaaggaaactctgaagattgatattcttcacaaacaagcttcaggaaatattgtatatggggtatttatgctacataagaaaacagtaaatcagaagaccacaatctacgaaattcaggatgatagaggaaaaatggatgtagtggggacaggacaatgtcacaatatcccctgtgaagaaggagataagctccaacttttctgctttcgacttagaaaaaagaaccagatgtcaaaactgatttcagaaatgcatagttttatccagataaagaaaaaaacaaacccgagaaacaatgaccccaagagcatgaagctaccccaggaacagcgtcagcttccatatccttcagaggccagcacaaccttccctgagagccatcttcggactcctcagatgccaccaacaactccatccagcagtttcttcaccaagaaaagtgaagacacaatctccaaaatgaatgacttcatgaggatgcagatactgaaggaagggagtcattttccaggaccgttcatgaccagcataggcccagctgagagccatccccacactcctcagatgcctccatcaacaccaagcagcagtttcttaaccacgttgaaaccaagactgaagactgaacctgaagaagtttccatagaagacagtgcccagagtgacctcaaagaagtgatggtgctgaacgcaacagaatcatttgtatatgagcccaaagagcagaagaaaatgtttcatgccacagtggcaactgagaatgaagtcttccgagtgaaggtttttaatattgacctaaaggagaagttcaccccaaagaagatcattgccatagcaaattatgtttgccgcaatgggttcctggaggtatatcctttcacacttgtggctgatgtgaatgctgaccgaaacatggagatcccaaaaggattgattagaagtgccagcgtaactcctaaaatcaatcagctttgctcacaaactaaaggaagttttgtgaatggggtgtttgaggtacataagaaaaatgtaaggggtgaattcacttattatgaaatacaagataatacagggaagatggaagtggtggtgcatggacgactgaccacaatcaactgtgaggaaggagataaactgaaactcacctgctttgaattggcaccgaaaagtgggaataccggggagttgagatctgtaattcatagtcacatcaaggtcatcaagaccaggaaaaacaagaaagacatactcaatcctgattcaagtatggaaacttcaccagactttttcttctagtaatgaactagtccgtaacttgaaagtatttcgatttcttggctttatatatcttgtggaaaggacgagccatgcatgaccagcacgaactt

SEQ ID NO: 1212 - DNA, 959 bp, Homo sapiens
  source 1..959: mol_type = genomic DNA
accgccaccatgtcggaagcgggcgaggagcagcccatggagacgacgggcgccaccgagaacggacatgaggccgtccccgaaggcgagtcgccggccggggctggcacgggcgccgcggcgggggctggaggcgcgaccgcggcgcccccgagcgggaatcagaacggcgccgagggcgaccagatcaacgccagcaagaacgaggaggacgcgggaaaaatgttcgttggtggcctgagctgggatactagcaaaaaagatttaaaagactattttactaaatttggagaggtcgttgactgtacaataaaaatggatcccaacactggacggtcaagagggtttgggtttatcctgttcaaagatgcagccagtgtggagaaggtcctagaccagaaggagcacaggctggatggccgtgtcattgaccctaaaaaggccatggctatgaagaaggacccggtgaagaaaatcttcgttgggggtctgaatcctgaagccactgaggaaaagatcagggagtactttggcgagtttggggagattgaggccattgaattgccaatggatccaaagttgaacaaaagacgaggttttgtgtttatcacctttaaagaagaagaacccgtgaagaaggttctggagaaaaagttccatactgtcagtggaagcaagtgtgagatcaaggtggcccagcccaaagaagtctatcagcagcagcagtatggctctgggggccgtggaaaccgcaaccgagggaaccgaggcagcggaggtggtggtggaggtggaggtcagggtagtacaaactacggcaagagccagcgacgtggtggccatcagaataactacaagccatactagtaatgaactagtccgtaacttgaaagtatttcgatttcttggctttatatatcttgtggaaaggacgaggtagggtgggtaaataaacgacg

SEQ ID NO: 1213 - DNA, 1100 bp, Homo sapiens
  source 1..1100: mol_type = genomic DNA
accgccaccatgtcggaagcgggcgaggagcagcccatggagacgacgggcgccaccgagaacggacatgaggccgtccccgaaggcgagtcgccggccggggctggcacgggcgccgcggcgggggctggaggcgcgaccgcggcgcccccgagcgggaatcagaacggcgccgagggcgaccagatcaacgccagcaagaacgaggaggacgcgggaaaaatgttcgttggtggcctgagctgggatactagcaaaaaagatttaaaagactattttactaaatttggagaggtcgttgactgtacaataaaaatggatcccaacactggacggtcaagagggtttgggtttatcctgttcaaagatgcagccagtgtggagaaggtcctagaccagaaggagcacaggctggatggccgtgtcattgaccctaaaaaggccatggctatgaagaaggacccggtgaagaaaatcttcgttgggggtctgaatcctgaagccactgaggaaaagatcagggagtactttggcgagtttggggagattgaggccattgaattgccaatggatccaaagttgaacaaaagacgaggttttgtgtttatcacctttaaagaagaagaacccgtgaagaaggttctggagaaaaagttccatactgtcagtggaagcaagtgtgagatcaaggtggcccagcccaaagaagtctatcagcagcagcagtatggctctgggggccgtggaaaccgcaaccgagggaaccgaggcagcggaggtggtggtggaggtggaggtcagagtcagagttggaatcagggctacggcaactactggaaccagggctacggctaccagcagggctacgggcctggctatggcggctacgactactcgccctatggctattacggctacggccccggctacgactacagtcagggtagtacaaactacggcaagagccagcgacgtggtggccatcagaataactacaagccatactagtaatgaactagtccgtaacttgaaagtatttcgatttcttggctttatatatcttgtggaaaggacgatacgaggtccggtgtaaatagatt

SEQ ID NO: 1214 - DNA, 2837 bp, Homo sapiens
  source 1..2837: mol_type = genomic DNA
accgccaccatggaggtaaattgtttaacactaaaagacctgatcagccccaggcagcccagactagattttgcagttgaagatggggaaaatgcacaaaaggaaaatatatttgttgatcgatcaaggatggccccgaagactccaataaaaaatgaaccaattgatttatcgaagcaaaaaaaatttactccagaaagaaatcccattactccagttaagtttgttgacagacagcaagcggaaccatggacacccacagctaacctgaagatgctcattagtgctgccagcccagatataagggaccgggagaagaaaaagggactattccgacccattgaaaacaaggacgatgcatttacagattctctacagcttgatgttgttggggacagtgctgtggacgaatttgaaaagcaaaggccaagcagaaaacagaaaagtttaggactcctgtgccagaagtttctagctcgctatccaagttatcccttgtcaactgagaaaactaccatctccctagatgaagttgctgtcagtcttggtgtggaaaggagacgcatctatgacattgtaaatgtgctggagtcgctgcatctggtcagccgggtggctaagaatcagtatggctggcatggacggcacagcctgccaaaaaccctgaggaacctccagagactaggagaggagcagaaatatgaagagcaaatggcctacctccaacagaaagagctggacctgatagattataaatttggagaacgtaaaaaagatggtgatccagattcccaggaacaacagttactggatttctctgaacccgactgtccctcttcatctgcaaacagtagaaaagacaagtctctgagaattatgagccagaagtttgtcatgctgttcctcgtctccaaaaccaagattgtcactctggatgtggctgccaaaatactgatagaagaaagccaagatgccccagaccatagtaaatttaaaacaaaggtacgacgcctctatgacatagccaatgttctgaccagcttggctctgataaagaaagtgcatgtaacagaagagcgaggtcgtaaaccagccttcaagtggatcgggcctgtggacttcagctcaagtgatgaagaactggtggatgtttctgcatctgtcttaccagaattgaaaagagaaacatatggccagattcaagtctgtgcaaaacagaagctggctcgccatggttcttttaacacagttcaggcttctgagaggatccagaggaaagtgaactcagaaccgagcagcccgtacagagaagaacaaggatcaggtggctactctttagaaattggaagcctggcagctgtctatagacagaaaatagaagacaattcacagggaaaagcctttgccagtaagagagtggtgcctccatcaagcagcttggaccctgttgctcctttccctgtcctctctgttgacccagaatattgtgttaatcctttagcccacccagtattttctgttgctcagacggacctgcaggcattctccatgcagaacggtctgaatggacaagtggatgtctcacttgcttctgcagcctctgctgtggagagcctgaagccagcactccttgctggccagcctctagtgtatgtgccctctgcctcactgttcatgctgtatggaagtctgcaggagggaccagcgtcagggtcagggtcagagagggatgacagaagctcagaagccccagccacagtagagctgtcatctgcaccctcagctcagaagcgcctctgtgaggagaggaaacctcaggaggaggatgagccagccactaaaaggcaaagtagggaatatgaagacggcccgctgtcgcttgtcatgcccaagaaaccctcagattccacagaccttgcctctcccaagactatgggtaacagggcatctatacccctcaaagacattcatgtgaatggccaactccctgctgcagaagagatttcaggaaaggcaacagcaaactctcttgtttcttctgagtggggaaatccttcaagaaatacagatgttgaaaagccttcaaaagaaaatgaaagcaccaaagagccttctttgctacaatatctttgtgtgcagtctcctgcaggattaaatggtttcaatgtacttttatctggcagtcaaaccccccctactgtgggcccgtcctcaggtcagctgccgtctttcagtgtcccttgcatggtcttaccatctccacctctgggcccttttcctgttctctattctcctgcaatgccgggcccggtttcttctactcttggtgctctcccaaacacaggacctgtgaatttcagcttgcctggccttggatcaatagcccagcttctcgtcggccccacagctgtggttaatccaaagtcgtccacactcccttctgcagaccctcagcttcagagtcagccctcactaaacctaagtccagtgatgtcaaggtcacacagtgtcgtccaacaacctgagtcccccgtttacgtgggacatccagtctcagtagtaaaattacatcagtcaccagttccagtgacccccaagagcatccaacgcacacatcgtgagacgtttttcaagacacccggcagccttggagaccctgtcctgaagagaagagaaaggaaccagtcacgaaacaccagctcggcccagaggagactagaaatccccagcggcggcgctgactagtaatgaactagtccgtaacttgaaagtatttcgatttcttggctttatatatcttgtggaaaggacgacaggtttgcgtaagtgcgcggctg

SEQ ID NO: 1215 - DNA, 1406 bp, Homo sapiens
  source 1..1406: mol_type = genomic DNA
accgccaccatgtctattctcaagatccatgccagggagatctttgactctcgcgggaatcccactgttgaggttgatctcttcacctcaaaaggtctcttcagagctgctgtgcccagtggtgcttcaactggtatctatgaggccctagagctccgggacaatgataagactcgctatatggggaagggtgtctcaaaggctgttgagcacatcaataaaactattgcgcctgccctggttagcaagaaactgaacgtcacagaacaagagaagattgacaaactgatgatcgagatggatggaacagaaaataaatctaagtttggtgcgaacgccattctgggggtgtcccttgccgtctgcaaagctggtgccgttgagaagggggtccccctgtaccgccacatcgctgacttggctggcaactctgaagtcatcctgccagtcccggcgttcaatgtcatcaatggcggttctcatgctggcaacaagctggccatgcaggagttcatgatcctcccagtcggtgcagcaaacttcagggaagccatgcgcattggagcagaggtttaccacaacctgaagaatgtcatcaaggagaaatatgggaaagatgccaccaatgtgggggatgaaggcgggtttgctcccaacatcctggagaataaagaaggcctggagctgctgaagactgctattgggaaagctggctacactgataaggtggtcatcggcatggacgtagcggcctccgagttcttcaggtctgggaagtatgacctggacttcaagtctcccgatgaccccagcaggtacatctcgcctgaccagctggctgacctgtacaagtccttcatcaaggactacccagtggtgtctatcgaagatccctttgaccaggatgactggggagcttggcagaagttcacagccagtgcaggaatccaggtagtgggggatgatctcacagtgaccaacccaaagaggatcgccaaggccgtgaacgagaagtcctgcaactgcctcctgctcaaagtcaaccagattggctccgtgaccgagtctcttcaggcgtgcaagctggcccaggccaatggttggggcgtcatggtgtctcatcgttcgggggagactgaagataccttcatcgctgacctggttgtggggctgtgcactgggcagatcaagactggtgccccttgccgatctgagcgcttggccaagtacaaccagctcctcagaattgaagaggagctgggcagcaaggctaagtttgccggcaggaacttcagaaaccccttggccaagtagtaatgaactagtccgtaacttgaaagtatttcgatttcttggctttatatatcttgtggaaaggacgacgtaacggccgcgctcctaacacc

SEQ ID NO: 1216 - DNA, 818 bp, Homo sapiens
  source 1..818: mol_type = genomic DNA
accgccaccatgccgaagtcgtgcgcggcccggcagtgctgcaaccgctacagcagccgcaggaagcagctcaccttccaccggtttccgttcagccgcccggagctgctgaaggaatgggtgctgaacatcggccggggcaacttcaagcccaagcagcacacggtcatctgctccgagcacttccggccagagtgcttcagcgcctttggaaaccgcaagaacctaaagcacaatgccgtgcccacggtgttcgcctttcaggaccccacacaggtgagggagaacacagaccctgccagtgagagaggaaatgccagctcttctcagaaagaaaaggtcctccctgaggcgggggccggagaggacagtcctgggagaaacatggacactgcacttgaagagcttcagttgcccccaaatgccgaaggccacgtaaaacaggtctcgccacggaggccgcaagcaacagaggctgttggccggccgactggccctgcaggcctgagaaggacccccaacaagcagccatctgatcacagctatgcccttttggacttagattccctgaagaaaaaactcttcctcactctgaaggaaaatgaaaagctccggaagcgcttgcaggcccagaggctggtgatgcgaaggatgtccagccgcctccgtgcttgcaaagggcaccagggactccaggccagacttgggccagagcagcagagctagtaatgaactagtccgtaacttgaaagtatttcgatttcttggctttatatatcttgtggaaaggacgatccaggttgcccgttccttcgtga

SEQ ID NO: 1217 - DNA, 629 bp, Homo sapiens
  source 1..629: mol_type = genomic DNA
accgccaccatgccgaagtcgtgcgcggcccggcagtgctgcaaccgctacagcagccgcaggaagcagctcaccttccaccggtttccgttcagccgcccggagctgctgaaggaatgggtgctgaacatcggccggggcaacttcaagcccaagcagcacacggtcatctgctccgagcacttccggccagagtgcttcagcgcctttggaaaccgcaagaacctaaagcacaatgccgtgcccacggtgttcgcctttcaggaccccacacagcaggtgagggagaacacagaccctgccagtgagagaggaaatgccagctcttctcagaaagaaaagacttcaccctgccgttcccaggtcctccctgaggcgggggccggagaggacagtcctgggagaaacatggacactgcacttgaagagcttcagttgcccccaaatgccgaaggccacgtaaaacaggcaatgttgtttaatgtagaaaatggaaccccagcttcacgtgaagccttgtggttgagtgaggagtagtaatgaactagtccgtaacttgaaagtatttcgatttcttggctttatatatcttgtggaaaggacgatggcctcttattccgactgagctt

SEQ ID NO: 1218 - DNA, 821 bp, Homo sapiens
  source 1..821: mol_type = genomic DNA
accgccaccatgccgaagtcgtgcgcggcccggcagtgctgcaaccgctacagcagccgcaggaagcagctcaccttccaccggtttccgttcagccgcccggagctgctgaaggaatgggtgctgaacatcggccggggcaacttcaagcccaagcagcacacggtcatctgctccgagcacttccggccagagtgcttcagcgcctttggaaaccgcaagaacctaaagcacaatgccgtgcccacggtgttcgcctttcaggaccccacacagcaggtgagggagaacacagaccctgccagtgagagaggaaatgccagctcttctcagaaagaaaaggtcctccctgaggcgggggccggagaggacagtcctgggagaaacatggacactgcacttgaagagcttcagttgcccccaaatgccgaaggccacgtaaaacaggtctcgccacggaggccgcaagcaacagaggctgttggccggccgactggccctgcaggcctgagaaggacccccaacaagcagccatctgatcacagctatgcccttttggacttagattccctgaagaaaaaactcttcctcactctgaaggaaaatgaaaagctccggaagcgcttgcaggcccagaggctggtgatgcgaaggatgtccagccgcctccgtgcttgcaaagggcaccagggactccaggccagacttgggccagagcagcagagctagtaatgaactagtccgtaacttgaaagtatttcgatttcttggctttatatatcttgtggaaaggacgaaatcagggccaacggttcttgaac

SEQ ID NO: 1219 - DNA, 2606 bp, Homo sapiens
  source 1..2606: mol_type = genomic DNA
accgccaccatgatgaaggaggtcttgtcaacagggcaaggcaatagagaagtgatccacacagggacattgcaaagacatcaaagttatcacattggagacttttgcttccaggaaattgagaaagaaattcataacattgagtttcagtgtcaagaagatgaaagaaatggccatgaagcacccacgacaaaaataaaaaagttgactggtagcacagaccaacatgatcacaggcatgctggaaacaagcctattaaagatcagcttggatcaagcttttattcacatctgcctgaactccacatatttcagatcaaaggtgaaattgctaatcaacttgagaagtctaccagtgatgcttcctcagtttcaacatcccaaagaatttcctgtaggccccaaatccatatttctaataactatgggaataatcccctgaattcttcattactcccacaaaaacaggaagtacacatgagagaaaaatctttcccatgtaatgagagtggcaaagcctttaattgtagctcactcttaaggaaacaccagataccccatttaggagacaaacaatataaatgtgatgtatgtggcaagctctttaatcacaagcaataccttgcatgccatcgtagatgtcacactggagagaaaccttacaagtgtaaagagtgtggaaagtccttcagttacaagtcatcccttacatgccatcatagacttcatactggagtaaaaccttacaagtgtaatgagtgtggcaaggtctttcgtcaaaattcagcccttgtaattcataaggcaattcatactggagagaaaccttacaagtgtaatgaatgtggcaaggcttttaatcaacaatcacacctttcacgccatcaaagacttcatactggagtgaaaccttacaaatgtaagatttgtgagaaggcttttgcgtgtcattcctatctggcaaaccatactagaattcatagtggagagaaaacatacaagtgtaatgagtgtggtaaggcttttaatcatcaatcaagccttgcacgtcatcatatacttcatactggagagaaaccttacaaatgtgaagaatgtgacaaagttttcagtcagaaatcaacccttgagagacataagagaattcatactggagagaaaccatacaaatgtaaggtttgtgatacagctttcacgtgtaattcacagctggcacgacatagaagaattcacactggagagaaaacttacaagtgtaatgagtgtcgcaagaccttcagccgcaggtcatcccttctatgccatcgtagacttcatagtggtgaaaaaccttacaagtgtaatcagtgtggcaataccttccgtcaccgggcatcccttgtataccatcgtagacttcacactctagagaaatcttacaaatgtacggtttgtaacaaggttttcatgcgtaattcagtcctggctgtacatactagaattcacactgcaaagaaaccttacaagtgtaatgaatgtgggaaagcttttaatcaacaatcacatctttcacgtcatcgtagacttcatactggagagaaaccttacaaatgtgaagcatgtgacaaagtttttggtcagaaatcagctcttgagtcacataagagaattcatactggagagaaaccatacagatgtcaggtttgtgacacagctttcacgtggaattcacagctggcacgacatacaagaattcacactggagaaaaaacttacaagtgtaatgagtgtgggaagaccttcagttacaagtcatcacttgtatggcatcgtagacttcatggtggagagaaatcttacaaatgtaaggtttgtgacaaggctttcgtgtgtcgttcctatgtggcaaaacatactagaattcacagtggaatgaaaccttacaagtgtaatgagtgcagcaagaccttcagtaacaggtcatcccttgtatgccatcgtagaattcatagtggtgagaaaccttacaagtgtagtgagtgcagcaagacgttcagtcagaaggcaacccttctatgccatcgtagacttcatagtggtgagaaaccttacaagtgtaacgactgtggcaataccttccgtcactggtcatcccttgtataccatcgtagacttcatactggagagaaatcttacaaatgtacggtttgtgacaaggctttcgtgcgtaattcatacctggcaagacatattagaattcacactgcagagaaaccttacaagtgtaatgaatgtggaaaggcttttaatgaacaatcacacctttcacgtcatcatagaattcatactggagagaaaccttacaaatgtgaagcatgtgacaaagttttcagtcgcaaatcacaccttaaaagacataggataattcatactggagagaaaccttacaagtgtaatgagtgtggcaaagcctttagtgaccggtcaacacttattcaccatcaggcaattcatggtatagggaaatttgattagtaatgaactagtccgtaacttgaaagtatttcgatttcttggctttatatatcttgtggaaaggacgaacacaagaactaaagggtaggaag

SEQ ID NO: 1220 - DNA, 2813 bp, Homo sapiens
  source 1..2813: mol_type = genomic DNA
accgccaccatgttacgtgaggaagcagctcagaagaggaaaggaaaggagtcaggcatggctcttcctcagggacgcttgactttcagggatgtggctatagaattctcattggcagagtggaaattcctgaaccctgcacagagggctttgtacagggaagtgatgttggagaactacaggaacctggaggctgtggatatctcttccaaacacatgatgaaggaggtcttgtcaacagggcaaggcaatagagaagtgatccacacagggacattgcaaagacatcaaagttatcacattggagacttttgcttccaggaaattgagaaagaaattcataacattgagtttcagtgtcaagaagatgaaagaaatggccatgaagcacccacgacaaaaataaaaaagttgactggtagcacagaccaacatgatcacaggcatgctggaaacaagcctattaaagatcagcttggatcaagcttttattcacatctgcctgaactccacatatttcagatcaaaggtgaaattgctaatcaacttgagaagtctaccagtgatgcttcctcagtttcaacatcccaaagaatttcctgtaggccccaaatccatatttctaataactatgggaataatcccctgaattcttcattactcccacaaaaacaggaagtacacatgagagaaaaatctttcccatgtaatgagagtggcaaagcctttaattgtagctcactcttaaggaaacaccagataccccatttaggagacaaacaatataaatgtgatgtatgtggcaagctctttaatcacaagcaataccttgcatgccatcgtagatgtcacactggagagaaaccttacaagtgtaaagagtgtggaaagtccttcagttacaagtcatcccttacatgccatcatagacttcatactggagtaaaaccttacaagtgtaatgagtgtggcaaggtctttcgtcaaaattcagcccttgtaattcataaggcaattcatactggagagaaaccttacaagtgtaatgaatgtggcaaggcttttaatcaacaatcacacctttcacgccatcaaagacttcatactggagtgaaaccttacaaatgtaagatttgtgagaaggcttttgcgtgtcattcctatctggcaaaccatactagaattcatagtggagagaaaacatacaagtgtaatgagtgtggtaaggcttttaatcatcaatcaagccttgcacgtcatcatatacttcatactggagagaaaccttacaaatgtgaagaatgtgacaaagttttcagtcagaaatcaacccttgagagacataagagaattcatactggagagaaaccatacaaatgtaaggtttgtgatacagctttcacgtgtaattcacagctggcacgacatagaagaattcacactggagagaaaacttacaagtgtaatgagtgtcgcaagaccttcagccgcaggtcatcccttctatgccatcgtagacttcatagtggtgaaaaaccttacaagtgtaatcagtgtggcaataccttccgtcaccgggcatcccttgtataccatcgtagacttcacactctagagaaatcttacaaatgtacggtttgtaacaaggttttcatgcgtaattcagtcctggctgtacatactagaattcacactgcaaagaaaccttacaagtgtaatgaatgtgggaaagcttttaatcaacaatcacatctttcacgtcatcgtagacttcatactggagagaaaccttacaaatgtgaagcatgtgacaaagtttttggtcagaaatcagctcttgagtcacataagagaattcatactggagagaaaccatacagatgtcaggtttgtgacacagctttcacgtggaattcacagctggcacgacatacaagaattcacactggagaaaaaacttacaagtgtaatgagtgtgggaagaccttcagttacaagtcatcacttgtatggcatcgtagacttcatggtggagagaaatcttacaaatgtaaggtttgtgacaaggctttcgtgtgtcgttcctatgtggcaaaacatactagaattcacagtggaatgaaaccttacaagtgtaatgagtgcagcaagaccttcagtaacaggtcatcccttgtatgccatcgtagaattcatagtggtgagaaaccttacaagtgtagtgagtgcagcaagacgttcagtcagaaggcaacccttctatgccatcgtagacttcatagtggtgagaaaccttacaagtgtaacgactgtggcaataccttccgtcactggtcatcccttgtataccatcgtagacttcatactggagagaaatcttacaaatgtacggtttgtgacaaggctttcgtgcgtaattcatacctggcaagacatattagaattcacactgcagagaaaccttacaagtgtaatgaatgtggaaaggcttttaatgaacaatcacacctttcacgtcatcatagaattcatactggagagaaaccttacaaatgtgaagcatgtgacaaagttttcagtcgcaaatcacaccttaaaagacataggataattcatactggagagaaaccttacaagtgtaatgagtgtggcaaagcctttagtgaccggtcaacacttattcaccatcaggcaattcatggtatagggaaatttgattagtaatgaactagtccgtaacttgaaagtatttcgatttcttggctttatatatcttgtggaaaggacgatacaagtgggtatgatcgactcga

SEQ ID NO: 1221 - DNA, 3086 bp, Homo sapiens
  source 1..3086: mol_type = genomic DNA
accgccaccatgcggcggcgcccgccgagccggggcggacgcggggcggcccgggcccgggagacgcgccggcagccccggcaccgcagcggtcgcaggatggccgaggctatcagctgtactctgaactgtagttgccaaagtttcaaacccgggaaaataaaccaccgtcagtgtgaccaatgcaagcatggatgggtggcccacgctctaagtaagctaaggatcccccccatgtatccaacaagccaggtggagattgtccagtccaatgtagtgtttgatattagcagcctcatgctctatgggacccaggccatccccgttcgcctaaaaatcctactggaccggctcttcagtgtgttgaagcaagatgaggttctccagatcctccatgccttggactggacacttcaggattatatccgtggatacgtactgcaggatgcatcaggaaaggtgttggatcactggagcatcatgaccagtgaggaagaagtggccaccttgcagcagttccttcgttttggagagaccaaatctatagttgaactcatggcaattcaagagaaagaagagcaatccatcatcataccaccttccacagcaaatgtagatatcagggctttcatcgagagctgcagtcacaggagttctagcctccccactcctgtggacaaaggaaaccccagcagtatacacccctttgagaacctcataagcaacatgactttcatgctgcctttccagttcttcaaccctctgcctcctgcactgatagggtcattgcccgaacaatatatgttggagcagggtcatgaccaaagtcaggaccccaaacaggaagtccatgggcccttccctgacagcagcttcttaacttccagttccacaccatttcaggttgaaaaagatcagtgtttaaactgtccggatgctattactaaaaaagaagacagcacccatttaagtgactccagctcatacaacattgtcactaagtttgaaaggacacagttatcccctgaggccaaagtgaagcctgagaggaatagccttggtacaaagaagggccgggtgttctgcactgcatgtgagaagaccttctatgacaaaggcaccctcaaaatccactacaatgccgtccacttgaagatcaagcataagtgcaccatcgaagggtgtaacatggtgttcagctccctaaggagccggaatcgccatagcgccaaccccaaccctcggctgcacatgccaatgaacagaaataaccgggacaaagacctcaggaacagcctgaacctggccagctctgagaactacaagtgcccaggtttcacagtgacgtccccagactgtaggcctcctcccagctaccctggttcaggagaggattccaaaggccaaccagccttcccaaacattgggcaaaatggtgtgctttttcccaacctaaagacagtccagccagtccttcctttctaccgcagtccagccacgcctgccgaggtagcaaacacgcctgggatactcccttccctcccgctgttgtcctcttcaatcccagaacagctcatttcaaacgaaatgccatttgatgcccttcccaagaagaaatccaggaagtccagtatgcctatcaaaatagagaaagaagctgtggaaatagctaatgagaaaagacacaacctcagctcagatgaagacatgcccctacaggtggtcagtgaagatgagcaggaggcctgcagtcctcagtcacacagagtatctgaggagcagcatgtacagtcaggaggcttagggaagcctttccctgaaggggagaggccctgccatcgtgaatcagtaattgagtccagtggagccatcagccaaacccctgagcaggccacacacaattcagagagggagactgagcagacaccagcattgatcatggtgccaagggaggtcgaggatggtggccatgaacactacttcacacctgggatggaaccccaagttcctttttctgactacatggaactgcagcagcgcctgctggctgggggactcttcagtgctttgtccaacaggggaatggcttttccttgtcttgaagattctaaagaactggagcacgtgggtcagcatgcattagcaaggcagatagaagaaaatcgcttccagtgtgacatctgcaagaagacctttaaaaatgcttgtagtgtgaaaattcatcacaagaatatgcatgtcaaagaaatgcacacatgcacagtggagggctgtaatgctacctttccctcccgcaggagcagagacagacacagctcaaacctaaacctccaccaaaaagcattgagccaggaagcattggagagtagtgaagatcatttccgtgcagcttaccttctgaaagatgtggctaaggaagcctatcaggatgtggcttttacacagcaagcctcccagacatctgtcatcttcaaaggaacaagtcgaatgggcagtctggtttacccaataacgcaagtccacagtgccagcctggagagctacaactctggccccttgagcgagggcaccatcctggatttgagcactacctcgagcatgaagtcagagagtagcagccattcttcctgggactctgacggggtgagtgaggaaggcactgtgcttatggaggacagtgatgggaactgtgaagggtcgagccttgtccctggggaagatgagtaccccatctgtgtcctgatggagaaggctgaccagagccttgctagcctgccttctgggttgcccataacctgtcatctctgccaaaagacatacagtaacaaagggacctttagggcccactacaaaactgtgcacctccggcagctccacaaatgcaaagtaccaggctgcaacaccatgttttcgtctgttcgcagtcgaaacagacacagccagaatcccaacctgcacaaaagcctggcctcatctccaagtcacctccagtagtaatgaactagtccgtaacttgaaagtatttcgatttcttggctttatatatcttgtggaaaggacgaaaagggcgcagcacctgcctacgt

SEQ ID NO: 1222 - DNA, 3065 bp, Homo sapiens
  source 1..3065: mol_type = genomic DNA
accgccaccatgcggtgtagaaacatgttcttctcatttaaggcatctctttgtggctgcggggctgccaccgctccgagtctgacagctatcagctgtactctgaactgtagttgccaaagtttcaaacccgggaaaataaaccaccgtcagtgtgaccaatgcaagcatggatgggtggcccacgctctaagtaagctaaggatcccccccatgtatccaacaagccaggtggagattgtccagtccaatgtagtgtttgatattagcagcctcatgctctatgggacccaggccatccccgttcgcctaaaaatcctactggaccggctcttcagtgtgttgaagcaagatgaggttctccagatcctccatgccttggactggacacttcaggattatatccgtggatacgtactgcaggatgcatcaggaaaggtgttggatcactggagcatcatgaccagtgaggaagaagtggccaccttgcagcagttccttcgttttggagagaccaaatctatagttgaactcatggcaattcaagagaaagaagagcaatccatcatcataccaccttccacagcaaatgtagatatcagggctttcatcgagagctgcagtcacaggagttctagcctccccactcctgtggacaaaggaaaccccagcagtatacacccctttgagaacctcataagcaacatgactttcatgctgcctttccagttcttcaaccctctgcctcctgcactgatagggtcattgcccgaacaatatatgttggagcagggtcatgaccaaagtcaggaccccaaacaggaagtccatgggcccttccctgacagcagcttcttaacttccagttccacaccatttcaggttgaaaaagatcagtgtttaaactgtccggatgctattactaaaaaagaagacagcacccatttaagtgactccagctcatacaacattgtcactaagtttgaaaggacacagttatcccctgaggccaaagtgaagcctgagaggaatagccttggtacaaagaagggccgggtgttctgcactgcatgtgagaagaccttctatgacaaaggcaccctcaaaatccactacaatgccgtccacttgaagatcaagcataagtgcaccatcgaagggtgtaacatggtgttcagctccctaaggagccggaatcgccatagcgccaaccccaaccctcggctgcacatgccaatgaacagaaataaccgggacaaagacctcaggaacagcctgaacctggccagctctgagaactacaagtgcccaggtttcacagtgacgtccccagactgtaggcctcctcccagctaccctggttcaggagaggattccaaaggccaaccagccttcccaaacattgggcaaaatggtgtgctttttcccaacctaaagacagtccagccagtccttcctttctaccgcagtccagccacgcctgccgaggtagcaaacacgcctgggatactcccttccctcccgctgttgtcctcttcaatcccagaacagctcatttcaaacgaaatgccatttgatgcccttcccaagaagaaatccaggaagtccagtatgcctatcaaaatagagaaagaagctgtggaaatagctaatgagaaaagacacaacctcagctcagatgaagacatgcccctacaggtggtcagtgaagatgagcaggaggcctgcagtcctcagtcacacagagtatctgaggagcagcatgtacagtcaggaggcttagggaagcctttccctgaaggggagaggccctgccatcgtgaatcagtaattgagtccagtggagccatcagccaaacccctgagcaggccacacacaattcagagagggagactgagcagacaccagcattgatcatggtgccaagggaggtcgaggatggtggccatgaacactacttcacacctgggatggaaccccaagttcctttttctgactacatggaactgcagcagcgcctgctggctgggggactcttcagtgctttgtccaacaggggaatggcttttccttgtcttgaagattctaaagaactggagcacgtgggtcagcatgcattagcaaggcagatagaagaaaatcgcttccagtgtgacatctgcaagaagacctttaaaaatgcttgtagtgtgaaaattcatcacaagaatatgcatgtcaaagaaatgcacacatgcacagtggagggctgtaatgctacctttccctcccgcaggagcagagacagacacagctcaaacctaaacctccaccaaaaagcattgagccaggaagcattggagagtagtgaagatcatttccgtgcagcttaccttctgaaagatgtggctaaggaagcctatcaggatgtggcttttacacagcaagcctcccagacatctgtcatcttcaaaggaacaagtcgaatgggcagtctggtttacccaataacgcaagtccacagtgccagcctggagagctacaactctggccccttgagcgagggcaccatcctggatttgagcactacctcgagcatgaagtcagagagtagcagccattcttcctgggactctgacggggtgagtgaggaaggcactgtgcttatggaggacagtgatgggaactgtgaagggtcgagccttgtccctggggaagatgagtaccccatctgtgtcctgatggagaaggctgaccagagccttgctagcctgccttctgggttgcccataacctgtcatctctgccaaaagacatacagtaacaaagggacctttagggcccactacaaaactgtgcacctccggcagctccacaaatgcaaagtaccaggctgcaacaccatgttttcgtctgttcgcagtcgaaacagacacagccagaatcccaacctgcacaaaagcctggcctcatctccaagtcacctccagtagtaatgaactagtccgtaacttgaaagtatttcgatttcttggctttatatatcttgtggaaaggacgacacgttacgcttacgacggtgacc

SEQ ID NO: 1223 - DNA, 2279 bp, Homo sapiens
  source 1..2279: mol_type = genomic DNA
accgccaccatggaacaatctaatgattcattaagagtcaaccataatgacggtgaagagtcaaaaaccagtgctcaagtatttgagcatctaatctgtatggactccagggattcttcctttggacaaaatgattctcctacagttttgcccatcactactcgtgaagcaaataattcactcatatcacagaatataccagggcccctgactcagacacagactctttctgcagagcaattccatctagtggaccaaaatgggcaggctattcaatatgaacttcagtcattgggggaatccaatgcacaaatgatgatcgttgccagcccaacagaaaatggacaggtacttcgtgtaattccacctacccagacaggaatggcacaagtgattatacctcaggggcaacttgtggatgtgaatagtcctcgggatgtccctgaagagaaacccagtaacagaaacttaccaactgtaagagtggatactctagcagacaataccagcaattacattcttcatcctcaaacatccttcccattgcccaaaaagtcagtgaccggaatgctggaagaaccccttctggggcctcttcagccactttcttctaatacacctatatgggcctgccgtcttaggagctgtgagaaaattggagattcataccgtggctactgtgtaagtgagactgaattagaaagtgtcctaacatttcacaagcagcaaacacagagtgtttgggggacccgtcagtctccaagcccagccaagcctgctacacgcttgatgtggaaatcccagtatgttccatatgatggaatcccatttgttaatgcagggagtagagctgtggtaatggagtgtcagtatgggccaagaagaaaaggtttccagttaaaaaaagtcagtgagcaggaaagcaggtcttgtcagctctacaaagccacttgtccagctcggatttacattaaaaaggtacagaagtttcctgaatatagagttcctacagaccccaaaattgacaagaaaattatcagaatggagcaggagaaagcttttaacatgctaaagaagaacttggtagatgctggtggtgttcttaggtggtatgtacagttacctacacagcaagctcatcagtatcatgaattagagactccctgcctcactttgtcaccttctccttttcctgtgtcttctcttgaagaagaggaaactgcagttagagatgagaattgtgcattaccctcacgtttacatcctcaagtagcacataagattcaagaattagtatcacagggaatagaacaagtgtatgcagtaaggaaacagctaagaaaatttgtggaaagggaactgttcaaacccgatgaggtacctgaaagacataatttatctttttttccaactgtaaatgatataaaaaatcacatccatgaggtacagaaatccttgagaaatggagatacggtatataactcagagattattccagcaacgcttcaatggactacagacagtgggaatattctcaaagagaccatgacagttacatttgcagaaggaaattcaccaggagaatcaattaccaccaaagtggaaacaaatcagaccaggggttctttgtctcctgagccaacccacttgctctcctcactctcctcatttcagcccaaaatatttacacaactacagggtttgcagttacaaccaaggtacacctctcctgatgaatcaccagctgtggtatcagtaaataaccagccgtcctctagtccttcaggacttctggatacaataggaagtgctgtaatgaataataattctctactgcttggtcaaagtcatagccttcaaagagatacatgcttaacccaaaacaatagtactgcctccaccatgggtaaccttccagaaccagatcaaaatctagttgcaatggacgagctggtagaagttggagatgttgaggatacagggaatctggaaggaactgttcatcggattctgttgggagatgtgcagactattccaatacagattatagacaaccactcagctcttattgaagaaaatccagaaagtaccatttctgtgagccaagttaaacaagaacccaaagaaccagcattgtctatggaagcaaaaaaaactgtggactataagaaattatctgctacatagtaatgaactagtccgtaacttgaaagtatttcgatttcttggctttatatatcttgtggaaaggacgaactctaccactccattccactgcc

SEQ ID NO: 1224 - DNA, 1973 bp, Homo sapiens
  source 1..1973: mol_type = genomic DNA
accgccaccatgatcgttgccagcccaacagaaaatggacaggtacttcgtgtaattccacctacccagacaggaatggcacaagtgattatacctcaggggcaacttgtggatgtgaatagtcctcgggatgtccctgaagagaaacccagtaacagaaacttaccaactgtaagagtggatactctagcagacaataccagcaattacattcttcatcctcaaacatccttcccattgcccaaaaagtcagtgaccggaatgctggaagaaccccttctggggcctcttcagccactttcttctaatacacctatatgggcctgccgtcttaggagctgtgagaaaattggagattcataccgtggctactgtgtaagtgagactgaattagaaagtgtcctaacatttcacaagcagcaaacacagagtgtttgggggacccgtcagtctccaagcccagccaagcctgctacacgcttgatgtggaaatcccagtatgttccatatgatggaatcccatttgttaatgcagggagtagagctgtggtaatggagtgtcagtatgggccaagaagaaaaggtttccagttaaaaaaagtcagtgagcaggaaagcaggtcttgtcagctctacaaagccacttgtccagctcggatttacattaaaaaggtacagaagtttcctgaatatagagttcctacagaccccaaaattgacaagaaaattatcagaatggagcaggagaaagcttttaacatgctaaagaagaacttggtagatgctggtggtgttcttaggtggtatgtacagttacctacacagcaagctcatcagtatcatgaattagagactccctgcctcactttgtcaccttctccttttcctgtgtcttctcttgaagaagaggaaactgcagttagagatgagaattgtgcattaccctcacgtttacatcctcaagtagcacataagattcaagaattagtatcacagggaatagaacaagtgtatgcagtaaggaaacagctaagaaaatttgtggaaagggaactgttcaaacccgatgaggtacctgaaagacataatttatctttttttccaactgtaaatgatataaaaaatcacatccatgaggtacagaaatccttgagaaatggagatacggtatataactcagagattattccagcaacgcttcaatggactacagacagtgggaatattctcaaagagaccatgacagttacatttgcagaaggaaattcaccaggagaatcaattaccaccaaagtggaaacaaatcagaccaggggttctttgtctcctgagccaacccacttgctctcctcactctcctcatttcagcccaaaatatttacacaactacagggtttgcagttacaaccaaggtacacctctcctgatgaatcaccagctgtggtatcagtaaataaccagccgtcctctagtccttcaggacttctggatacaataggaagtgctgtaatgaataataattctctactgcttggtcaaagtcatagccttcaaagagatacatgcttaacccaaaacaatagtactgcctccaccatgggtaaccttccagaaccagatcaaaatctagttgcaatggacgagctggtagaagttggagatgttgaggatacagggaatctggaaggaactgttcatcggattctgttgggagatgtgcagactattccaatacagattatagacaaccactcagctcttattgaagaaaatccagaaagtaccatttctgtgagccaagttaaacaagaacccaaagaaccagcattgtctatggaagcaaaaaaaactgtggactataagaaattatctgctacatagtaatgaactagtccgtaacttgaaagtatttcgatttcttggctttatatatcttgtggaaaggacgaaactcaccgatctaccagtaaaga

SEQ ID NO: 1225 - DNA, 2051 bp, Homo sapiens
  source 1..2051: mol_type = genomic DNA
accgccaccatggaacaatctaatgattcattaagagtcaaccataatgacggtgaagagtcaaaaaccagtgctcaagtatttgagatgatcgttgccagcccaacagaaaatggacaggtacttcgtgtaattccacctacccagacaggaatggcacaagtgattatacctcaggggcaacttgtggatgtgaatagtcctcgggatgtccctgaagagaaacccagtaacagaaacttaccaactgtaagagtggatactctagcagacaataccagcaattacattcttcatcctcaaacatccttcccattgcccaaaaagtcagtgaccggaatgctggaagaaccccttctggggcctcttcagccactttcttctaatacacctatatgggcctgccgtcttaggagctgtgagaaaattggagattcataccgtggctactgtgtaagtgagactgaattagaaagtgtcctaacatttcacaagcagcaaacacagagtgtttgggggacccgtcagtctccaagcccagccaagcctgctacacgcttgatgtggaaatcccagtatgttccatatgatggaatcccatttgttaatgcagggagtagagctgtggtaatggagtgtcagtatgggccaagaagaaaaggtttccagttaaaaaaagtcagtgagcaggaaagcaggtcttgtcagctctacaaagccacttgtccagctcggatttacattaaaaaggtacagaagtttcctgaatatagagttcctacagaccccaaaattgacaagaaaattatcagaatggagcaggagaaagcttttaacatgctaaagaagaacttggtagatgctggtggtgttcttaggtggtatgtacagttacctacacagcaagctcatcagtatcatgaattagagactccctgcctcactttgtcaccttctccttttcctgtgtcttctcttgaagaagaggaaactgcagttagagatgagaattgtgcattaccctcacgtttacatcctcaagtagcacataagattcaagaattagtatcacagggaatagaacaagtgtatgcagtaaggaaacagctaagaaaatttgtggaaagggaactgttcaaacccgatgaggtacctgaaagacataatttatctttttttccaactgtaaatgatataaaaaatcacatccatgaggtacagaaatccttgagaaatggagatacggtatataactcagagattattccagcaacgcttcaatggactacagacagtgggaatattctcaaagagaccatgacagttacatttgcagaaggaaattcaccaggagaatcaattaccaccaaagtggaaacaaatcagaccaggggttctttgtctcctgagccaacccacttgctctcctcactctcctcatttcagcccaaaatatttacacaactacagggtttgcagttacaaccaaggtacacctctcctgatgaatcaccagctgtggtatcagtaaataaccagccgtcctctagtccttcaggacttctggatacaataggaagtgctgtaatgaataataattctctactgcttggtcaaagtcatagccttcaaagagatacatgcttaacccaaaacaatagtactgcctccaccatgggtaaccttccagaaccagatcaaaatctagttgcaatggacgagctggtagaagttggagatgttgaggatacagggaatctggaaggaactgttcatcggattctgttgggagatgtgcagactattccaatacagattatagacaaccactcagctcttattgaagaaaatccagaaagtaccatttctgtgagccaagttaaacaagaacccaaagaaccagcattgtctatggaagcaaaaaaaactgtggactataagaaattatctgctacatagtaatgaactagtccgtaacttgaaagtatttcgatttcttggctttatatatcttgtggaaaggacgattcgaagtggcagctattatggtt

SEQ ID NO: 1226 - DNA, 2528 bp, Homo sapiens
  source 1..2528: mol_type = genomic DNA
accgccaccatgaccagccccgcggccgctcaaagccgggagatcgactgtttgagcccggaagcgcagaagctggcggaagcccggctcgctgcaaaacgggcggcccgcgcggaggctcgcgagatccgcatgaaggagctggagcggcagcagaaggaggaagacagtgagcgctactctcgtagatccagaagaaacacatcggcttctgatgaagacgagcgcatgtcagtgggtagtcgtggaagcctgagggtagaagagagaccagaaaaagattttactgagaaggggtctcgtaacatgccgggcctgtctgcagccacgctggcctctctgggtgggacttcctctcggagaggcagcggagacacctccatctccatcgacaccgaggcatccatcagggaaatcaaggaactcaatgagttaaaggaccagattcaggatgtagaaggcaaatacatgcagggattgaaagagatgaaggactctctagcagaagttgaagagaaatataagaaggctatggtttccaatgctcagctagacaatgaaaagacaaacttcatgtaccaggttgataccctaaaagatatgttgctggagcttgaagaacagctggctgaatctaggcggcagtacgaagagaaaaacaaagaatttgaaagggaaaaacacgcccacagtatactgcaatttcagtttgctgaagtcaaggaggccctgaagcaaagagaggaaatgctcgagaaacatggaataatcctaaattcagaaatagctaccaatggagagacttccgacaccctcaataatgttggataccaaggtcctaccaagatgacaaaagaagagttaaatgccctcaagtcgacaggggatgggaccctaggaagagccagtgaagtggaggtgaaaaatgaaatcgtggcgaatgtggggaaaagagaaatcttgcacaatactgagaaagaacaacacacagaggacacagtgaaggactgtgtggacatagaggtattccctgctggtgagaataccgaggaccagaaatcctctgaagacactgccccattcctaggaaccttagcaggtgctacctatgaggaacaggttcaaagccaaattcttgagagcagttctctccctgaaaacacagtacaggttgagtcaaatgaggtcatgggtgcaccagatgacaggaccagaactccccttgagccatccaactgttggagtgacttagatggtgggaaccacacagagaatgtgggagaggcagcagtgactcaggttgaagagcaggcaggcacagtggcctcgtgtcctttagggcatagtgatgacacagtttatcatgatgacaaatgtatggtagaggtcccccaagagttagagacaagcacagggcatagtttagagaaagaattcaccaaccaggaagcagctgagcccaaggaggttccagcgcacagtacagaagtaggtagggatcacaacgaagaagagggtgaagaaacaggattaagggacgagaaaccaatcaagacagaagttcctggttctccagcaggaactgagggcaactgtcaggaagcgacaggtccaagtacagtagacactcaaaatgaacccttagatatgaaagagcccgatgaagaaaagagtgaccaacagggagaggcattggactcatcgcagaagaagacaaagaacaagaaaaagaaaaacaagaagaaaaaatccccagtacccgtagaaacccttaaagatgttaaaaaagagttaacgtatcagaacacagatttaagtgaaattaaggaagaagagcaggtaaagtctactgacagaaagtcagcagtggaagcccaaaacgaggtgactgaaaatccaaaacagaaaattgcagcagaaagcagtgaaaatgttgattgtccggagaatcctaaaattaagttggatggaaaacttgaccaagaaggtgatgatgtacaaacagcagctgaggaggtactagctgatggagacacattagattttgaggatgacaccgttcaatcatcaggcccgagggctggtggtgaagaattagatgaaggtgttgcaaaagataatgctaaaatagatggtgccactcaaagcagtcctgcagaaccaaagagcgaagacgcagatcgctgcaccctgcccgaacatgaaagtccctcacaggacattagtgatgcctgtgaagcagaaagtacagagaggtgtgagatgtcagaacatccaagtcagaccgtcaggaaagctttagacagcaatagcctagagaacgatgacttgtcggcaccaggaagagagccagggcacttcaatccagaaagcagagaagataccagaggagggaatgagaagggcaaaagcaaagaagactgtaccatgtcctagtaatgaactagtccgtaacttgaaagtatttcgatttcttggctttatatatcttgtggaaaggacgagtcgcattctgagtctcggtcgtt

SEQ ID NO: 1227 - DNA, 2024 bp, Homo sapiens
  source 1..2024: mol_type = genomic DNA
accgccaccatggacatgggcacccagggatcggggcgcaagcggctccccaaccgggagcggctcacggcggaggacgacgcgctcaaccagatcgcgcgggaggcggaagcccggctcgctgcaaaacgggcggcccgcgcggaggctcgcgagatccgcatgaaggagctggagcggcagcagaaggagatctatcaggtccaaaagaaatattatgggctggatacaaaatggggtgacatcgagcagtggatggaagacagtgagcgctactctcgtagatccagaagaaacacatcggcttctgatgaagacgagcgcatgtcagtgggtagtcgtggaagcctgaggtcgcagcctgacttggagtatgggggtccttacgcctggacaaatggttatgatggagaattgtatggatcacagtccctgaatagaagatctggcaggccctcctgtctgtacagcgctgcccggccttcggggagttaccgggcgtctgtgttggatgaaggcagcttcggtgggacccgacggggcagcacctccggctcccgtgctccctcggagtacagcggccacctcaactccagctcccgcgcctcctccagggccagctcggcccgggccagccctgtggtagaagagagaccagaaaaagattttactgagaaggggtctcgtaacatgccgggcctgtctgcagccacgctggcctctctgggtgggacttcctctcggagaggcagcggagacacctccatctccatcgacaccgaggcatccatcagggaaatcaaggaactcaatgagttaaaggaccagattcaggatgtagaaggcaaatacatgcagggattgaaagagatgaaggactctctagcagaagttgaagagaaatataagaaggctatggtttccaatgctcagctagacaatgaaaagacaaacttcatgtaccaggttgataccctaaaagatatgttgctggagcttgaagaacagctggctgaatctaggcggcagtacgaagagaaaaacaaagaatttgaaagggaaaaacacgcccacagtatactgcaatttcagtttgctgaagtcaaggaggccctgaagcaaagagaggaaatgctcgaggaaatccgacagctacagcagaaacaggcgagttctatcagggagatttctgatcttcaggaaacaatagagtggaaagacaaaaagataggggcattagagaggcagaaagagttctttgattccgtaaggagtgaacgggatgatcttagagaagaagtagtcatgctgaaagaggaattaaagaaacatggaataatcctaaattcagaaatagctaccaatggagagacttccgacaccctcaataatgttggataccaaggtcctaccaagatgacaaaagaagagttaaatgccctcaagtcgacaggggatgggaccctagatattaggttgaaaaagctggttgatgaacgggaatgcttattggaacagattaagaaactcaaagggcagctggaggagagacagaagattggcaaactagacaatcttcgatctgaagatgatgtcttggaaaacgggacagacatgcatgtaatggacctacaaagggatgccaacagacagatcagcgacctcaaatttaaacttgcaaaatctgagcaagagataactgcattagaacaaaatgtaataaggttagagagtcaagtatcacgttacaaatcagcggctgaaaatgcagaaaaaatagaagatgaacttaaggcagaaaaacggaaactccaaagagagctccgctctgcattggataaaacagaagagctcgaggtgagcaacggccacttagtgaagcgtctggaaaaaatgaaagcaaatcggagtgcactcttgtcccagcagtagtaatgaactagtccgtaacttgaaagtatttcgatttcttggctttatatatcttgtggaaaggacgagacacacttgccgtgtagtgatac

SEQ ID NO: 1228 - DNA, 2360 bp, Homo sapiens
  source 1..2360: mol_type = genomic DNA
accgccaccatgaccagccccgcggccgctcaaagccgggagatcgactgtttgagcccggaagcgcagaagctggcggaagcccggctcgctgcaaaacgggcggcccgcgcggaggctcgcgagatccgcatgaaggagctggagcggcagcagaaggaggtagaagagagaccagaaaaagattttactgagaaggggtctcgtaacatgccgggcctgtctgcagccacgctggcctctctgggtgggacttcctctcggagaggcagcggagacacctccatctccatcgacaccgaggcatccatcagggaaatcaaggactctctagcagaagttgaagagaaatataagaaggctatggtttccaatgctcagctagacaatgaaaagacaaacttcatgtaccaggttgataccctaaaagatatgttgctggagcttgaagaacagctggctgaatctaggcggcagtacgaagagaaaaacaaagaatttgaaagggaaaaacacgcccacagtatactgcaatttcagtttgctgaagtcaaggaggccctgaagcaaagagaggaaatgctcgagaaacatggaataatcctaaattcagaaatagctaccaatggagagacttccgacaccctcaataatgttggataccaaggtcctaccaagatgacaaaagaagagttaaatgccctcaagtcgacaggggatgggaccctaggaagagccagtgaagtggaggtgaaaaatgaaatcgtggcgaatgtggggaaaagagaaatcttgcacaatactgagaaagaacaacacacagaggacacagtgaaggactgtgtggacatagaggtattccctgctggtgagaataccgaggaccagaaatcctctgaagacactgccccattcctaggaaccttagcaggtgctacctatgaggaacaggttcaaagccaaattcttgagagcagttctctccctgaaaacacagtacaggttgagtcaaatgaggtcatgggtgcaccagatgacaggaccagaactccccttgagccatccaactgttggagtgacttagatggtgggaaccacacagagaatgtgggagaggcagcagtgactcaggttgaagagcaggcaggcacagtggcctcgtgtcctttagggcatagtgatgacacagtttatcatgatgacaaatgtatggtagaggtcccccaagagttagagacaagcacagggcatagtttagagaaagaattcaccaaccaggaagcagctgagcccaaggaggttccagcgcacagtacagaagtaggtagggatcacaacgaagaagagggtgaagaaacaggattaagggacgagaaaccaatcaagacagaagttcctggttctccagcaggaactgagggcaactgtcaggaagcgacaggtccaagtacagtagacactcaaaatgaacccttagatatgaaagagcccgatgaagaaaagagtgaccaacagggagaggcattggactcatcgcagaagaagacaaagaacaagaaaaagaaaaacaagaagaaaaaatccccagtacccgtagaaacccttaaagatgttaaaaaagagttaacgtatcagaacacagatttaagtgaaattaaggaagaagagcaggtaaagtctactgacagaaagtcagcagtggaagcccaaaacgaggtgactgaaaatccaaaacagaaaattgcagcagaaagcagtgaaaatgttgattgtccggagaatcctaaaattaagttggatggaaaacttgaccaagaaggtgatgatgtacaaacagcagctgaggaggtactagctgatggagacacattagattttgaggatgacaccgttcaatcatcaggcccgagggctggtggtgaagaattagatgaaggtgttgcaaaagataatgctaaaatagatggtgccactcaaagcagtcctgcagaaccaaagagcgaagacgcagatcgctgcaccctgcccgaacatgaaagtccctcacaggacattagtgatgcctgtgaagcagaaagtacagagaggtgtgagatgtcagaacatccaagtcagaccgtcaggaaagctttagacagcaatagcctagagaacgatgacttgtcggcaccaggaagagagccagggcacttcaatccagaaagcagagaagataccagaggagggaatgagaagggcaaaagcaaagaagactgtaccatgtcctagtaatgaactagtccgtaacttgaaagtatttcgatttcttggctttatatatcttgtggaaaggacgacgcctagccgtctgtcattaggct

SEQ ID NO: 1229 - DNA, 2456 bp, Homo sapiens
  source 1..2456: mol_type = genomic DNA
accgccaccatgaccagccccgcggccgctcaaagccgggagatcgactgtttgagcccggaagcgcagaagctggcggaagcccggctcgctgcaaaacgggcggcccgcgcggaggctcgcgagatccgcatgaaggagctggagcggcagcagaaggaggaagacagtgagcgctactctcgtagatccagaagaaacacatcggcttctgatgaagacgagcgcatgtcagtgggtagtcgtggaagcctgagggtagaagagagaccagaaaaagattttactgagaaggggtctcgtaacatgccgggcctgtctgcagccacgctggcctctctgggtgggacttcctctcggagaggcagcggagacacctccatctccatcgacaccgaggcatccatcagggaaatcaaggactctctagcagaagttgaagagaaatataagaaggctatggtttccaatgctcagctagacaatgaaaagacaaacttcatgtaccaggttgataccctaaaagatatgttgctggagcttgaagaacagctggctgaatctaggcggcagtacgaagagaaaaacaaagaatttgaaagggaaaaacacgcccacagtatactgcaatttcagtttgctgaagtcaaggaggccctgaagcaaagagaggaaatgctcgagaaacatggaataatcctaaattcagaaatagctaccaatggagagacttccgacaccctcaataatgttggataccaaggtcctaccaagatgacaaaagaagagttaaatgccctcaagtcgacaggggatgggaccctaggaagagccagtgaagtggaggtgaaaaatgaaatcgtggcgaatgtggggaaaagagaaatcttgcacaatactgagaaagaacaacacacagaggacacagtgaaggactgtgtggacatagaggtattccctgctggtgagaataccgaggaccagaaatcctctgaagacactgccccattcctaggaaccttagcaggtgctacctatgaggaacaggttcaaagccaaattcttgagagcagttctctccctgaaaacacagtacaggttgagtcaaatgaggtcatgggtgcaccagatgacaggaccagaactccccttgagccatccaactgttggagtgacttagatggtgggaaccacacagagaatgtgggagaggcagcagtgactcaggttgaagagcaggcaggcacagtggcctcgtgtcctttagggcatagtgatgacacagtttatcatgatgacaaatgtatggtagaggtcccccaagagttagagacaagcacagggcatagtttagagaaagaattcaccaaccaggaagcagctgagcccaaggaggttccagcgcacagtacagaagtaggtagggatcacaacgaagaagagggtgaagaaacaggattaagggacgagaaaccaatcaagacagaagttcctggttctccagcaggaactgagggcaactgtcaggaagcgacaggtccaagtacagtagacactcaaaatgaacccttagatatgaaagagcccgatgaagaaaagagtgaccaacagggagaggcattggactcatcgcagaagaagacaaagaacaagaaaaagaaaaacaagaagaaaaaatccccagtacccgtagaaacccttaaagatgttaaaaaagagttaacgtatcagaacacagatttaagtgaaattaaggaagaagagcaggtaaagtctactgacagaaagtcagcagtggaagcccaaaacgaggtgactgaaaatccaaaacagaaaattgcagcagaaagcagtgaaaatgttgattgtccggagaatcctaaaattaagttggatggaaaacttgaccaagaaggtgatgatgtacaaacagcagctgaggaggtactagctgatggagacacattagattttgaggatgacaccgttcaatcatcaggcccgagggctggtggtgaagaattagatgaaggtgttgcaaaagataatgctaaaatagatggtgccactcaaagcagtcctgcagaaccaaagagcgaagacgcagatcgctgcaccctgcccgaacatgaaagtccctcacaggacattagtgatgcctgtgaagcagaaagtacagagaggtgtgagatgtcagaacatccaagtcagaccgtcaggaaagctttagacagcaatagcctagagaacgatgacttgtcggcaccaggaagagagccagggcacttcaatccagaaagcagagaagataccagaggagggaatgagaagggcaaaagcaaagaagactgtaccatgtcctagtaatgaactagtccgtaacttgaaagtatttcgatttcttggctttatatatcttgtggaaaggacgattggacgctactctggtgggtcgc

SEQ ID NO: 1230 - DNA, 1319 bp, Homo sapiens
  source 1..1319: mol_type = genomic DNA
accgccaccatgcttagttcctttccagtggttttgctggaaaccatgtctcattatacagatgaacccagatttaccatagagcagatagatctgcttcagcgacttcggcgtactggaatgactaaacatgaaattctccatgccttggaaactttggaccgtcttgatcaagagcatagtgacaagtttggaagaaggtccagctatggaggaagttcatatgggaatagtactaacaatgtcccagcatcttcctctacagctacagcttccacacagacgcagcattcgggaatgtccccgtcacctagcaacagttatgatacttccccacagccttgcactaccaatcaaaatgggagggagaataatgagcgattatctacatccaatggaaagatgtcaccaactcgctaccatgcaaacagcatgggtcagaggtcatacagttttgaagcctcagaagaggacctagatgtagatgataaagtggaagaattaatgaggagggacagcagtgtgataaaagaggaaatcaaagcctttcttgccaatcggaggatttcccaagcagttgttgcacaggtaacaggtatcagtcagagccggatctctcattggctgttgcagcagggatcagacctgagtgaacagaagaaaagagcattttaccgatggtatcaacttgagaagacaaaccctggcgctacactaagtatgagaccagcccccattccaatagaggaccctgaatggagacaaacgcctcccccagtctctgccacatctggtactttccgactgcgacgagggagtcgatttacctggagaaaggagtgcctggctgttatggaaagttacttcaatgagaatcaatacccagatgaagcaaagagggaagaaattgcaaacgcttgcaatgcagttatacagaagccaggcaaaaagctgtcagatctggaaagagttacctccctgaaagtatataattggtttgctaacagaaggaaggagatcaagaggagagccaatattgcagcaatcctggagagtcatgggatagatgtgcagagtccaggaggccactcaaacagtgatgatgtcgacgggaatgactactctgagcaggatacttggcaagtacgcaatggggaggaggaggagggaagaagttcagagggaggcagagaagcagagaaggtagaagaagagaggaggatctagtaatgaactagtccgtaacttgaaagtatttcgatttcttggctttatatatcttgtggaaaggacgacattacccgaaacaatcggctcat

SEQ ID NO: 1231 - DNA, 1364 bp, Homo sapiens
  source 1..1364: mol_type = genomic DNA
accgccaccatgcttagttcctttccagtggttttgctggaaaccatgtctcattatacagatgaacccagatttaccatagagcagatagatctgcttcagcgacttcggcgtactggaatgactaaacatgaaattctccatgccttggaaactttggaccgtcttgatcaagagcatagtgacaagtttggaagaaggtccagctatggaggaagttcatatgggaatagtactaacaatgtcccagcatcttcctctacagctacagcttccacacagacgcagcattcgggaatgtccccgtcacctagcaacagttatgatacttccccacagccttgcactaccaatcaaaatgggagggagaataatgagcgattatctacatccaatggaaagatgtcaccaactcgctaccatgcaaacagcatgggtcagaggtcatacagttttgaagcctcagaagaggacctagatgtagatgataaagtggaagaattaatgaggagggacagcagtgtgataaaagaggaaatcaaagcctttcttgccaatcggaggatttcccaagcagttgttgcacaggtaacaggtatcagtcagagccggatctctcattggctgttgcagcagggatcagacctgagtgaacagaagaaaagagcattttaccgatggtatcaacttgagaagacaaaccctggcgctacactaagtatgagaccagcccccattccaatagaggaccctgaatggagacaaacgcctcccccagtctctgccacatctggtactttccgactgcgacgagggagtcgatttacctggagaaaggagtgcctggctgttatggaaagttacttcaatgagaatcaatacccagatgaagcaaagagggaagaaattgcaaacgcttgcaatgcagttatacagaagccaggcaaaaagctgtcagatctggaaagagttacctccctgaaagtatataattggtttgctaacagaaggaaggagatcaagaggagagccaatattgaagcagcaatcctggagagtcatgggatagatgtgcagagtccaggaggccactcaaacagtgatgatgtcgacgggaatgactactctgagcaggatgacagtacgagccatagtgaccaccaagaccccatctcattagctgtggaaatggcagcagtcaaccacactatcttggcattggcccgacaaggagccaacgaaatcaagacagaggccctggatgatgactagtaatgaactagtccgtaacttgaaagtatttcgatttcttggctttatatatcttgtggaaaggacgaaaatctctgatcaaatagcgttgc

SEQ ID NO: 1232 - DNA, 1433 bp, Homo sapiens
  source 1..1433: mol_type = genomic DNA
accgccaccatgcttagttcctttccagtggttttgctggaaaccatgtctcattatacagatgaacccagatttaccatagagcagatagatctgcttcagcgacttcggcgtactggaatgactaaacatgaaattctccatgccttggaaactttggaccgtcttgatcaagagcatagtgacaagtttggaagaaggtccagctatggaggaagttcatatgggaatagtactaacaatgtcccagcatcttcctctacagctacagcttccacacagacgcagcattcgggaatgtccccgtcacctagcaacagttatgatacttccccacagccttgcactaccaatcaaaatgggagggagaataatgagcgattatctacatccaatggaaagatgtcaccaactcgctaccatgcaaacagcatgggtcagaggtcatacagttttgaagcctcagaagaggacctagatgtagatgataaagtggaagaattaatgaggagggacagcagtgtgataaaagaggaaatcaaagcctttcttgccaatcggaggatttcccaagcagttgttgcacaggtaacaggtatcagtcagagccggatctctcattggctgttgcagcagggatcagacctgagtgaacagaagaaaagagcattttaccgatggtatcaacttgagaagacaaaccctggcgctacactaagtatgagaccagcccccattccaatagaggaccctgaatggagacaaacgcctcccccagtctctgccacatctggtactttccgactgcgacgagggagtcgatttacctggagaaaggagtgcctggctgttatggaaagttacttcaatgagaatcaatacccagatgaagcaaagagggaagaaattgcaaacgcttgcaatgcagttatacagaagccaggcaaaaagctgtcagatctggaaagagttacctccctgaaagtatataattggtttgctaacagaaggaaggagatcaagaggagagccaatattgcagcaatcctggagagtcatgggatagatgtgcagagtccaggaggccactcaaacagtgatgatgtcgacgggaatgactactctgagcaggatacttggcaagtacgcaatggggaggaggaggagggaagaagttcagagggaggcagagaagcagagaaggatgacagtacgagccatagtgaccaccaagaccccatctcattagctgtggaaatggcagcagtcaaccacactatcttggcattggcccgacaaggagccaacgaaatcaagacagaggccctggatgatgactagtaatgaactagtccgtaacttgaaagtatttcgatttcttggctttatatatcttgtggaaaggacgagggttgcgataaactgttacaccc

SEQ ID NO: 1233 - DNA, 1016 bp, Homo sapiens
  source 1..1016: mol_type = genomic DNA
accgccaccatgcttagttcctttccagtggttttgctggaaaccatgtctcattatacagatgaacccagatttaccatagagcagatagatctgcttcagcgacttcggcgtactggaatgactaaacatgaaattctccatgccttggaaactttggaccgtcttgatcaagagcatagtgacaagtttggaagaaggtccagctatggaggaagttcatatgggaatagtactaacaatgtcccagcatcttcctctacagctacagcttccacacagacgcagcattcgggaatgtccccgtcacctagcaacagttatgatacttccccacagccttgcactaccaatcaaaatgggagggagaataatgagcgattatctacatccaatggaaagatgtcaccaactcgctaccatgcaaacagcatgggtcagaggtcatacagttttgaagcctcagaagaggacctagatgtagatgataaagtggaagaattaatgaggagggacagcagtgtgataaaagaggaaatcaaagcctttcttgccaatcggaggatttcccaagcagttgttgcacaggtaacaggtatcagtcagagccggatctctcattggctgttgcagcagggatcagacctgagtgaacagaagaaaagagcattttaccgatggtatcaacttgagaagacaaaccctggcgctacactaagtatgagaccagcccccattccaatagaggaccctgaatggagacaaacgcctcccccagtctctgccacatctggtactttccgactgcgacgagggagtcgatttacctggagaaaggagtgcctggctgttatggaaaggaacacttggtcccctgagagaaggatggaagaaaataaatggaagttgctttctgcagggtagtaatgaactagtccgtaacttgaaagtatttcgatttcttggctttatatatcttgtggaaaggacgaacaaatttgggtctcgaacgacac

SEQ ID NO: 1234 - DNA, 794 bp, Homo sapiens
  source 1..794: mol_type = genomic DNA
accgccaccatgagttcttcgtattatgtgaacgcgctttttagcaaatatacggcgggggcttctctgttccaaaatgccgagccgacttcttgctcctttgctcccaactcacagagaagcggctacggggcgggcgccggcgccttcgcctcgaccgttccgggcttatacaatgtcaacagccccctttatcagagcccctttgcgtccggctacggcctgggcgccgacgcctacggcaacctgccctgcgcctcctacgaccaaaacatccccgggctctgcagtgacctcgccaaaggcgcctgcgacaagacggacgagggcgcgctgcatggcgcggctgaggccaatttccgcatctacccctggatgcggtcttcaggacctgacaggaagcggggccgccagacctacacgcgctaccagacgctggagctggagaaggagttccacttcaaccgctacctgacgcggcgccgccgcattgaaatcgcccacgcgctctgcctcaccgagcgccagattaagatctggttccagaaccgccgcatgaagtggaagaaagagcataaggacgaaggtccgactgccgccgcagctcccgagggcgccgtgccctctgccgccgccactgctgccgcggacaaggccgacgaggaggacgatgatgaagaagaggaagacgaggaggaatagtaatgaactagtccgtaacttgaaagtatttcgatttcttggctttatatatcttgtggaaaggacgatagattagacacagaagtttatgt

SEQ ID NO: 1235 - DNA, 824 bp, Homo sapiens
  source 1..824: mol_type = genomic DNA
accgccaccatggaagattataccaaaatagagaaaattggagaaggtacctatggagttgtgtataagggtagacacaaaactacaggtcaagtggtagccatgaaaaaaatcagactagaaagtgaagaggaaggggttcctagtactgcaattcgggaaatttctctattaaaggaacttcgtcatccaaatatagtcagtcttcaggatgtgcttatgcaggattccaggttatatctcatctttgagtttctttccatggatctgaagaaatacttggattctatccctcctggtcagtacatggattcttcacttgttaaggtagtaacactctggtacagatctccagaagtattgctggggtcagctcgttactcaactccagttgacatttggagtataggcaccatatttgctgaactagcaactaagaaaccacttttccatggggattcagaaattgatcaactcttcaggattttcagagctttgggcactcccaataatgaagtgtggccagaagtggaatctttacaggactataagaatacatttcccaaatggaaaccaggaagcctagcatcccatgtcaaaaacttggatgaaaatggcttggatttgctctcgaaaatgttaatctatgatccagccaaacgaatttctggcaaaatggcactgaatcatccatattttaatgatttggacaatcagattaagaagatgtagtaatgaactagtccgtaacttgaaagtatttcgatttcttggctttatatatcttgtggaaaggacgagctagaaacactggtcaggccaag

SEQ ID NO: 1236 - DNA, 1064 bp, Homo sapiens
  source 1..1064: mol_type = genomic DNA
accgccaccatgaccatgagctcgtttttgataaactccaactacatcgagcccaagttccctcccttcgaggagtacgcgcagcacagcggctcgggcggcgcagacggcggcccgggcgggggccccggctaccagcagcccccagcgcccccgacccagcacctgccgctgcagcagccccagctccctcacgcgggcggcggccgagagcccactgcctcctactacgcgccgcggaccgcccgcgagcccgcctaccctgctgccgcgctgtaccccgcgcatggggccgcggacaccgcctacccctatggctaccgcggcggcgccagccccgggcggccgccccagcccgagcagcccccggcgcaagccaagggcccagcgcacggcctgcatgcgagccacgtcctgcagccccagctgccgccgcccctgcagcctcgcgccgtgcccccagcggccccgcggcgctgcgaggcggcccccgccaccccaggcgtcccggcagggggcagcgcccccgcgtgcccgctgctcttggccgacaagagcccgctgggcctgaagggcaaggagcccgtggtgtacccctggatgaagaagatccatgtcagcgccgttaaccccagttataacggaggggagcctaagcgctctcgaaccgcctacacccggcagcaggtcttggagctggagaaggagttccacttcaatcgatacctgacccggcggcgccgcatcgagatcgcccacacgctctgtttgtctgagcgccaggtcaagatctggtttcagaaccggaggatgaagtggaagaaagaccacaaactgcccaacaccaagatgcgatcctccaattcggcctcggcctctgccggcccaccagggaaagcacaaactcagagcccacacctccatccccacccccacccgagcacctccacacccgttccctcctccatatagtaatgaactagtccgtaacttgaaagtatttcgatttcttggctttatatatcttgtggaaaggacgagcagcaggcagtctctgccatccg

SEQ ID NO: 1237 - DNA, 1433 bp, Homo sapiens
  source 1..1433: mol_type = genomic DNA
accgccaccatgcaaaaagcgacctactacgacagctcggcgatctacggtggctacccctaccaggcagccaacgggttcgcttataatgccaatcagcagccgtacccggcgtccgccgctttgggcgccgacggcgagtaccaccgacccgcctgctccctccagtctccctccagcgccgggggccaccccaaggcacacgaactgagtgaggcgtgcctgcgcaccctgagcgccccacctagccagcctccaagcctgggagagccgcccctgcacccgccgccgccccaggccgcgccccctgccccacagccgcctcagcccgcacctcagccccctgcacctacccctgccgcgcccccgcctccctcttctgcctcccctcctcagaatgccagcaacaaccctacccctgccaacgcggccaagagccccctgctcaactcacccacagtggccaaacaaatcttcccctggatgaaagagtctcgacaaaacacaaagcagaaaaccagcagctccagctcaggcgaaagctgcgctggcgacaagagcccgccggggcaggcttcgtccaagcgcgcgcgcacggcctacacgagcgcgcagctggtggagctggagaaagagttccacttcaaccgctacctgtgccggccgcgccgggtggagatggccaatctgctgaacctcactgagcgccagatcaagatctggttccagaatcgccgcatgaagtacaaaaaggatcagaagggcaagggcatgctaacgtcatcggggggccagtctccaagtcgcagccccgtgccccccggagccggtggctatctgaactctatgcattcgctggtcaacagcgtcccgtatgagccccagtcgcccccgcccttctccaagcccccccagggtacctacgggctgccccccgcctcctaccctgcgtccctgcccagctgcgcacccccgccacccccacagaagcgctacacggcggcaggggcgggcgcagggggcacccccgactatgacccgcacgctcatggcctgcagggcaacggcagctatgggaccccacacatacagggaagccccgtcttcgtggggggcagctatgtggagcccatgagcaactccgggccagccctctttggtctaactcacctcccccacgctgcctcgggcgccatggactatgggggtgccgggccgctgggcagcggccaccaccacgggccggggcctggggagccgcaccccacctacacggaccttaccggccaccatccttctcagggaagaattcaggaagcacccaagctcacccacctgtagtaatgaactagtccgtaacttgaaagtatttcgatttcttggctttatatatcttgtggaaaggacgatgggagtacaccgatatagggagc

SEQ ID NO: 1238 - DNA, 1232 bp, Homo sapiens
  source 1..1232: mol_type = genomic DNA
accgccaccatgaattacgaatttgagcgagagattggttttatcaatagccagccgtcgctcgctgagtgcctgacatcttttccccctgtcgctgatacatttcaaagttcatcaatcaagacctcgacgctttcacactcgacactgattcctcctccttttgagcagaccattcccagcctgaaccccggcagtcaccctcgccacggcgctggcggccgccccaagccgagccccgcgggcagccgcggcagcccggtgcccgccggcgccctgcagccgcccgagtacccctggatgaaggagaagaaggcggccaagaaaaccgcacttctgccggccgccgccgccgccgccaccgccgcagccaccggccctgcttgcctcagccacaaagaatccctggaaatcgccgatggcagcggcgggggatcgcggcgcctgagaactgcttacaccaacacacagcttctagagctggaaaaagaatttcatttcaacaagtacctttgcagaccccgaagggtggagattgcagcgctgctggatttgactgagagacaagtgaaagtgtggtttcagaaccggaggatgaagcacaagaggcagacccagtgcaaggaaaaccaaaacagcgaagggaaatgtaaaagccttgaggactccgagaaagtagaggaggacgaggaagagaagacgctctttgagcaagcccttagcgtctctggggcccttctggagagggaaggctacacttttcagcaaaatgccctctctcagcagcaggctcccaatggacacaatggcgactcccaaagtttcccagtctcgcctttaaccagcaatgagaaaaatctgaaacattttcagcaccagtcacccactgttcccaactgcttgtcaacaatgggccagaactgtggagctggcctaaacaatgacagtcctgaggcccttgaggtcccctctttgcaggactttagcgttttctccacagattcctgcctgcagctttcagatgcagtttcacccagtttgccaggttccctcgacagtcccgtagatatttcagctgacagcttagacttttttacagacacactcaccacaatcgacttgcagcatctgaattactagtaatgaactagtccgtaacttgaaagtatttcgatttcttggctttatatatcttgtggaaaggacgagaggcgcggtctcagatagaatac

SEQ ID NO: 1239 - DNA, 515 bp, Homo sapiens
  source 1..515: mol_type = genomic DNA
accgccaccatggacaatgcaagaatgaactccttcctggaataccccatacttagcagtggcgactcggggacctgctcagcccgagcctacccctcggaccataggattacaactttccagtcgtgcgcggtcagcgccaacagttgcggcggcgacgaccgcttcctagtgggcaggggggtgcagatcggttcgccccaccaccaccaccaccaccaccatcgccacccccagccggctacctaccagacttccgggaacctgggggtgtcctactcccactcaagttgtggtccaagctatggctcacagaacttcagtgcgccttacagcccctacgcgttaaatcaggaagcagacccaccaagaagcctgtcgctcccccgcatcggagacatcttctccagcgcagacttttagtaatgaactagtccgtaacttgaaagtatttcgatttcttggctttatatatcttgtggaaaggacgatttgactataagccgtcataacag

SEQ ID NO: 1240 - DNA, 863 bp, Homo sapiens
  source 1..863: mol_type = genomic DNA
accgccaccatggaaactgatctagaggttataataaaggataatagtcttgtgctgacaccatcacacatcaaagcctacatgttgatgactcttcaaggattagaatatttacatcaacattggatcctacatagggatctgaaaccaaacaacttgttgctagatgaaaatggagttctaaaactggcagattttggcctggccaaatcttttgggagccccaatagagcttatacacatcaggttgtaaccaggtggtatcgggcccccgagttactatttggagctaggatgtatggtgtaggtgtggacatgtgggctgttggctgtatattagcagagttacttctaagggttccttttttgccaggagattcagaccttgatcagctaacaagaatatttgaaactttgggcacaccaactgaggaacagtggccggacatgtgtagtcttccagattatgtgacatttaagagtttccctggaatacctttgcatcacatcttcagtgcagcaggagacgacttactagatctcatacaaggcttattcttatttaatccatgtgctcgaattacggccacacaggcactgaaaatgaagtatttcagtaatcggccagggccaacacctggatgtcagctgccaagaccaaactgtccagtggaaaccttaaaggagcaatcaaatccagctttggcaataaaaaggaaaagaacagaggccttagaacaaggaggattgcccaagaaactaattttttagtaatgaactagtccgtaacttgaaagtatttcgatttcttggctttatatatcttgtggaaaggacgaaatgtaccgggcgagtgtttatat

SEQ ID NO: 1241 - DNA, 2918 bp, Homo sapiens
  source 1..2918: mol_type = genomic DNA
accgccaccatgacactcctggggtctgagcattccttgctgattaggagcaagttcagatcagttttacagttaagacttcaacaaagaaggacccaggaacaactggctaaccaaggcataataccaccactgaaacgtccagctgaattccatgagcaaagaaaacatttggatagtgacaaggctaaaaattccctgaagcgcaaagccagaaacaggtgcaacagtgccgacttggttaatatgcacatactccaagcttccactgcagagaggtccattccaactgctcagatgaagctgaaaagagcccgactcgccgatgatctcaatgaaaaaattgctctacgaccagggccactggagctggtggaaaaaaacattcttcctgtggattctgctgtgaaagaggccataaaaggtaaccaggtgagtttctccaaatccacggatgcttttgcctttgaagaggacagcagcagcgatgggctttctccggatcagactcgaagtgaagacccccaaaactcagcgggatccccgccagacgctaaagcctcagataccccttcgacaggttctctggggacaaaccaggatcttgcttctggctcagaaaatgacagaaatgactcagcctcacagcccagccaccagtcagatgcggggaagcaggggcttggcccccccagcacccccatagccgtgcatgctgctgtaaagtccaaatccttgggtgacagtaagaaccgccacaaaaagcccaaggaccccaagccaaaggtgaagaagcttaaatatcaccagtacattcccccagaccagaaggcagagaagtcccctccacctatggactcagcctacgctcggctgctccagcaacagcagctgttcctgcagctccaaatcctcagccagcagcagcagcagcagcaacaccgattcagctacctagggatgcaccaagctcagcttaaggaaccaaatgaacagatggtcagaaatccaaactcttcttcaacgccactgagcaatacccccttgtctcctgtcaaaaacagtttttctggacaaactggtgtctcttctttcaaaccaggcccactcccacctaacctggatgatctgaaggtctctgaattaagacaacagcttcgaattcggggcttgcctgtgtcaggcaccaaaacggctctcatggaccggcttcgacccttccaggactgctctggcaacccagtgccgaactttggggatataacgactgtcacttttcctgtcacacccaacacgctgcccaattaccagtcttcctcttctaccagtgccctgtccaacggcttctaccactttggcagcaccagctccagccccccgatctccccagcctcctctgacctgtcagtcgctgggtccctgccggacaccttcaatgatgcctccccctccttcggcctgcacccgtccccagtccacgtgtgcacggaggaaagtctcatgagcagcctgaatgggggctctgttccttctgagctggatgggctggactccgagaaggacaagatgctggtggagaagcagaaggtgatcaatgaactcacctggaaactccagcaagagcagaggcaggtggaggagctgaggatgcagcttcagaagcagaaaaggaataactgttcagagaagaagccgctgcctttcctggctgcctccatcaagcaggaagaggctgtctccagctgtccttttgcatcccaagtacctgtgaaaagacaaagcagcagctcagagtgtcacccaccggcttgtgaagctgctcaactccagcctcttggaaatgctcattgtgtggagtcctcagatcaaaccaatgtactttcttccacatttctcagcccccagtgttcccctcagcattcaccgctgggggctgtgaaaagcccacagcacatcagtttgcccccatcacccaacaaccctcactttctgccctcatcctccggggcccagggagaagggcacagggtctcctcgcccatcagcagccaggtgtgcactgcacagatggctggtttacactcttctgataaggtggggccaaagttttcaattccatccccaactttttctaagtcaagttcagcaatttcagaggtaacacagcctccatcctatgaagatgccgtaaagcagcaaatgacccggagtcagcagatggatgaactcctggacgtgcttattgaaagcggagaaatgccagcagacgctagagaggatcactcatgtcttcaaaaagtcccaaagatacccagatcttcccgaagtccaactgctgtcctcaccaagccctcggcttcctttgaacaagcctcttcaggcagccagatcccctttgatccctatgccaccgacagtgatgagcatcttgaagtcttattaaattcccagagccccctaggaaagatgagtgatgtcacccttctaaaaattgggagcgaagagcctcactttgatgggataatggatggattctctgggaaggctgcagaagacctcttcaatgcacatgagatcttgccaggccccctctctccaatgcagacacagttttcaccctcttctgtggacagcaatgggctgcagttaagcttcactgaatctccctgggaaaccatggagtggctggacctcactccgccaaattccacaccaggctttagcgccctcaccaccagcagccccagcatcttcaacatcgatttcctggatgtcactgatctcaatttgaattcttccatggaccttcacttgcagcagtggtagtaatgaactagtccgtaacttgaaagtatttcgatttcttggctttatatatcttgtggaaaggacgaacttgtgaaataagtaagcaccgt

SEQ ID NO: 1242 - DNA, 3062 bp, Homo sapiens
  source 1..3062: mol_type = genomic DNA
accgccaccatgacactcctggggtctgagcattccttgctgattaggagcaagttcagatcagttttacagttaagacttcaacaaagaaggacccaggaacaactggctaaccaaggcataataccaccactgaaacgtccagctgaattccatgagcaaagaaaacatttggatagtgacaaggctaaaaattccctgaagcgcaaagccagaaacaggtgcaacagtgccgacttggttaatatgcacatactccaagcttccactgcagagaggtccattccaactgctcagatgaagctgaaaagagcccgactcgccgatgatctcaatgaaaaaattgctctacgaccagggccactggagctggtggaaaaaaacattcttcctgtggattctgctgtgaaagaggccataaaaggtaaccaggtgagtttctccaaatccacggatgcttttgcctttgaagaggacagcagcagcgatgggctttctccggatcagactcgaagtgaagacccccaaaactcagcgggatccccgccagacgctaaagcctcagataccccttcgacaggttctctggggacaaaccaggatcttgcttctggctcagaaaatgacagaaatgactcagcctcacagcccagccaccagtcagatgcggggaagcaggggcttggcccccccagcacccccatagccgtgcatgctgctgtaaagtccaaatccttgggtgacagtaagaaccgccacaaaaagcccaaggaccccaagccaaaggtgaagaagcttaaatatcaccagtacattcccccagaccagaaggcagagaagtcccctccacctatggactcagcctacgctcggctgctccagcaacagcagctgttcctgcagctccaaatcctcagccagcagcagcagcagcagcaacaccgattcagctacctagggatgcaccaagctcagcttaaggaaccaaatgaacagatggtcagaaatccaaactcttcttcaacgccactgagcaatacccccttgtctcctgtcaaaaacagtttttctggacaaactggtgtctcttctttcaaaccaggcccactcccacctaacctggatgatctgaaggtctctgaattaagacaacagcttcgaattcggggcttgcctgtgtcaggcaccaaaacggctctcatggaccggcttcgacccttccaggactgctctggcaacccagtgccgaactttggggatataacgactgtcacttttcctgtcacacccaacacgctgcccaattaccagtcttcctcttctaccagtgccctgtccaacggcttctaccactttggcagcaccagctccagccccccgatctccccagcctcctctgacctgtcagtcgctgggtccctgccggacaccttcaatgatgcctccccctccttcggcctgcacccgtccccagtccacgtgtgcacggaggaaagtctcatgagcagcctgaatgggggctctgttccttctgagctggatgggctggactccgagaaggacaagatgctggtggagaagcagaaggtgatcaatgaactcacctggaaactccagcaagagcagaggcaggtggaggagctgaggatgcagcttcagaagcagaaaaggaataactgttcagagaagaagccgctgcctttcctggctgcctccatcaagcaggaagaggctgtctccagctgtccttttgcatcccaagtacctgtgaaaagacaaagcagcagctcagagtgtcacccaccggcttgtgaagctgctcaactccagcctcttggaaatgctcattgtgtggagtcctcagatcaaaccaatgtactttcttccacatttctcagcccccagtgttcccctcagcattcaccgctgggggctgtgaaaagcccacagcacatcagtttgcccccatcacccaacaaccctcactttctgccctcatcctccggggcccagggagaagggcacagggtctcctcgcccatcagcagccaggtgtgcactgcacagaactcaggagcacacgatggccatcctccaagcttctctccccattcttccagcctccacccgcccttctctggagcccaagcagacagcagtcatggtgccgggggaaacccttgtcccaaaagcccatgtgtacagcaaaagatggctggtttacactcttctgataaggtggggccaaagttttcaattccatccccaactttttctaagtcaagttcagcaatttcagaggtaacacagcctccatcctatgaagatgccgtaaagcagcaaatgacccggagtcagcagatggatgaactcctggacgtgcttattgaaagcggagaaatgccagcagacgctagagaggatcactcatgtcttcaaaaagtcccaaagatacccagatcttcccgaagtccaactgctgtcctcaccaagccctcggcttcctttgaacaagcctcttcaggcagccagatcccctttgatccctatgccaccgacagtgatgagcatcttgaagtcttattaaattcccagagccccctaggaaagatgagtgatgtcacccttctaaaaattgggagcgaagagcctcactttgatgggataatggatggattctctgggaaggctgcagaagacctcttcaatgcacatgagatcttgccaggccccctctctccaatgcagacacagttttcaccctcttctgtggacagcaatgggctgcagttaagcttcactgaatctccctgggaaaccatggagtggctggacctcactccgccaaattccacaccaggctttagcgccctcaccaccagcagccccagcatcttcaacatcgatttcctggatgtcactgatctcaatttgaattcttccatggaccttcacttgcagcagtggtagtaatgaactagtccgtaacttgaaagtatttcgatttcttggctttatatatcttgtggaaaggacgagcaagggcgatccctgacattctc

SEQ ID NO: 1243 - DNA, 4802 bp, Homo sapiens
  source 1..4802: mol_type = genomic DNA
accgccaccatgacagcggacaaagacaaagacaaagacaaagagaaggaccgggaccgagaccgggaccgagagagagagaaaagagacaaagcaagagagagtgagaattcaaggccacgccggagctgtaccttggaaggaggagccaaaaattatgctgagagtgatcacagtgaagacgaggacaatgacaacaatagtgccaccgcagaggagtccacgaagaagaataagaagaaaccaccgaaaaaaaagtctcgttatgaaaggacagataccggtgagataacatcctacatcactgaagatgatgtggtctacagaccaggagactgtgtgtatatcgagagtcggaggccaaacacaccgtatttcatctgtagcattcaagacttcaaactggtccacaactcccaggcctgttgcagatctccaactcctgctttgtgtgaccccccagcatgctctctgccggtggcatcacagccaccacagcatctttctgaagccgggagagggcctgtagggagtaagagggaccatctcctcatgaacgtcaaatggtactaccgtcaatctgaggttccagattctgtgtatcagcatttggttcaggatcgacataatgaaaatgactctggaagagaacttgtcattacagacccagttatcaagaaccgagagctcttcatttctgattacgttgacacttaccatgctgctgcccttagagggaagtgtaacatctcccatttttctgacatatttgctgctagagagtttaaagcccgagtggattcatttttctacatattaggatataaccctgagacaaggaggctgaacagtacccagggggagattcgtgtcggtcctagtcatcaggccaaacttccagatctgcaaccatttccttctccagatggtgatacagtgacccaacatgaggaactggtctggatgcctggagttaacgactgtgacctccttatgtacttgagggcagcaaggagcatggcggcatttgcaggaatgtgtgatggaggctctacagaggacggctgtgtcgcagcctctcgggatgacaccactctgaatgcactgaacacactgcatgaaagcggttacgatgctggcaaagccctgcagcgcctggtgaagaagcctgtgcccaagctcatcgagaagtgctggaccgaggacgaagtgaaacgcttcgttaagggactcaggcagtacgggaagaacttcttcagaattagaaaggagctgcttcccaataaggaaacaggggagctgatcaccttctattactattggaagaagacccccgaagcagccagctcccgagcccatcgtaggcaccgcaggcaggccgtgttcaggaggattaagactcgcaccgcgtccacacccgtcaacacaccctccagacccccgtccagtgaattcttggacctaagttcagccagtgaagatgacttcgacagtgaggacagtgagcaggagctgaaggggtacgcctgccgccactgcttcaccaccacctccaaagattggcaccacggaggccgggagaacatcctgctttgcaccgactgtcgcatccacttcaagaaatacggtgagctcccgcccattgagaagcccgtggacccgccaccgtttatgttcaaacccgtcaaggaagaggatgatgggctcagtgggaagcatagcatgaggacacggcggagtcggggctcgatgtcgacactacgcagtggtcggaagaagcagccagccagccctgatggtcgcacctcacccatcaatgaagacatccgctccagcggccggaactcccccagcgctgccagtacctccagcaatgacagtaaagcagagacagtgaagaagtcggccaagaaggtgaaggaggaagcctcttcccctcttaagagtaacaaacgccagcgggagaaggtggcctctgatacggaggaggctgacaggaccagctccaagaagacaaaaacgcaggagatcagcaggcccaactcgccatctgaaggtgagggagagagttcagacagtcgcagcgtcaacgatgagggtagcagtgaccccaaagacatcgaccaggacaatcgcagcacgtccccgagcatccccagcccccaggacaatgagagtgactcggactcgtcagcccagcagcagatgctgcaggcccagcccccagccttgcaggctcccactggggtcaccccagctccctcctcagctcctccagggacccctcagctgcccacgccagggcccacgccctctgccactgcagttcccccacagggctcccccacggcctcccaggcccctaaccagccacaggctcccacagcgcctgttccccacacccacatccaacaggcaccggccttgcacccccagcggccgccctcaccgcatcccccgccgcatccctcgccacatcccccgctgcagcctctgactgggtcggcgggccagccttctgcaccctctcatgcccagcccccactgcacggtcagggcccacccggccctcacagcctgcaggctgggcccctgctgcagcacccaggccccccacagccctttggcctccctccccaggcctcccaaggccaggcccctctggggacctccccagcagcagcgtaccctcacacctccctgcagctgccagcctctcagtcagcgctgcagtcccaacagcctccacgggagcagcccctgccaccagcgcccttggccatgccccacatcaagcccccgcctaccactcccatcccccagctgccggcgccacaggcccacaagcaccctccccacctctcggggccctcacccttctccatgaatgccaacctgcctccccctccagccctgaagcccctgagctccctgtccacacatcaccccccgtcggctcaccccccacccctgcaactcatgcctcagagccagccattgccctcctcgcccgcccagccccccgggctgacccagagccagaacctgcccccgccccctgcctcccacccccctacaggcctccaccaggtggccccccaacccccgtttgctcagcacccctttgtccctggaggccctcctcccatcacccctccgacctgcccctccacctctaccccaccggcgggacctggcacctcggcccagccaccctgctctggtgcggcggcttcaggaggcagcatagcgggggggtcgtcctgcccactccccaccgtccagatcaaggaggaggctctggacgacgctgaggagcctgagagcccccctcccccaccaaggagcccgtccccggagcccactgtggtggacacccccagtcacgccagccagtcagctaggttctacaaacacctggaccggggctacaactcgtgtgcccggacagacctgtacttcatgcctctggccgggtccaagctggccaagaagagggaggaggccattgagaaggccaagcgcgaggctgagcagaaagcccgagaggagcgagagcgggagaaggagaaggagaaggagcgggagcgggagcgagagcgggagcgcgaggcagagcgggcggctaaggcgtccagctcagcgcatgaaggtcgcctcagtgacccacagctcagtggtcctggccacatgcggccatccttcgagccaccaccaaccaccattgctgctgtgcccccctacatcgggcccgacacacctgcccttcggactctgagcgagtacgcccggccccacgtcatgtcgcccaccaaccgcaaccaccccttctacatgccccttaaccccacggaccccctgctggcctaccacatgcctggcctctacaacgtcgaccccaccatccgcgagcgggagctccgggagcgggagatccgagagcgggagatccgagagcgggagctgcgggagaggatgaagccgggcttcgaggtgaagcccccagagctggaccccctgcacccagccgccaaccccatggagcactttgcccggcacagcgccctcaccatccccccgaccgccgggccccacccttttgcttctttccacccgggcctgaaccccttggagagggagagactggccctggcgggcccccagctgcggcccgagatgagctaccctgacagactggcagccgagcgtatccacgcagagcgcatggcatcgctgaccagcgatcccctggcccgactgcagatgttcaacgtgactccgcaccatcaccagcactctcacattcactcccacctccacctccaccagcaggaccccctccaccaaggttcagcaggccccgttcacccgctggtcgaccccctgactgccggtccccacctggctcgcttcccctacccgcctggcactctccccaaccctctgcttggacagcccccacacgagcacgagatgcttcgccacccagttttcggcaccccctacccccgtgacctgcctggggccatcccaccccccatgtcagcagcccaccagctgcaggccatgcatgcccagtcggccgagctgcagagactggccatggagcagcagtggctgcatggacacccccacatgcatggtggccacctaccaagtcaggaagattattacagtcgactgaagaaagaaggtgacaagcagttatagtaatgaactagtccgtaacttgaaagtatttcgatttcttggctttatatatcttgtggaaaggacgaagacagattccgaaagtctacagc

SEQ ID NO: 1244 - DNA, 3140 bp, Homo sapiens
  source 1..3140: mol_type = genomic DNA
accgccaccatgttcaaacccgtcaaggaagaggatgatgggctcagtgggaagcatagcatgaggacacggcggagtcggggctcgatgtcgacactacgcagtggtcggaagaagcagccagccagccctgatggtcgcacctcacccatcaatgaagacatccgctccagcggccggaactcccccagcgctgccagtacctccagcaatgacagtaaagcagagacagtgaagaagtcggccaagaaggtgaaggaggaagcctcttcccctcttaagagtaacaaacgccagcgggagaaggtggcctctgatacggaggaggctgacaggaccagctccaagaagacaaaaacgcaggagatcagcaggcccaactcgccatctgaaggtgagggagagagttcagacagtcgcagcgtcaacgatgagggtagcagtgaccccaaagacatcgaccaggacaatcgcagcacgtccccgagcatccccagcccccaggacaatgagagtgactcggactcgtcagcccagcagcagatgctgcaggcccagcccccagccttgcaggctcccactggggtcaccccagctccctcctcagctcctccagggacccctcagctgcccacgccagggcccacgccctctgccactgcagttcccccacagggctcccccacggcctcccaggcccctaaccagccacaggctcccacagcgcctgttccccacacccacatccaacaggcaccggccttgcacccccagcggccgccctcaccgcatcccccgccgcatccctcgccacatcccccgctgcagcctctgactgggtcggcgggccagccttctgcaccctctcatgcccagcccccactgcacggtcagggcccacccggccctcacagcctgcaggctgggcccctgctgcagcacccaggccccccacagccctttggcctccctccccaggcctcccaaggccaggcccctctggggacctccccagcagcagcgtaccctcacacctccctgcagctgccagcctctcagtcagcgctgcagtcccaacagcctccacgggagcagcccctgccaccagcgcccttggccatgccccacatcaagcccccgcctaccactcccatcccccagctgccggcgccacaggcccacaagcaccctccccacctctcggggccctcacccttctccatgaatgccaacctgcctccccctccagccctgaagcccctgagctccctgtccacacatcaccccccgtcggctcaccccccacccctgcaactcatgcctcagagccagccattgccctcctcgcccgcccagccccccgggctgacccagagccagaacctgcccccgccccctgcctcccacccccctacaggcctccaccaggtggccccccaacccccgtttgctcagcacccctttgtccctggaggccctcctcccatcacccctccgacctgcccctccacctctaccccaccggcgggacctggcacctcggcccagccaccctgctctggtgcggcggcttcaggaggcagcatagcgggggggtcgtcctgcccactccccaccgtccagatcaaggaggaggctctggacgacgctgaggagcctgagagcccccctcccccaccaaggagcccgtccccggagcccactgtggtggacacccccagtcacgccagccagtcagctaggttctacaaacacctggaccggggctacaactcgtgtgcccggacagacctgtacttcatgcctctggccgggtccaagctggccaagaagagggaggaggccattgagaaggccaagcgcgaggctgagcagaaagcccgagaggagcgagagcgggagaaggagaaggagaaggagcgggagcgggagcgagagcgggagcgcgaggcagagcgggcggctaaggcgtccagctcagcgcatgaaggtcgcctcagtgacccacagctcagtggtcctggccacatgcggccatccttcgagccaccaccaaccaccattgctgctgtgcccccctacatcgggcccgacacacctgcccttcggactctgagcgagtacgcccggccccacgtcatgtcgcccaccaaccgcaaccaccccttctacatgccccttaaccccacggaccccctgctggcctaccacatgcctggcctctacaacgtcgaccccaccatccgcgagcgggagctccgggagcgggagatccgagagcgggagatccgagagcgggagctgcgggagaggatgaagccgggcttcgaggtgaagcccccagagctggaccccctgcacccagccgccaaccccatggagcactttgcccggcacagcgccctcaccatccccccgaccgccgggccccacccttttgcttctttccacccgggcctgaaccccttggagagggagagactggccctggcgggcccccagctgcggcccgagatgagctaccctgacagactggcagccgagcgtatccacgcagagcgcatggcatcgctgaccagcgatcccctggcccgactgcagatgttcaacgtgactccgcaccatcaccagcactctcacattcactcccacctccacctccaccagcaggaccccctccaccaaggttcagcaggccccgttcacccgctggtcgaccccctgactgccggtccccacctggctcgcttcccctacccgcctggcactctccccaaccctctgcttggacagcccccacacgagcacgagatgcttcgccacccagttttcggcaccccctacccccgtgacctgcctggggccatcccaccccccatgtcagcagcccaccagctgcaggccatgcatgcccagtcggccgagctgcagagactggccatggagcagcagtggctgcatggacacccccacatgcatggtggccacctaccaagtcaggaagattattacagtcgactgaagaaagaaggtgacaagcagttatagtaatgaactagtccgtaacttgaaagtatttcgatttcttggctttatatatcttgtggaaaggacgaaaccttcaaccatgataataagaa

SEQ ID NO: 1245 - DNA, 3998 bp, Homo sapiens
  source 1..3998: mol_type = genomic DNA
accgccaccatggatgatccattcagcccctgcaggaggctgaacagtacccagggggagattcgtgtcggtcctagtcatcaggccaaacttccagatctgcaaccatttccttctccagatggtgatacagtgacccaacatgaggaactggtctggatgcctggagttaacgactgtgacctccttatgtacttgagggcagcaaggagcatggcggcatttgcaggaatgtgtgatggaggctctacagaggacggctgtgtcgcagcctctcgggatgacaccactctgaatgcactgaacacactgcatgaaagcggttacgatgctggcaaagccctgcagcgcctggtgaagaagcctgtgcccaagctcatcgagaagtgctggaccgaggacgaagtgaaacgcttcgttaagggactcaggcagtacgggaagaacttcttcagaattagaaaggagctgcttcccaataaggaaacaggggagctgatcaccttctattactattggaagaagacccccgaagcagccagctcccgagcccatcgtaggcaccgcaggcaggccgtgttcaggaggattaagactcgcaccgcgtccacacccgtcaacacaccctccagacccccgtccagtgaattcttggacctaagttcagccagtgaagatgacttcgacagtgaggacagtgagcaggagctgaaggggtacgcctgccgccactgcttcaccaccacctccaaagattggcaccacggaggccgggagaacatcctgctttgcaccgactgtcgcatccacttcaagaaatacggtgagctcccgcccattgagaagcccgtggacccgccaccgtttatgttcaaacccgtcaaggaagaggatgatgggctcagtgggaagcatagcatgaggacacggcggagtcggggctcgatgtcgacactacgcagtggtcggaagaagcagccagccagccctgatggtcgcacctcacccatcaatgaagacatccgctccagcggccggaactcccccagcgctgccagtacctccagcaatgacagtaaagcagagacagtgaagaagtcggccaagaaggtgaaggaggaagcctcttcccctcttaagagtaacaaacgccagcgggagaaggtggcctctgatacggaggaggctgacaggaccagctccaagaagacaaaaacgcaggagatcagcaggcccaactcgccatctgaaggtgagggagagagttcagacagtcgcagcgtcaacgatgagggtagcagtgaccccaaagacatcgaccaggacaatcgcagcacgtccccgagcatccccagcccccaggacaatgagagtgactcggactcgtcagcccagcagcagatgctgcaggcccagcccccagccttgcaggctcccactggggtcaccccagctccctcctcagctcctccagggacccctcagctgcccacgccagggcccacgccctctgccactgcagttcccccacagggctcccccacggcctcccaggcccctaaccagccacaggctcccacagcgcctgttccccacacccacatccaacaggcaccggccttgcacccccagcggccgccctcaccgcatcccccgccgcatccctcgccacatcccccgctgcagcctctgactgggtcggcgggccagccttctgcaccctctcatgcccagcccccactgcacggtcagggcccacccggccctcacagcctgcaggctgggcccctgctgcagcacccaggccccccacagccctttggcctccctccccaggcctcccaaggccaggcccctctggggacctccccagcagcagcgtaccctcacacctccctgcagctgccagcctctcagtcagcgctgcagtcccaacagcctccacgggagcagcccctgccaccagcgcccttggccatgccccacatcaagcccccgcctaccactcccatcccccagctgccggcgccacaggcccacaagcaccctccccacctctcggggccctcacccttctccatgaatgccaacctgcctccccctccagccctgaagcccctgagctccctgtccacacatcaccccccgtcggctcaccccccacccctgcaactcatgcctcagagccagccattgccctcctcgcccgcccagccccccgggctgacccagagccagaacctgcccccgccccctgcctcccacccccctacaggcctccaccaggtggccccccaacccccgtttgctcagcacccctttgtccctggaggccctcctcccatcacccctccgacctgcccctccacctctaccccaccggcgggacctggcacctcggcccagccaccctgctctggtgcggcggcttcaggaggcagcatagcgggggggtcgtcctgcccactccccaccgtccagatcaaggaggaggctctggacgacgctgaggagcctgagagcccccctcccccaccaaggagcccgtccccggagcccactgtggtggacacccccagtcacgccagccagtcagctaggttctacaaacacctggaccggggctacaactcgtgtgcccggacagacctgtacttcatgcctctggccgggtccaagctggccaagaagagggaggaggccattgagaaggccaagcgcgaggctgagcagaaagcccgagaggagcgagagcgggagaaggagaaggagaaggagcgggagcgggagcgagagcgggagcgcgaggcagagcgggcggctaaggcgtccagctcagcgcatgaaggtcgcctcagtgacccacagctcagtggtcctggccacatgcggccatccttcgagccaccaccaaccaccattgctgctgtgcccccctacatcgggcccgacacacctgcccttcggactctgagcgagtacgcccggccccacgtcatgtcgcccaccaaccgcaaccaccccttctacatgccccttaaccccacggaccccctgctggcctaccacatgcctggcctctacaacgtcgaccccaccatccgcgagcgggagctccgggagcgggagatccgagagcgggagatccgagagcgggagctgcgggagaggatgaagccgggcttcgaggtgaagcccccagagctggaccccctgcacccagccgccaaccccatggagcactttgcccggcacagcgccctcaccatccccccgaccgccgggccccacccttttgcttctttccacccgggcctgaaccccttggagagggagagactggccctggcgggcccccagctgcggcccgagatgagctaccctgacagactggcagccgagcgtatccacgcagagcgcatggcatcgctgaccagcgatcccctggcccgactgcagatgttcaacgtgactccgcaccatcaccagcactctcacattcactcccacctccacctccaccagcaggaccccctccaccaaggttcagcaggccccgttcacccgctggtcgaccccctgactgccggtccccacctggctcgcttcccctacccgcctggcactctccccaaccctctgcttggacagcccccacacgagcacgagatgcttcgccacccagttttcggcaccccctacccccgtgacctgcctggggccatcccaccccccatgtcagcagcccaccagctgcaggccatgcatgcccagtcggccgagctgcagagactggccatggagcagcagtggctgcatggacacccccacatgcatggtggccacctaccaagtcaggaagattattacagtcgactgaagaaagaaggtgacaagcagttatagtaatgaactagtccgtaacttgaaagtatttcgatttcttggctttatatatcttgtggaaaggacgatcaatctcgtatgtacagcagata

SEQ ID NO: 1246 - DNA, 1250 bp, Homo sapiens
  source 1..1250: mol_type = genomic DNA
accgccaccatgcagcactacggggtgaacggctactcactgcacgccatgaactcactcagcgccatgtacaacctgcaccagcaggcagcccagcaggcccagcatgcccccgactaccggccttcagtgcatgcgcttacattggctgagcgcctggctggctgtacatttcaagacatcatcttggaggcccgttatggttcccagcaccgcaaacaacgtcgcagccgcacagcgttcacggctcagcagctcgaggccctggaaaagaccttccagaagactcactacccagatgtggtgatgcgtgagaggctggccatgtgcaccaacctgcctgaggcccgggtgcaggtgtggttcaagaaccgccgggccaagttccggaagaagcagcgtagcctgcagaaggaacagctccagaagcagaaggaggctgagggctcccatggggaaggcaaggccgaggcccccactccagatacccagctggacactgagcagcccccacgtctgcctggcagcgacccccctgctgagcttcacctgagtctgtctgagcagtcagccagtgagtcagcccccgaggatcagccggaccgtgaggaggaccccagggcaggggctgaggaccccaaagctgagaagagccctggggctgacagcaaggggctgggctgcaagaggggcagccccaaggcagattccccaggcagcctgaccatcactcctgtggccccagggggtggcctcctgggcccctcccactcctattcctcgtccccgctgagcctcttccgtctgcaggagcaattccgccagcacatggcggccaccaacaacctggtgcactactcgtccttcgaagtagggggtccggcccctgctgctgcagcggcggctgctgctgtgccctacctgggcgtcaacatggccccgctgggctcactgcactgccagtcctactaccagtccctgtcagcagccgctgctgcccaccagggtgtgtgggggtctcctctgctgcctgcacccccagcaggcctggctcctgcatcagctaccctgaacagtaaaaccacaagcatcgagaacctgcggctccgggccaagcagcacgcggcctccctgggactcgatacgctgcccaactagtaatgaactagtccgtaacttgaaagtatttcgatttcttggctttatatatcttgtggaaaggacgatcgtcctcacagactctcgagccg

SEQ ID NO: 1247 - DNA, 1235 bp, Homo sapiens
  source 1..1235: mol_type = genomic DNA
accgccaccatgcagcactacggggtgaacggctactcactgcacgccatgaactcactcagcgccatgtacaacctgcaccagcaggcagcccagcaggcccagcatgcccccgactaccggccttcagtgcatgcgcttacattggctgagcgcctggctgacatcatcttggaggcccgttatggttcccagcaccgcaaacaacgtcgcagccgcacagcgttcacggctcagcagctcgaggccctggaaaagaccttccagaagactcactacccagatgtggtgatgcgtgagaggctggccatgtgcaccaacctgcctgaggcccgggtgcaggtgtggttcaagaaccgccgggccaagttccggaagaagcagcgtagcctgcagaaggaacagctccagaagcagaaggaggctgagggctcccatggggaaggcaaggccgaggcccccactccagatacccagctggacactgagcagcccccacgtctgcctggcagcgacccccctgctgagcttcacctgagtctgtctgagcagtcagccagtgagtcagcccccgaggatcagccggaccgtgaggaggaccccagggcaggggctgaggaccccaaagctgagaagagccctggggctgacagcaaggggctgggctgcaagaggggcagccccaaggcagattccccaggcagcctgaccatcactcctgtggccccagggggtggcctcctgggcccctcccactcctattcctcgtccccgctgagcctcttccgtctgcaggagcaattccgccagcacatggcggccaccaacaacctggtgcactactcgtccttcgaagtagggggtccggcccctgctgctgcagcggcggctgctgctgtgccctacctgggcgtcaacatggccccgctgggctcactgcactgccagtcctactaccagtccctgtcagcagccgctgctgcccaccagggtgtgtgggggtctcctctgctgcctgcacccccagcaggcctggctcctgcatcagctaccctgaacagtaaaaccacaagcatcgagaacctgcggctccgggccaagcagcacgcggcctccctgggactcgatacgctgcccaactagtaatgaactagtccgtaacttgaaagtatttcgatttcttggctttatatatcttgtggaaaggacgagtagaactcattgtttaatcatta

SEQ ID NO: 1248 - DNA, 2219 bp, Homo sapiens
  source 1..2219: mol_type = genomic DNA
accgccaccatgcagttaggggagcagctcttggtgagctcagtgaacctgcctggcgcgcacttctacccgctggagagtgcgcgaggcggcagcggcgggagcgctggccacctccccagcgcggccccctctcctcagaagttggacttagacaaagcgtccaagaagttttccggcagtctctcctgcgaggcggtgagcggggagcccgcagccgccagcgcaggggcccccgcggccatgcttagtgacaccgacgccggggacgcatttgccagcgctgcggcagtggccaagccggggcccccggacggccgcaagggctccccctgcggggaggaggagctgccctccgccgctgcagccgccgccgccgccgccgccgcggctgcggccactgcgcgctactccatggacagcctgagctccgagcggtactacctccagtcccccggtcctcaggggtcggagctggctgcgccctgctcactcttcccgtaccaggcggcggctggggcgccccacggacctgtgtacccggctcctaacggggcgcgctacccctacggctccatgctgccccccggcggcttccccgcggctgtgtgcccacccgggagggcgcagttcggcccaggagccggtgcgggcagtggcgcgggcggtagcagcggcgggggcggcggcccgggcacctatcagtacagccagggggctccgctctacgggccgtaccctggagccgcagcggcgggatcttgcggaggactggggggcctgggggttccaggttctggcttccgtgcccacgtctacctgtgcaaccggcctctgtggctcaaattccaccgccaccaaactgagatgatcattacgaaacagggcaggcgcatgtttcctttcttgagcttcaacataaacggactcaatcccactgcccactacaatgtgttcgtagaggtggtgctggcggaccccaaccactggcgcttccaggggggcaaatgggtgacctgtggcaaagccgacaataacatgcagggcaacaaaatgtatgttcacccagagtctcctaatactggttcccactggatgagacaggagatttcattcgggaaattaaaactcaccaataacaaaggcgcaaataacaacaacacccagatgatagtcttacaatccttacacaaataccaaccccgactgcatattgttgaagttacagaggatggcgtggaggacttgaatgagccctcaaagacccagacttttaccttctcagaaacgcaattcattgcagtgactgcctaccaaaacaccgatattactcaactaaagattgatcataacccctttgcaaaaggcttcagagacaactatgattccatgtacaccgcttcagaaaatgacaggttaactccatctcccacggattctcctagatcccatcagattgtccctggaggtcggtacggcgttcaatccttcttcccggagccctttgtcaacactttacctcaagcccgctattataatggcgagagaaccgtgccacagaccaacggcctcctttcaccccaacagagcgaagaggtggccaaccctccccagcggtggcttgtcacgcctgtccagcaacctgggaccaacaaactagacatcagttcctatgaatctgaatatacttctagcacattgctcccatatggcattaaatccttgccccttcagacatcccatgccctggggtattacccagacccaacctttcctgcaatggcagggtggggaggtcgaggttcttaccagaggaagatggcagctggactaccatggacctccagaacaagccccactgtgttctctgaagatcagctctccaaggagaaagtgaaagaggaaattggctcttcttggatagagacacccccttccatcaaatctctagattccaatgattcaggagtatacaccagtgcttgtaagcgaaggcggctgtctcctagcaactccagtaatgaaaattcaccctccataaagtgtgaggacattaatgctgaagagtatagtaaagacacctcaaaaggcatgggagggtattatgctttttacacaactccctagtaatgaactagtccgtaacttgaaagtatttcgatttcttggctttatatatcttgtggaaaggacgaccttgaggtcgggattgcgcacct

SEQ ID NO: 1249 - DNA, 2162 bp, Homo sapiens
  source 1..2162: mol_type = genomic DNA
accgccaccatgcagttaggggagcagctcttggtgagctcagtgaacctgcctggcgcgcacttctacccgctggagagtgcgcgaggcggcagcggcgggagcgctggccacctccccagcgcggccccctctcctcagaagttggacttagacaaagcgtccaagaagttttccggcagtctctcctgcgaggcggtgagcggggagcccgcagccgccagcgcaggggcccccgcggccatgcttagtgacaccgacgccggggacgcatttgccagcgctgcggcagtggccaagccggggcccccggacggccgcaagggctccccctgcggggaggaggagctgccctccgccgctgcagccgccgccgccgccgccgccgcggctgcggccactgcgcgctactccatggacagcctgagctccgagcggtactacctccagtcccccggtcctcaggggtcggagctggctgcgccctgctcactcttcccgtaccaggcggcggctggggcgccccacggacctgtgtacccggctcctaacggggcgcgctacccctacggctccatgctgccccccggcggcttccccgcggctgtgtgcccacccgggagggcgcagttcggcccaggagccggtgcgggcagtggcgcgggcggtagcagcggcgggggcggcggcccgggcacctatcagtacagccagggggctccgctctacgggccgtaccctggagccgcagcggcgggatcttgcggaggactggggggcctgggggttccaggttctggcttccgtgcccacgtctacctgtgcaaccggcctctgtggctcaaattccaccgccaccaaactgagatgatcattacgaaacagggcaggcgcatgtttcctttcttgagcttcaacataaacggactcaatcccactgcccactacaatgtgttcgtagaggtggtgctggcggaccccaaccactggcgcttccaggggggcaaatgggtgacctgtggcaaagccgacaataacatgcagggcaacaaaatgtatgttcacccagagtctcctaatactggttcccactggatgagacaggagatttcattcgggaaattaaaactcaccaataacaaaggcgcaaataacaacaacacccagatgatagtcttacaatccttacacaaataccaaccccgactgcatattgttgaagttacagaggatggcgtggaggacttgaatgagccctcaaagacccagacttttaccttctcagaaacgcaattcattgcagtgactgcctaccaaaacaccgatattactcaactaaagattgatcataacccctttgcaaaaggcttcagagacaactatgattcatcccatcagattgtccctggaggtcggtacggcgttcaatccttcttcccggagccctttgtcaacactttacctcaagcccgctattataatggcgagagaaccgtgccacagaccaacggcctcctttcaccccaacagagcgaagaggtggccaaccctccccagcggtggcttgtcacgcctgtccagcaacctgggaccaacaaactagacatcagttcctatgaatctgaatatacttctagcacattgctcccatatggcattaaatccttgccccttcagacatcccatgccctggggtattacccagacccaacctttcctgcaatggcagggtggggaggtcgaggttcttaccagaggaagatggcagctggactaccatggacctccagaacaagccccactgtgttctctgaagatcagctctccaaggagaaagtgaaagaggaaattggctcttcttggatagagacacccccttccatcaaatctctagattccaatgattcaggagtatacaccagtgcttgtaagcgaaggcggctgtctcctagcaactccagtaatgaaaattcaccctccataaagtgtgaggacattaatgctgaagagtatagtaaagacacctcaaaaggcatgggagggtattatgctttttacacaactccctagtaatgaactagtccgtaacttgaaagtatttcgatttcttggctttatatatcttgtggaaaggacgagggatgtagtgatacacatcataa

SEQ ID NO: 1250 - DNA, 1334 bp, Homo sapiens
  source 1..1334: mol_type = genomic DNA
accgccaccatgtttcctttcttgagcttcaacataaacggactcaatcccactgcccactacaatgtgttcgtagaggtggtgctggcggaccccaaccactggcgcttccaggggggcaaatgggtgacctgtggcaaagccgacaataacatgcagggcaacaaaatgtatgttcacccagagtctcctaatactggttcccactggatgagacaggagatttcattcgggaaattaaaactcaccaataacaaaggcgcaaataacaacaacacccagatgatagtcttacaatccttacacaaataccaaccccgactgcatattgttgaagttacagaggatggcgtggaggacttgaatgagccctcaaagacccagacttttaccttctcagaaacgcaattcattgcagtgactgcctaccaaaacaccgatattactcaactaaagattgatcataacccctttgcaaaaggcttcagagacaactatgattccatgtacaccgcttcagaaaatgacaggttaactccatctcccacggattctcctagatcccatcagattgtccctggaggtcggtacggcgttcaatccttcttcccggagccctttgtcaacactttacctcaagcccgctattataatggcgagagaaccgtgccacagaccaacggcctcctttcaccccaacagagcgaagaggtggccaaccctccccagcggtggcttgtcacgcctgtccagcaacctgggaccaacaaactagacatcagttcctatgaatctgaatatacttctagcacattgctcccatatggcattaaatccttgccccttcagacatcccatgccctggggtattacccagacccaacctttcctgcaatggcagggtggggaggtcgaggttcttaccagaggaagatggcagctggactaccatggacctccagaacaagccccactgtgttctctgaagatcagctctccaaggagaaagtgaaagaggaaattggctcttcttggatagagacacccccttccatcaaatctctagattccaatgattcaggagtatacaccagtgcttgtaagcgaaggcggctgtctcctagcaactccagtaatgaaaattcaccctccataaagtgtgaggacattaatgctgaagagtatagtaaagacacctcaaaaggcatgggagggtattatgctttttacacaactccctagtaatgaactagtccgtaacttgaaagtatttcgatttcttggctttatatatcttgtggaaaggacgatggccaccgactatgtaatcggcc

SEQ ID NO: 1251 - DNA, 1178 bp, Homo sapiens
  source 1..1178: mol_type = genomic DNA
accgccaccatggcctccacttcccgccgccaacgccgagaacgtcgctttcgtcgttacttgtctgcaggacggctggtccgggcccaggccctcctccagcgacacccaggcctcgatgtagatgctgggcagcccccaccactgcaccgggcctgtgcccgccacgatgcccctgccctgtgcctgctgcttcggctcggggctgaccctgcccaccaggaccgccatggggacacggcactgcatgctgctgcccgccagggcccagatgcctacaccgatttcttcctcccgctgctaagccgctgtccctccgccatgggaataaagaataaggatggggagacccctggccaaattttgggctggggacccccctgggattctgctgaagaggaggaagaagatgatgcctccaaggagcgggaatggagacagaagctccagggtgagctggaggacgagtggcaggaagtcatggggaggtttgaaggtgatgcctcccatgaaacccaggaacctgagtccttctcagcctggtcagatcgcctggcccgggaacatgcccagaagtgccagcagcagcagcgagaagcagagggatcccgtcgacccccacgtgctgagggctccagccagagctggcgacagcaggaggaggagcagcggctcttcagggagcgagcccgggccaaggaggaagagctgcgtgagagccgagccaggagggcgcaggaggctctaggggaccgagaacccaagccaaccagggccgggcccagggaagagcaccccagaggagcggggaggggcagcctctggcgatttggtgatgtgccctggccctgccctgggggaggggacccagaggccatggctgcagccctggtggccaggggcccccctttggaggaacagggggctctgaggaggtacttgagggtccagcaggtccgctggcaccctgaccgcttcctgcagcgattccgaagccagattgagacctgggagctgggccgtgtgatgggagcagtgacagccctttctcaggccctgaatcgccatgcagaggccctcaagtagtaatgaactagtccgtaacttgaaagtatttcgatttcttggctttatatatcttgtggaaaggacgagtacgatttcccgccttagctaag

SEQ ID NO: 1252 - DNA, 1247 bp, Homo sapiens
  source 1..1247: mol_type = genomic DNA
accgccaccatgagtaacccctccccccaggttccagaggaagaagcctccacatctgtctgccggcccaagagttccatggcctccacttcccgccgccaacgccgagaacgtcgctttcgtcgttacttgtctgcaggacggctggtccgggcccaggccctcctccagcgacacccaggcctcgatgtagatgctgggcagcccccaccactgcaccgggcctgtgcccgccacgatgcccctgccctgtgcctgctgcttcggctcggggctgaccctgcccaccaggaccgccatggggacacggcactgcatgctgctgcccgccagggcccagatgcctacaccgatttcttcctcccgctgctaagccgctgtccctccgccatgggaataaagaataaggatggggagacccctggccaaattttgggctggggacccccctgggattctgctgaagaggaggaagaagatgatgcctccaaggagcgggaatggagacagaagctccagggtgagctggaggacgagtggcaggaagtcatggggaggtttgaaggtgatgcctcccatgaaacccaggaacctgagtccttctcagcctggtcagatcgcctggcccgggaacatgcccagaagtgccagcagcagcagcgagaagcagagggatcccgtcgacccccacgtgctgagggctccagccagagctggcgacagcaggaggaggagcagcggctcttcagggagcgagcccgggccaaggaggaagagctgcgtgagagccgagccaggagggcgcaggaggctctaggggaccgagaacccaagccaaccagggccgggcccagggaagagcaccccagaggagcggggaggggcagcctctggcgatttggtgatgtgccctggccctgccctgggggaggggacccagaggccatggctgcagccctggtggccaggggcccccctttggaggaacagggggctctgaggaggtacttgagggtccagcaggtccgctggcaccctgaccgcttcctgcagcgattccgaagccagattgagacctgggagctgggccgtgtgatgggagcagtgacagccctttctcaggccctgaatcgccatgcagaggccctcaagtagtaatgaactagtccgtaacttgaaagtatttcgatttcttggctttatatatcttgtggaaaggacgagccataagtaaacagtaaaccttg

SEQ ID NO: 1253 - DNA, 1202 bp, Homo sapiens
  source 1..1202: mol_type = genomic DNA
accgccaccatgagtaacccctccccccaggttccagaggaagaagcctccacatctgtctgccggcccaagagttccatggcctccacttcccgccgccaacgccgagaacgtcgctttcgtcgttacttgtctgcaggacggctggtccgggcccaggccctcctccagcgacacccaggcctcgatgtagatgctgggcagcccccaccactgcaccgggcctgtgcccgccacgatgcccctgccctgtgcctgctgcttcggctcggggctgaccctgcccaccaggaccgccatggggacacggcactgcatgctgctgcccgccagggcccagatgcctacaccgatttcttcctcccgctgctaagccgctgtccctccgccatgggaataaagaataaggatggggagacccctggccaaattttgggctggggacccccctgggattctgctgaagaggaggaagaagatgatgcctccaaggagcgggaatggagacagaagctccagggtgatgcctcccatgaaacccaggaacctgagtccttctcagcctggtcagatcgcctggcccgggaacatgcccagaagtgccagcagcagcagcgagaagcagagggatcccgtcgacccccacgtgctgagggctccagccagagctggcgacagcaggaggaggagcagcggctcttcagggagcgagcccgggccaaggaggaagagctgcgtgagagccgagccaggagggcgcaggaggctctaggggaccgagaacccaagccaaccagggccgggcccagggaagagcaccccagaggagcggggaggggcagcctctggcgatttggtgatgtgccctggccctgccctgggggaggggacccagaggccatggctgcagccctggtggccaggggcccccctttggaggaacagggggctctgaggaggtacttgagggtccagcaggtccgctggcaccctgaccgcttcctgcagcgattccgaagccagattgagacctgggagctgggccgtgtgatgggagcagtgacagccctttctcaggccctgaatcgccatgcagaggccctcaagtagtaatgaactagtccgtaacttgaaagtatttcgatttcttggctttatatatcttgtggaaaggacgagtatattcttcaacggattggccg

SEQ ID NO: 1254 - DNA, 2837 bp, Homo sapiens
  source 1..2837: mol_type = genomic DNA
accgccaccatggaagcttcctggcgccaggtggccggtggccgaggccgatcccggggacgggccactgccgccccctcaggaaatggagtccatctccgcggcgccggaggagggcgagagaaggggtcggtgggcgcagttccttctggcaccagtcccggaggagtcgcgaccacggcggctgcagggagcaggcacagccccgcaggatcccaagccctgcagactaccgcagccagcgagctaatgtctcagaaaaaatttgaagaaatcaagaaagctaaccaagctgcagccagaaaacttgttgaagaacagtttagctcttcatctgaagaaggagatgaagattttgaaggaaaacagggaaaaatacttgcaaatacgtttataacatacactactcagacagatggagatacacgtgaattagagcgaacaaaacaatatgtaaatgaagcttttcaagcaggggctatgacatgcctaatttgtattgcttcggtgaagagaaaccaagcagtttggagctgttcgggatgtttctgtatatttcacatgccctgtatccagaagtgggctaaagacagccagtttcttgtatcttctgtgactgatgatgattttggaaagaaagattgtccctggccttgtccaaaatgtaggtttgaatacaaacgatctgaaacacctagtaggtactattgctattgtggaaaagtagaagatccacctttagatccgtggcttgtgcctcattcatgtggccaagtatgtgagcgtgaatttaaacctccttgtggccataaatgtttactcctctgtcatccaggtccctgccctccttgtccaaagatggtcacaactacttgttactgtaagaaagcaaaacctatccctcgtaggtgcagtgccaaggaatggtcttgtcagctgccatgtggacagaagttgctttgtgggcaacataagtgtgaaaatccttgtcatgcaggaagctgtcagccttgtccaagagttagtagacaaaagtgtgtctgtggcaaaaaagtagctgaaagaagttgtgcaagtccactatggcactgtgatcaagtatgtggaaaaacactgccatgtggtaatcacacatgtgagcaagtttgccatgttggtgcttgtggagaatgtcctcgatctgggaaaaggttctgtccatgtcagaaatcaaagttttctttgccttgtacagaagatgtaccaacttgtggagacagttgtgacaaagtacttgaatgcggaatccatagatgttcacagcgttgtcaccgaggtccctgtgaaacatgtagacaagaagtggaaaagcattgtcgctgtggaaagcatacaaaacgaatgccttgtcataaaccttatctgtgtgaaactaagtgtgttaagatgcgtgactgtcagaagcatcaatgtagaagaaagtgttgccctggaaactgtccaccttgtgatcaaaactgtggacggactttaggatgtagaaaccataagtgtccatctgtctgtcacagaggcagttgctatccctgcccagaaaccgtagatgtgaagtgtaattgtggcaatacaaaggtgacagtgccctgtggccgagaacgtaccacaagaccacccaagtgcaaggagcaatgcagtcgaccaccaacttgtcatcatacaagtcaagaaaaacatcgctgtcactttggttcttgtccaccatgtcatcaaccttgccaaaaagttttggagaaatgtggtcacttgtgtcctgctccgtgtcatgatcaagcattaataaagcagactggcaggcaccagcctacaggcccttgggaacagccttctgagccagcatttattcagactgcattaccgtgtcctccatgtcaagttcctattcctatggaatgtcttgggaaacatgaggtgagtccactaccatgccatgctgtaggaccctactcttgtaaaagagtttgtggaagaatcttggattgtcagaatcacacatgtatgaaagaatgccacaaagtaaccaaaactgatggctgcactggaaaaaacaaggctggcccagaatgccttcattgtgaggaagggtgctccaagtcacggccactaggttgtcttcacccatgtattttgcgatgtcaccctggagaatgtccaccttgtgttcagatgcttagaataaaatgtcactgtaagatcacaagcctgtatgtggaatgtagaaaaataaccacagctgatgtaaatgaaaagaacctcctcagttgttgcaaaaatcagtgccctaaagagcttccttgtggtcatagatgcaaagagatgtgtcatcctggtgaatgtccctttaactgcaaccagaaggtaaaacttagatgtccttgtaaaagaataaaaaaggaattgcagtgcaacaaagtacgtgaaaatcaggtttcaatagaatgtgacacaacgtgcaaggaaatgaagcggaaagcatctgagataaaagaagcagaagccaaagctgctcttgaagaagaaaaacgaagacaacaggctgaactagaagcttttgaaaacagactgaagggtcgtcggaagaagaacaggaaaagagatgaagtggcagttgagctatcactatggcaaaaacataaatattatctcatttcagtgtgtggagttgtggttgtagtgtttgcctggtacatcacccatgatgtcaattagtaatgaactagtccgtaacttgaaagtatttcgatttcttggctttatatatcttgtggaaaggacgatgaccgacgactgttcagatctat

SEQ ID NO: 1255 - DNA, 2132 bp, Homo sapiens
  source 1..2132: mol_type = genomic DNA
accgccaccatggcgccgttcctgcgcatcgccttcaactcctatgagctgggctccctgcaggccgaggacgaggcgaaccagcccttctgtgccgtgaagatgaaggaggcgctcagcacagagcgtgggaaaacactggtgcagaagaagccgaccatgtatcctgagtggaagtcgacgttcgatgcccacatctatgaggggcgcgtcatccagattgtgctaatgcgggcagcagaggagccagtgtctgaggtgaccgtgggtgtgtcggtgctggccgagcgctgcaagaagaacaatggcaaggctgagttctggctggacctgcagcctcaggccaaggtgttgatgtctgttcagtatttcctggaggacgtggattgcaaacagtctatgcgcagtgaggacgaggccaagttcccaacgatgaaccgccgcggagccatcaaacaggccaaaatccactacatcaagaaccatgagtttatcgccaccttctttgggcaacccaccttctgttctgtgtgcaaagactttgtctggggcctcaacaagcaaggctacaaatgcaggcaatgtaacgctgccatccacaagaaatgcatcgacaagatcatcggcagatgcactggcaccgcggccaacagccgggacactatattccagaaagaacgcttcaacatcgacatgccgcaccgcttcaaggttcacaactacatgagccccaccttctgtgaccactgcggcagcctgctctggggactggtgaagcagggattaaagtgtgaagactgcggcatgaatgtgcaccataaatgccgggagaaggtggccaacctctgcggcatcaaccagaagcttttggctgaggccttgaaccaagtcacccagagagcctcccggagatcagactcagcctcctcagagcctgttgggatatatcagggtttcgagaagaagaccggagttgctggggaggacatgcaagacaacagtgggacctacggcaagatctgggagggcagcagcaagtgcaacatcaacaacttcatcttccacaaggtcctgggcaaaggcagcttcgggaaggtgctgcttggagagctgaagggcagaggagagtactttgccatcaaggccctcaagaaggatgtggtcctgatcgacgacgacgtggagtgcaccatggttgagaagcgggtgctgacacttgccgcagagaatccctttctcacccacctcatctgcaccttccagaccaaggaccacctgttctttgtgatggagttcctcaacgggggggacctgatgtaccacatccaggacaaaggccgctttgaactctaccgtgccacgttttatgccgctgagataatgtgtggactgcagtttctacacagcaagggcatcatttacagggacctcaaactggacaatgtgctgctggaccgggatggccacatcaagattgccgactttgggatgtgcaaagagaacatattcggggagagccgggccagcaccttctgcggcacccctgactatatcgcccctgagatcctacagggcctgaagtacacattctctgtggactggtggtctttcggggtccttctgtacgagatgctcattggccagtcccccttccatggtgatgatgaggatgaactcttcgagtccatccgtgtggacacgccacattatccccgctggatcaccaaggagtccaaggacatcctggagaagctctttgaaagggaaccaaccaagaggctgggagtgaccggaaacatcaaaatccaccccttcttcaagaccataaactggactctgctggaaaagcggaggttggagccacctttcaggcccaaagtgaagtcacccagagactacagtaactttgaccaggagttcctgaacgagaaggcgcgcctctcctacagcgacaagaacctcatcgactccatggaccagtctgcattcgctggcttctcctttgtgaaccccaaattcgagcacctcctggaagattagtaatgaactagtccgtaacttgaaagtatttcgatttcttggctttatatatcttgtggaaaggacgacgtgattgcttcttggcgcaccga

SEQ ID NO: 1256 - DNA, 1898 bp, Homo sapiens
  source 1..1898: mol_type = genomic DNA
accgccaccatggacgctctgccccgcagcgggctgaacctgaaggaggagccgctgctgcccgccggcctgggctcagtgcgctcctggatgcagggcgcgggcatcctggacgccagcaccgcggcgcagagtggcgtgggtctggcacgagcacattttgagaagcagcctccctccaacctcaggaaatccaacttcttccacttcgtgctggccatgtacgaccggcaggggcagcccgtggaggtggagcgcacagccttcatcgacttcgtggaaaaggaccgagagcccggggcggaaaagactaacaatgggatccattaccgcctccggctggtgtataacaatggactgcggacagagcaagacctctacgtgcgtctcatcgactccatgtccaaacaggccatcatctatgaggggcaggacaagaaccccgaaatgtgccgagtgctgctcacccatgagatcatgtgcagccggtgctgtgaccggaagagctgtggcaaccggaatgagacgccctcagaccccgtcatcattgacaggttcttcctcaagttcttcctcaaatgcaaccagaactgcctgaagaatgcggggaatcccagagacatgcgccgcttccaggtggtggtgtccacgacggtgagcgtggacggacacgtgctggccgtgtccgacaacatgtttgtgcacaacaactccaagcatggccgcagggcgcgccgcctggacccctccgaagctgccaccccctgcatcaaggccatcagccccggggagggctggaccacgggcggcgccaccgtcattgtcatcggcgacaacttcttcgacgggttgcaggtcgtgttcggaaacgtgctcgtgtggagcgagctcatcacgccccacgccatccgggtgcagacgcccccgcggcacatccccggggtggtggaggtgaccctctcctacaagtccaagcagttttgcaagggatgccccggccgctttgtctacacagctctgaacgagcccaccattgactacggattccagaggctacagaaagtcattcccagacaccccggagaccccgagaggctgcccaaggaagtgctgctgaagcgggcggccgacttggcagaagccctgtacggagtgcccggcagtaaccaggagctgctcctgaagcgcgcggcggacgtggccgaggctctgtacagcaccccccgcgcacccgggccgctcgcacccctggccccgagccacccacaccccgccgtcgtgggcatcaacgccttcagcagcccgctggccatcgccgtcggggacgccaccccggggcccgagccgggctacgcgcgcagctgcagcagcgcgtccccccgcgggttcgcgcccagccccggctcgcagcagagcggctacggcggcggcctcggagctggcctgggcggctacggcgcgccgggcgtggccggcctcggcgtgcctgggtcccccagcttcctcaatggctccaccgccacctcgcccttcgccatcatgccctctagccccccgctggcggctgcctcctccatgtccctcccggccgctgcccccaccaccagcgtgttctccttctcgcctgtcaacatgatctccgccgtcaaacagaggagcgccttcgcccccgtgctgcgccccccaagctccccaccccaggcctgccccagagcccacggagaggggcttccagaccagtcttttgaggattctgacaagtttcactctccagcccgggggcttcagggcctggcatactcctagtaatgaactagtccgtaacttgaaagtatttcgatttcttggctttatatatcttgtggaaaggacgatcgggtctgctcaatactaacacg

SEQ ID NO: 1257 - DNA, 1892 bp, Homo sapiens
  source 1..1892: mol_type = genomic DNA
accgccaccatgtttgggattcaggagaatattccgcgcggggggacgaccatgaaggaggagccgctgggcagcggcatgaacccggtgcgctcgtggatgcacacggcgggcgtggtggacgccaacacggccgcccagagcggcgtggggctggcgcgggcgcacttcgagaagcagccgccttccaacctccggaaatccaatttcttccacttcgtgctggcgctctacgataggcaggggcagccggtggagattgaaaggaccgcttttgtggactttgtggagaaagagaaagagccaaacaacgagaaaaccaacaacggcatccactataaactccagttattgtacagcaacggagtcagaacagagcaagatctgtatgttcgcctcatagattcaatgaccaaacaggccatcgtctacgagggccaggacaagaacccggagatgtgccgtgtgctgctgacccacgagatcatgtgcagccggtgctgtgacaagaaaagttgtggcaatagaaacgaaacgccctcagaccctgtaatcattgacagattctttctaaagtttttcctcaagtgcaatcagaactgtttgaagaatgcaggcaaccctcgagatatgcggagattccaggttgttgtatcgacaacagtcaacgtggacggccacgtgctggccgtgtcagacaacatgtttgtgcacaacaattccaaacacgggaggcgggcccgccgcctagacccgtcagaaggtacggccccttcttatctggaaaatgccactccgtgcatcaaggccatcagtcccagtgaaggctggaccacggggggtgccaccgtcatcataattggcgacaacttctttgacgggctgcaagttgtattcggaactatgttggtgtggagcgagctgataactccccatgccatccgagtccagaccccgccgaggcacattcctggcgtcgtcgaagtgaccctctcctacaaatccaagcagttctgcaaaggtgctcctgggcgctttgtctacaccgcccttaatgaaccaaccatagattacggctttcagaggttgcagaaagtgatcccaagacatccgggtgatcccgaaaggttacccaaggaggtgttactgaagcgggcggcggacctggtggaagccttatacggaatgcctcacaacaaccaggagatcatcttgaagcgagcggcggacatcgccgaggcgctgtacagcgttccccgcaatcacaaccagatccccaccctgggcaacaaccctgcacacacgggcatgatgggcgtcaactccttcagcagccagctagccgtcaacgtgtcagagacgtcacaagccaacgaccaagtcggctacagtcgcaatacaagcagcgtgtccccgcgaggctacgtccccagcagtactccccagcagtccaattacaacacagtcagcactagcatgaatggatatggaagtggcgccatggccagtctaggggtccctggctcgcctggatttcttaatggctcctccgctaactctccctacggcatagtgccgtccagccccaccatggcagcctcttcggtcaccctcccttcaaactgtagcagcacacacggcattttctcattctcacctgccaatgtcatctccgcagtgaaacagaagagcgccttcgcgcccgtggtccggccccaagcctctcctcctccttcctgcaccagcgccaacgggaatggactgcaagctatgtctgggctggtagtcccgccaatgtagtaatgaactagtccgtaacttgaaagtatttcgatttcttggctttatatatcttgtggaaaggacgacgatcaccacgccagctagcgatc

SEQ ID NO: 1258 - DNA, 1829 bp, Homo sapiens
  source 1..1829: mol_type = genomic DNA
accgccaccatgtttggaattcaagatactttaggaagaggaccaactctgaaagagaaatcgctgggcgcggagatggattcggtcaggtcctgggtccggaatgtcggagtggtggacgctaatgtcgccgcgcagagcggggtcgccctgtcccgggcccactttgagaaacagcctccttccaacttgaggaaatccaacttctttcacttcgtcctggcgctctatgacaggcagggccagccggtggagatcgagcggacggccttcgtggactttgtggagaatgacaaagaacaaggcaacgagaagaccaacaacggcactcactacaagttacagctcctctacagcaacggtgtccgcacggaacaggacctctatgtcaggctcatcgactcggtcaccaagcagcccatcgcttacgagggacagaataagaatccggaaatgtgccgagttctcctgacgcacgaagtgatgtgtagtcgatgctgcgaaaagaaaagctgtggaaaccgaaatgagactccatcggacccagtcataattgacagattctttttaaaatttttcctcaagtgcaatcagaattgtttgaaaacagcaggaaacccaagggacatgagacggtttcaggttgtgttgtcaacaacggtgaatgtggatggacacgtcctggctgtttctgacaacatgtttgttcataacaactccaagcatggacggagagcaagaagactcgatccatcggaagctaccccctgcatcaaagccattagcccgagtgaaggctggaccacaggaggagccatggtcatcatcatcggggacaacttctttgatggtctccaagtggtgtttgggactatgcttgtatggagcgagctaataacccctcatgccatcagagtacagactcctccccggcacatcccaggcgtggtagaggtgacattatcttataaatctaaacagttctgcaaaggagccccaggaaggttcatttacacagcattaaatgaacccaccatagactatggcttccagagactgcagaaggtcatccctaggcatcctggagatcctgagagattagctaaggagatgctgttgaaaagagctgcagatctagtggaagctctttatggcacaccacacaataaccaggacatcattttgaagcgagccgcagacattgctgaagctctctacagcgtccccaggaatcccagccagcttccagccctctctagctccccagcgcacagtggcatgatgggaatcaactcctatggcagccagcttggggtcagcatctcagagtcaacacaaggaaataatcaagggtacatccgcaacacaagcagcatctctccgcggggatactcttccagctccacgcctcaacagtctaattacagtacctccagcaacagtatgaatggctacagcaatgtccccatggccaacttgggtgttccaggttcaccaggatttctaaatggctcacccaccggctctccttatggaatcatgtcatcaagtcccaccgttgggtcttccagcacatcctccatcctcccattttcctcttcagtttttcctgctgtcaaacagaagagtgcctttgcccctgtcatcaggccccaaggctccccttcacctgcctgctccagcggcaatggaaatggattcagagccatgaccggacttgttgtacccccgatgtagtaatgaactagtccgtaacttgaaagtatttcgatttcttggctttatatatcttgtggaaaggacgaaataacgaggacttaaatgccgca

SEQ ID NO: 1259 - DNA, 1784 bp, Homo sapiens
  source 1..1784: mol_type = genomic DNA
accgccaccatgtttgggattcaggaaagcatccaacggagtggaagcagcatgaaggaagagccgctgggcagcggcatgaacgcggtgcggacgtggatgcagggcgccggggtgctggacgccaacacggcggcgcagagcggggtgggtctggcccgggctcactttgagaagcagccgccttccaatctgcggaaatccaacttcttccacttcgtcctggccctctacgacagacagggccagcccgtggagatcgagaggacagcgtttgtggggttcgtggagaaggaaaaagaagccaacagcgaaaagaccaataacggaattcactaccggcttcagcttctctacagcaatgggataaggacggagcaggatttctacgtgcgcctcattgactccatgacaaaacaagccatagtgtatgaaggccaagacaagaacccagaaatgtgccgagtcttgctcacacatgagatcatgtgcaggttcttcttgaaatttttcctcaaatgtaaccaaaattgcctaaagaatgcgggaaacccacgtgacatgcggagattccaggtcgtggtgtctacgacagtcaatgtggatggccatgtcctggcagtctctgataacatgtttgtccataataattccaagcatgggcggagggctcggaggcttgacccctcggaagctactccctgtatcaaagccatcagcccgagtgaaggatggacgacgggaggtgcgactgtgatcatcataggggacaatttctttgatgggttacaggtcatattcggtaccatgctggtctggagtgagttgatcactcctcatgccatccgtgtgcagacccctcctcggcacatccctggtgttgtggaagtcacactgtcctacaaatctaagcagttctgcaaaggaacaccaggcagattcatttatacagcgctcaacgaacccaccatcgattatggtttccagaggttacagaaggtcattcctcggcaccctggtgaccctgagcgtttgccaaaggaagtaatactcaaaagggctgcggatctggtagaagcactgtatgggatgccacacaacaaccaggaaatcattctgaagagagcggccgacattgccgaggccctgtacagtgttccccgcaaccacaaccaactcccggcccttgctaacacctcggtccacgcagggatgatgggcgtgaattcgttcagtggacaactggccgtgaatgtctccgaggcatcacaagccaccaatcagggtttcacccgcaactcaagcagcgtatcaccacacgggtacgtgccgagcaccactccccagcagaccaactataactccgtcaccacgagcatgaacggatacggctctgccgcaatgtccaatttgggcggctcccccaccttcctcaacggctcagctgccaactccccctatgccatagtgccatccagccccaccatggcctcctccacaagcctcccctccaactgcagcagctcctcgggcatcttctccttctcaccagccaacatggtctcagccgtgaaacagaagagtgctttcgcaccagtcgtcagaccccagacctccccacctcccacctgcaccagcaccaacgggaacagcctgcaagcgatatctggcatgattgttcctcctatgtagtaatgaactagtccgtaacttgaaagtatttcgatttcttggctttatatatcttgtggaaaggacgacactatcaataacgattcatgaca

SEQ ID NO: 1260 - DNA, 746 bp, Homo sapiens
  source 1..746: mol_type = genomic DNA
accgccaccatgacggagccgggcgcctctcccgaggacccttgggtcaaggtggagtatgcctacagcgacaacagcctggaccccgatgatgaggacagtgattaccaccaggaggcctacaaggagtcctacaaagaccggcggcggcgcgcacacactcaggctgagcagaagaggagggacgccatcaagagaggctatgatgaccttcagaccatcgtccccacttgccagcagcaggacttctccattggctcccaaaagctcagcaaagccatcgttctacaaaagaccattgactacattcagtttttgcacaaggagaagaaaaagcaggaggaggaggtgtccacgttacgcaaggatgtcaccgccctaaagatcatgaaagtgaactatgagcagattgtgaaggcacaccaggacaacccccatgaaggggaggaccaggtctctgaccaggtcaagttcaacgtgtttcaaggcatcatggattccctgttccagtccttcaatgcctccatctcagtggccagcttccaggagctgtcagcgtgtgtcttcagctggatcgaggagcactgtaagcctcagaccctgcgggagattgtgattggcgtcctgcaccaattgaaaaaccagctttactagtaatgaactagtccgtaacttgaaagtatttcgatttcttggctttatatatcttgtggaaaggacgaggcaatctctgcgtcactttcccg

SEQ ID NO: 1261 - DNA, 998 bp, Homo sapiens
  source 1..998: mol_type = genomic DNA
accgccaccatgacggagccgggcgcctctcccgaggacccttgggtcaaggcaagccccgtgggcgcgcacgccggcgaggggagggcgggtcgggctcgtgcacgtaggggggccggaagacgaggggcttccctcctgtccccaaagtcccccacgctctccgtgccccggggctgcagagaagacagctctcaccccgcgtgtgccaaggtggagtatgcctacagcgacaacagcctggaccccgggctttttgtagaaagcacccgcaaggggagtgtagtgtccagagctaatagcatcggttccaccagtgcctcttctgtccccaacacagatgatgaggacagtgattaccaccaggaggcctacaaggagtcctacaaagaccggcggcggcgcgcacacactcaggctgagcagaagaggagggacgccatcaagagaggctatgatgaccttcagaccatcgtccccacttgccagcagcaggacttctccattggctcccaaaagctcagcaaagccatcgttctacaaaagaccattgactacattcagtttttgcacaaggagaagaaaaagcaggaggaggaggtgtccacgttacgcaaggatgtcaccgccctaaagatcatgaaagtgaactatgagcagattgtgaaggcacaccaggacaacccccatgaaggggaggaccaggtctctgaccaggtcaagttcaacgtgtttcaaggcatcatggattccctgttccagtccttcaatgcctccatctcagtggccagcttccaggagctgtcagcgtgtgtcttcagctggatcgaggagcactgtaagcctcagaccctgcgggagattgtgattggcgtcctgcaccaattgaaaaaccagctttactagtaatgaactagtccgtaacttgaaagtatttcgatttcttggctttatatatcttgtggaaaggacgacttattgttcgccctagcccaggc

SEQ ID NO: 1262 - DNA, 1622 bp, Homo sapiens
  source 1..1622: mol_type = genomic DNA
accgccaccatgccagctaatgggacatcaccccagagattccctgccctgattccaggagaacctggcagatcttttgaggggtccgtgtcattcgaggatgtggctgtggatttcacccgacaggagtggcacagactggaccctgctcagaggaccatgcacaaggatgtgatgctggagacctacagcaacctggcatctgtgggcctctgcgtggccaaaccagagatgatcttcaagttggagcgaggagaagagctgtggatattagaggaggaatcctcaggccatggttactcaggatctctctcactgctgtgtggcaatggttctgttggggataatgccctcaggcatgataatgaccttcttcaccatcagaagattcaaacattggatcaaaatgttgaatataatggatgcaggaaagccttccatgagaaaacaggctttgttagacgtaaaagaacacccagaggagataaaaactttgaatgtcatgaatgtgggaaagcttactgtaggaagtcaaaccttgttgaacatctgagaatacacacaggagagagaccctatgaatgcggtgaatgtgcaaaaaccttcagtgcaagatcatacctcattgctcatcagaaaactcacacaggggagaggccctttgaatgtaatgaatgtgggaaatcttttggcaggaagtcacaactcatcctacatacaagaacacacactggagagagaccctatgaatgtactgaatgtgggaaaaccttttctgagaaggcaaccctcacgattcatcagagaactcacacaggggagaaaccctatgaatgtagtgaatgtgggaaaacatttcgtgtaaagatatcccttacccaacaccacagaactcatacaggggagaaaccttatgaatgtggggagtgtgggaaaaacttccgtgcaaagaaatccctaaatcagcatcaaagaattcacacaggtgagaaaccctatgagtgtggtgaatgtgggaaattcttccgaatgaagatgactctcaataatcatcaaagaactcacacaggtgaaaagccctatcagtgtaatgaatgtgggaaatctttcagggtgcactcatctcttgggatccatcagagaattcacacaggagagaaaccttacgaatgtaatgagtgtggtaatgctttctatgtgaaagcacgcctaattgaacatcagaggatgcattcaggagagaaaccctacgaatgtagtgaatgtgggaaaatcttcagtatgaagaaatccctttgtcaacaccggagaactcacacaggagagaaaccttatgaatgtagtgaatgtggaaatgccttctatgtgaaagtacgcctcattgaacatcagcgaattcacacaggagagagaccctttgagtgtcaagaatgtgggaaagctttctgccggaaagcacacctcacagaacatcagagaactcacataggctggtcctggcgttgtacaatgaagaaagcctctcactagtaatgaactagtccgtaacttgaaagtatttcgatttcttggctttatatatcttgtggaaaggacgagcatgggctagttgagcatttgtg

SEQ ID NO: 1263 - DNA, 1415 bp, Homo sapiens
  source 1..1415: mol_type = genomic DNA
accgccaccatggcagcggccactctgaggacgccaactcagggcactgtgacctttgaagatgtggccgtacacttctcctgggaggaatggggtctccttgatgaggctcaaagatgcctgtaccgtgatgtgatgctggagaacttggctcttttaacctctctagatgttcatcatcagaagcagcaccttggagaaaaacatttcagaagcaatgtgggcagagccttgtttgtgaagacctgcacattccatgtgtcaggggagccttccacctgcagagaagttgggaaggacttcctggccaagttgggatttctccatcaacaggctgctcacactggggagcaatcaaatagcaaaagcgacggtggggccatcagtcacagaggaaaaactcattacaactgtggagaacacacaaaagcattcagcggtaaacacacacttgttcagcagcagagaaccctcactacagaaagatgttacatatgcagtgaatgtgggaaatcctttagcaaaagctacagtctcaatgaccattggagacttcacactggagaaaagccttatgaatgtcgagagtgtgggaagtcctttaggcaaagctctagtctcattcagcaccggagagttcacactgcagtacgacctcatgaatgtgatgaatgtggaaaattatttagcaacaagtctaacctcattaaacatcggagagttcacactggggaaaggccatatgagtgcagtgaatgtgggaaatcctttagccaaaggtctgcactccttcaacatcggggagttcacactggggagaggccttatgagtgcagtgaatgtgggaagttttttacatatcattccagtctcataaaacaccagaaagttcacagtggatccaggccttatgagtgcagcgaatgtgggaagtcatttagccaaaactctagcctcattgaacaccatagggttcacactggagaaaggccttataagtgcagcgaatgtgggaaatcctttagccaaaggtctgcactccttcaacatcggggagttcacactggggagaggccttatgagtgcagtgaatgtgggaagttctttccctacagctccagtctccgaaaacaccagagagttcacactggatcaagaccctatgagtgcagtgaatgtgggaaatcctttactcaaaattccggcctcattaagcacaggagggttcacactggggagaagccttatgagtgcacggaatgtgggaaatcctttagccataactccagccttattaaacatcagagaattcatagtcgatagtaatgaactagtccgtaacttgaaagtatttcgatttcttggctttatatatcttgtggaaaggacgacaggattcccttgatactatacag

SEQ ID NO: 1264 - DNA, 815 bp, Homo sapiens
  source 1..815: mol_type = genomic DNA
accgccaccatggccctgccccccagccccctggccatggaatatgtcaatgactttgacttgatgaagtttgaggtaaagcgggaaccctctgagggccgacctggcccccctacagcctcactgggctccacaccttacagctcagtgcctccttcacccaccttcagtgaaccaggcatggtgggggcaaccgagggcacccggccaggcctggaggagctgtactggctggctaccctgcagcagcagctgggggctggggaggcattggggctgagtcctgaagaggccatggagctgctgcagggtcagggcccagtccctgttgatgggccccatggctactacccagggagcccagaggagacaggagcccagcacgtccagctggcagagcggttttccgacgcggcgctggtctcgatgtctgtgcgggagctaaaccggcagctgcggggctgcgggcgcgacgaggcgctgcggctgaagcagaggcgccgcacgctgaagaaccgcggctacgcgcaggcctgtcgctccaagcggctgcagcagcggcgcgggctggaggccgagcgcgcccgcctggccgcccagctggacgcgctgcgggccgaggtggcccgcctggcccgggagcgcgatctctacaaggctcgctgtgaccggctaacctcgagcggccccgggtccggggacccctcccacctcttcctctagtaatgaactagtccgtaacttgaaagtatttcgatttcttggctttatatatcttgtggaaaggacgagaataaattgatatgcaggcgtgg

SEQ ID NO: 1265 - DNA, 2012 bp, Homo sapiens
  source 1..2012: mol_type = genomic DNA
accgccaccatggcccatttgatgatgttcagggatgtggctgtagatttctctcaggaggagtgggagtgcctggacctggaacagagggatttatatagagatgtgatgttggagaactacagcaacatggtctcactgggtttttgcatttatcagccagaagcgttctctttattggagaaagggaaagagccctggaagattttgagggatgagacaagaggaccttgcccagacatgcagtcgaggtgtcagaccaagaagttattaccaaaaaatggcatttttgagagagaaatagcccaattggaaataatgagaatttgtaaaaaccacagccttgactgtttatgttttagaggtgactgggaaggcaacactcagtttcaaacacttcaagataatcaagaggaatgcttcaagcaggtgatacgcacctgtgaaaaaaggcccacttttaaccagcatacagtgtttaatctacaccagagacttaatacaggagacaaactgaatgaatttaaagaactggggaaagcctttatttctggttcagatcatactcaacatcagttaattcacacaagtgagaaattctgtggagataaagaatgtgggaatacctttcttcctgattcagaagttattcaatatcagacagttcacactgttaagaaaacatatgaatgtaaagaatgtgggaagtcttttagtttacgttcgagtcttactggtcataagagaattcataccggtgagaaaccttttaaatgtaaggattgtgggaaagcctttagatttcattcacaacttagtgtccataagcgaattcatactggtgagaaatcttatgaatgtaaggaatgtgggaaggcctttagttgtggctcagatcttactcgacatcagagaattcatactggtgaaaaaccctatgaatgtaatgaatgtagaaaggcctttagtcagcgatcacatcttattaaacatcagagaattcacactggtgaaaaaccttatgaatgtaaggagtgtgggaaagcttttactcgtggatcacacctaactcagcatcagagaattcatactggtgagaaatctcatgagtgtaaggaatgtggaaaagcctttattcgtggttcaaatcttgctcaacatcagaatgttcatgttggtaggaaaccttataaatgtgagaaatgtgggaaagcctatatttggagctcacaccttgctcgacatcagcgaattcatactggcaggaaaccttatgaatgtaagcaatgcgggaagacttttacttgggcttcgtatcttgctcaacatgagaaaattcacaatgagaggaaatcctatgaatgtaaggaatgtggaaagacctttcttcatggctcagagtttaatcgacatcagaaaattcatactggtgagagaaactatgaatgtaaggaatgtggaaagaccttttttcgtggttcagaacttaatcgacaccagaaaattcatactggaaagaggccatatgaatgtgaagaatgtggaaaagcctttctctggggttcacaacttactcgacatcagagaatgcatactggtgaggaaccttacgtatgtaaagaatgtgggaaatcttttatctggggttcacagcttacacgacataagaaaattcatactgatgcagaaccttatggatgcaagaaaagtagccacatctttagtcaccattcatattttactgaacaaaaaattcataatagtgcaaatctctgtgaatggacagactatgggaacacctttagtcatgagtcaaactttgctcaacaccagaatatttacacttttgagaaatcctatgaatttaaagattttgagaaagcattttcttcaagctctcacttcatttcactcttgtagtaatgaactagtccgtaacttgaaagtatttcgatttcttggctttatatatcttgtggaaaggacgacttgtcccgacgtaaacgacgggc

SEQ ID NO: 1266 - DNA, 2000 bp, Homo sapiens
  source 1..2000: mol_type = genomic DNA
accgccaccatggcagcggcggcgctgcgggaccccgcgcagggctgcgtgacctttgaggacgtgaccatttacttctcccaggaggagtgggtgctcctcgatgaggctcagagactcctgtactgcgatgtgatgctggaaaactttgcacttatagcctcgctgggacttatatctttcaggtcccacatcgtttcccagttggagatggggaaagagccctgggtgcctgacagtgtggatatgacatcagccatggccagaggggcttatggcaggcctggctctgatttttgccatggaacagagggcaaggacttaccttctgagcataacgtttctgtagaaggagtggcacaggacaggagtcccgaggcaactctgtgcccccagaagacctgcccctgtgacatatgtggcctacgtttgaaagacattttgcatttggctgaacaccagacaacacatcccaggcagaaaccatttgtgtgtgaggcatatgtgaaaggctctgagttcagtgcaaaccttccccggaaacaggtgcagcagaacgtacacaaccctatcagaacggaggagggccaggcttcccctgtaaagacctgcagagaccacacatcagatcagctttccacctgcagggagggtgggaaggactttgtggccacagcagggtttctgcagtgtgaggtcactcccagcgatggggagccgcacgaggccaccgaaggtgtggtggattttcacattgcactaaggcataacaagtgctgtgaatctggggatgccttcaataacaaatccactcttgttcagcaccagagaatccacagcagagaaaggccttatgaatgcagcaaatgtggaatcttcttcacttacgccgctgacctcactcaacaccagaaagttcacaatagaggaaaaccgtatgagtgctgtgaatgtggaaaattcttcagccagcactccagccttgttaaacatcgcagggttcacaccggtgaaagccctcacgtgtgtggtgactgtgggaaattcttcagccgaagctccaacctcattcagcataagagggttcacactggtgaaaagccatatgagtgcagcgactgtgggaagttcttcagccagcgttccaacctcattcatcataagagggttcatacgggcagaagtgcccatgagtgcagtgaatgtgggaaatctttcaactgcaactccagcctaattaaacattggagagttcacactggagaaagaccttacaagtgtaacgaatgtgggaaattcttcagccacattgccagcctcattcaacatcagatagttcacactggcgagcggcctcacgggtgtggtgagtgtgggaaagccttcagccgaagctctgacctcatgaaacatcagcgagttcacactggtgagcggccttatgaatgcaatgaatgtgggaagttatttagccagagctccagcctcaatagccatcggagacttcacactggtgaacggccttaccagtgcagtgaatgtgggaaattctttaaccaaagctccagcctcaataaccaccggagacttcacaccggcgagcggccttatgagtgcagcgaatgtgggaaaaccttcaggcagaggtccaatctgaggcagcacctgaaagttcacaaaccagacaggccttacgaatgcagcgaatgtgggaaagccttcaaccaaaggcctaccctcattcggcatcagaagattcacatcagagaaaggagcatggagaatgtgctccttccctgttcacagcacacaccagagataagctctgagaacagaccttatcagggcgctgtcaactacaagttgaaacttgttcatccaagtacccaccctggggaggttccctagtaatgaactagtccgtaacttgaaagtatttcgatttcttggctttatatatcttgtggaaaggacgagacgatctaatctaaccaagtcag

SEQ ID NO: 1267 - DNA, 1322 bp, Homo sapiens
  source 1..1322: mol_type = genomic DNA
accgccaccatgatcgaataccagatacctgtgtcattcaaagatgtggttgtgggcttcacccaagaggagtggcaccggctgagtcctgctcagagggccctgtaccgggatgtgatgctggaaacctatagcaacctcgtctcagtgggttatgaaggcaccaaaccagatgtgatcctcagactggagcaggaagaagcaccatggattggtgaggcagcatgcccgggctgccactgttgggaagacatctggcgagttaatatccagaggaaaagacggcaagacatgcttttgaggccaggcgcagccataagcaagaaaacattgcccaaggagaaaagctgtgaatataataagtttgggaaaatatcacttctgagcactgatcttttttcttcaatccagagccctagtaactggaacccttgtggaaagaatttgaaccataatttagacttgattggttttaagagaaactgtgcaaaaaagcaagatgagtgttatgcttatgggaaattgcttcagcgtataaatcatggtagacgacctaatggagaaaagccccggggttgcagtcactgtgagaaagctttcacccagaacccggcacttatgtataaaccagcagtaagtgattctctcttgtacaaacggaagagggttccacctacagaaaaaccccacgtctgtagtgagtgtgggaaagccttctgctacaagtctgaattcattaggcatcagagaagtcacactggggagaagccttatggctgcactgactgtgggaaagccttttcacataagtcaaccctcatcaaacaccagagaattcacactggggtaagaccctttgaatgttttttttgtgggaaagcctttacccagaagtcacaccgcacagaacatcagagaacacacacaggagagagaccctttgtctgcagtgaatgcgggaaatcgtttggtgagaagtcatacctcaatgtacatcgaaaaatgcacacaggagaaagaccgtatcgttgcagagaatgtggaaaatccttcagccagaagtcatgcctcaataaacattggagaactcacacaggagagaagccctatgggtgcaatgaatgtgggaaagctttctaccagaagccaaacctcagcagacatcagaaaattcatgctcggaagaatgcctacaggaatgaaaacttaataattgtgggaaatacttagtaatgaactagtccgtaacttgaaagtatttcgatttcttggctttatatatcttgtggaaaggacgaggctgatcttctgccacacgggaa

SEQ ID NO: 1268 - DNA, 1820 bp, Homo sapiens
  source 1..1820: mol_type = genomic DNA
accgccaccatgccaggaccccttggaagcctagaaatgggagtgttgacatttagggatgtggccttagaattctctctggaggagtggcaatgcctggacaccgcacagcagaatttatataggaatgtgatgttagagaactacagaaacctggtctttgtgggtattgctgcctctaagccagacctgatcacctgtctggagcaaggaaaagaaccttggaatgtgaagagacatgagatggtaactgaacccccagttgtatattcttattttgcccaagacctttggccaaagcagggcaaaaaaaattatttccaaaaagtgatactgagaacatataaaaaatgtggacgtgaaaatttacagttaagaaaatactgtaaaagcatggatgagtgtaaggtgcacaaagaatgttacaatggacttaaccagtgtttgacaactacccagaacaaaatatttcaatatgacaaatatgtgaaagtctttcataaattttcaaattcaaacagacataagataggacatactggaaagaaatctttcaagtgtaaagaatgtgaaaagtcattttgcatgctttcacacttagctcaacataaaagaattcatagtggagagaaaccctacaaatgtaaagaatgtgggaaagcctataatgaggcctcaaacctttctacacataaaagaattcatactggaaagaaaccctacaaatgcgaagagtgtggaaaagcctttaaccggctctcacaccttactacacataagataattcatactggaaagaaaccctacaaatgtgaggagtgtggcaaagcttttaaccaatctgcaaaccttactacacataagagaattcatactggagagaaaccctacaaatgtgaagaatgtggcagagcttttagccagtcctcaacccttactgcacataagataattcatgctggagagaaaccttacaaatgtgaagaatgtggcaaagcttttagccagtcctcaacccttactacacataagataattcatactggagagaaattctacaaatgtgaagaatgtggtaaggcctttagccggttatcccaccttactacacataagagaattcattctggagagaaaccctacaagtgtgaagaatgtggcaaagcttttaaacaatcctcaacccttactacacataagagaattcatgctggagagaaattctacaaatgtgaagtatgtagcaaagcctttagccggttctcacaccttactacacataagagaattcatactggagagaagccctacaaatgtgaagaatgtggcaaagcttttaacctatcatcacaacttactacacataagataattcatactggagagaaaccctacaaatgtgaagaatgtggcaaagcttttaaccagtcctcaactctttctaaacataaggtaattcatactggagagaagccctacaaatgtgaagaatgtggcaaagcttttaaccagtcctcacaccttactacacataagatgattcatactggagagaaaccctacaagtgtgaagaatgcggcaaagcctttaacaactcctctattcttaacagacataagatgattcatactggagagaaactctacaaacctgaaagttgtaacaatgcttgtgacaacattgcaaagatttccaaatataaaagaaattgtgctggtgagaaatagtaatgaactagtccgtaacttgaaagtatttcgatttcttggctttatatatcttgtggaaaggacgaggcgtagaggttgcgttctctgct

SEQ ID NO: 1269 - DNA, 2033 bp, Homo sapiens
  source 1..2033: mol_type = genomic DNA
accgccaccatggcctcagtggctttagaggatgtggctgtgaacttcacccgagaagagtgggctttgctgggtccttgtcagaagaatctctacaaagatgtgatgcaggaaaccatcaggaacctggattgtgtaggaatgaaatggaaagaccagaacattgaagatcaatatagatatcccaggaaaaatctaagatgtcgtatgttagagagatttgttgaaagtaaagatggaactcaatgtggagaaacatctagccagattcaagatagtattgtgaccaagaacactcttcctggagtaggtccatatgaaagccgtatgagtggagaagtcatcatgggtcattcatcccttaattgttacatcagagttggtgctgggcacaaaccatatgagtatcatgaatgtggagagaagccagatacgcataaacaacgtgggaaagccttcagttaccacaactcacttcaaacacatgagaggcttcacactggaaagaaaccatataattgtaaagaatgtgggaagtccttcagttctttgggaaaccttcaaagacacatggcagtgcagcgtggagatggaccttataaatgtaagttgtgtgggaaagcgtttttttggcccagtttattacatatgcatgagagaacgcacactggagagaaaccatatgaatgtaagcagtgttctaaagccttttctttttacagttcctatctaagacatgaaagaacacatactggggagaaactgtatgaatgtaaacagtgttctaaagccttccctgattacagttcttgtctaagacatgaaagaactcacactggaaagaaaccctatacatgtaaacaatgtgggaaagccttcagtgcttccacttcccttcgaagacacgaaacaactcacactgatgagaaaccctatgcatgtcagcaatgtgggaaagcgtttcatcatctgggaagctttcaaagacacatggtaatgcacacgagagatggacctcataagtgtaagatatgtggaaaaggctttgattgtcctagttcactgaaaagtcatgaaagaactcacactggagagaaactctatgaatgcaagcagtgtgggaaagcgttatctcatagctcaagctttcgaagacacatgacaatgcacactggagatggacctcacaaatgcaagatatgtgggaaagcctttgtttatcccagtgtatttcaaaggcatgaaaagactcacactgcagagaaaccctataaatgtaaacaatgtggcaaagcctaccgtatttccagttctcttcgaaggcatgaaacaactcatactggagagaaaccctataaatgcaaatgtgggaaagcctttattgatttctattcctttcaaaatcacaaaacaactcatgctggagagaagccatatgagtgtaaggaatgtgggaaagcattcagttgtttccaatacctttctcaacatagaaggactcacacaggagagaaaccttatgagtgtaacacatgtaagaaagccttcagtcattttggtaacttaaaagtacatgaaagaattcactctggagagaagccgtatgaatgtaaggaatgtgggaaagcattctcttggctcacttgctttctacgacatgaaagaattcacatgagagagaaaccctatgagtgtcaacaatgtggtaaagccttcactcattcccgttttcttcaaggacatgaaaaaactcatactggagagaacccgtatgaatgtaaggaatgtgggaaagcatttgcttctctcagttccttgcatagacataaaaagactcactggaaaaaaactcacactggagagaacccgtatggatgtaaggaatgtgggaaagcatttgcttctctcagttccttgcatagacataaaaagactcactagtaatgaactagtccgtaacttgaaagtatttcgatttcttggctttatatatcttgtggaaaggacgacatctcctgaccggatgagttcaa

SEQ ID NO: 1270 - DNA, 1937 bp, Homo sapiens
  source 1..1937: mol_type = genomic DNA
accgccaccatgcaggaaaccatcaggaacctggattgtgtaggaatgaaatggaaagaccagaacattgaagatcaatatagatatcccaggaaaaatctaagatgtcgtatgttagagagatttgttgaaagtaaagatggaactcaatgtggagaaacatctagccagattcaagatagtattgtgaccaagaacactcttcctggagtaggtccatatgaaagccgtatgagtggagaagtcatcatgggtcattcatcccttaattgttacatcagagttggtgctgggcacaaaccatatgagtatcatgaatgtggagagaagccagatacgcataaacaacgtgggaaagccttcagttaccacaactcacttcaaacacatgagaggcttcacactggaaagaaaccatataattgtaaagaatgtgggaagtccttcagttctttgggaaaccttcaaagacacatggcagtgcagcgtggagatggaccttataaatgtaagttgtgtgggaaagcgtttttttggcccagtttattacatatgcatgagagaacgcacactggagagaaaccatatgaatgtaagcagtgttctaaagccttttctttttacagttcctatctaagacatgaaagaacacatactggggagaaactgtatgaatgtaaacagtgttctaaagccttccctgattacagttcttgtctaagacatgaaagaactcacactggaaagaaaccctatacatgtaaacaatgtgggaaagccttcagtgcttccacttcccttcgaagacacgaaacaactcacactgatgagaaaccctatgcatgtcagcaatgtgggaaagcgtttcatcatctgggaagctttcaaagacacatggtaatgcacacgagagatggacctcataagtgtaagatatgtggaaaaggctttgattgtcctagttcactgaaaagtcatgaaagaactcacactggagagaaactctatgaatgcaagcagtgtgggaaagcgttatctcatagctcaagctttcgaagacacatgacaatgcacactggagatggacctcacaaatgcaagatatgtgggaaagcctttgtttatcccagtgtatttcaaaggcatgaaaagactcacactgcagagaaaccctataaatgtaaacaatgtggcaaagcctaccgtatttccagttctcttcgaaggcatgaaacaactcatactggagagaaaccctataaatgcaaatgtgggaaagcctttattgatttctattcctttcaaaatcacaaaacaactcatgctggagagaagccatatgagtgtaaggaatgtgggaaagcattcagttgtttccaatacctttctcaacatagaaggactcacacaggagagaaaccttatgagtgtaacacatgtaagaaagccttcagtcattttggtaacttaaaagtacatgaaagaattcactctggagagaagccgtatgaatgtaaggaatgtgggaaagcattctcttggctcacttgctttctacgacatgaaagaattcacatgagagagaaaccctatgagtgtcaacaatgtggtaaagccttcactcattcccgttttcttcaaggacatgaaaaaactcatactggagagaacccgtatgaatgtaaggaatgtgggaaagcatttgcttctctcagttccttgcatagacataaaaagactcactggaaaaaaactcacactggagagaacccgtatggatgtaaggaatgtgggaaagcatttgcttctctcagttccttgcatagacataaaaagactcactagtaatgaactagtccgtaacttgaaagtatttcgatttcttggctttatatatcttgtggaaaggacgacccttcatgcggcgattattcttc

SEQ ID NO: 1271 - DNA, 1709 bp, Homo sapiens
  source 1..1709: mol_type = genomic DNA
accgccaccatgggcatcgtggagccgggttgcggagacatgctgacgggcaccgagccgatgccggggagcgacgagggccgggcgcctggcgccgacccgcagcaccgctacttctacccggagccgggcgcgcaggacgcggacgagcgtcgcgggggcggcagcctggggtctccctacccggggggcgccttggtgcccgccccgccgagccgcttccttggagcctacgcctacccgccgcgaccccaggcggccggcttccccggcgcgggcgagtccttcccgccgcccgcggacgccgagggctaccagccgggcgagggctacgccgccccggacccgcgcgccgggctctacccggggccgcgtgaggactacgcgctacccgcgggactggaggtgtcggggaaactgagggtcgcgctcaacaaccacctgttgtggtccaagtttaatcagcaccagacagagatgatcatcaccaagcagggacggcggatgttcccattcctgtcatttactgtggccgggctggagcccaccagccactacaggatgtttgtggacgtggtcttggtggaccagcaccactggcggtaccagagcggcaagtgggtgcagtgtggaaaggccgagggcagcatgccaggaaaccgcctgtacgtccacccggactcccccaacacaggagcgcactggatgcgccaggaagtttcatttgggaaactaaagctcacaaacaacaagggggcgtccaacaatgtgacccagatgattgtgctccagtccctccataagtaccagccccggctgcatatcgttgaggtgaacgacggagagccagaggcagcctgcaacgcttccaacacgcatatctttactttccaagaaacccagttcattgccgtgactgcctaccagaatgccgagattactcagctgaaaattgataataacccctttgccaaaggattccgggagaactttgagtccatgtacacatctgttgacaccagcatcccctccccgcctggacccaactgtcaattccttgggggagatcactactctcctctcctacccaaccagtatcctgttcccagccgcttctaccccgaccttcctggccaggcgaaggatgtggttccccaggcttactggctgggggccccccgggaccacagctatgaggctgagtttcgagcagtcagcatgaagcctgcattcttgccctctgcccctgggcccaccatgtcctactaccgaggccaggaggtcctggcacctggagctggctggcctgtggcaccccagtaccctcccaagatgggcccggccagctggttccgccctatgcggactctgcccatggaacccggccctggaggctcagagggacggggaccagaggaccagggtccccccttggtgtggactgagattgcccccatccggccggaatccagtgattcaggactgggcgaaggagactctaagaggaggcgcgtgtccccctatccttccagtggtgacagctcctcccctgctggggccccttctccttttgataaggaagctgaaggacagttttataactattttcccaactagtaatgaactagtccgtaacttgaaagtatttcgatttcttggctttatatatcttgtggaaaggacgacgggcatttaagcgctcagtggtt

SEQ ID NO: 1272 - DNA, 1445 bp, Homo sapiens
  source 1..1445: mol_type = genomic DNA
accgccaccatggagttcacggcgtcccccaagccccaactctcctctcgggccaacgccttctccattgccgcgctcatgtcgagcggcggctctaaggagaaggaggcgacggagaacacaatcaaacccctggagcaatttgtggagaagtcgtcctgtgcccagcccctgggtgagctgaccagcctggatgctcatggggagtttggtggaggcagtggcagcagcccgtcctcctcctctctgtgcactgagccactgatccccaccacccccatcatccccagtgaggaaatggccaaaattgcctgcagcctggagaccaaggagctttgggacaaattccatgagctgggcaccgagatgatcatcaccaagtcgggcaggaggatgtttccaaccatccgggtgtccttttcgggggtggatcctgaggccaagtacatagtcctgatggacatcgtccctgtggacaacaagaggtaccgctacgcctaccaccggtcctcctggctggtggctggcaaggccgacccgccgttgccagccaggctctatgtgcatccagattctccttttaccggtgagcaactactcaaacagatggtgtcttttgaaaaggtgaaactcaccaacaatgaactggatcaacatggccatataattttgaactcaatgcataagtaccagccaagggtgcacatcattaagaagaaagaccacacagcctcattgctcaacctgaagtctgaagaatttagaactttcatctttccagaaacagtttttacggcagtcactgcctaccagaatcaactgataacgaagctgaaaatagatagcaatccttttgccaaaggattccgggattcctccaggctcactgacattgagagggaaagtgtggagagcctgattcaaaagcattcctatgcacgctcacccatccgtacctacggaggagaagaagatgtcttgggggatgagagtcagacaaccccaaatcgagggtcagcctttacaacatctgataatttgtctctcagctcctgggtatcatcttcttccagttttcctgggtttcagcacccacagtccctgactgctcttggcaccagcacagcatccatagcaacacccattcctcaccccatccagggttctctgccaccatatagccgactgggaatgcctctgacaccatcggccattgccagctccatgcaagggagtggccccacattcccttcattccacatgccgcgataccatcactattttcagcaggggccctatgctgccattcaaggactacgccattcctctgctgtgatgacgccatttgtatagtaatgaactagtccgtaacttgaaagtatttcgatttcttggctttatatatcttgtggaaaggacgaggttgtgtgattgccaggacaatt

SEQ ID NO: 1273 - DNA, 1799 bp, Homo sapiens
  source 1..1799: mol_type = genomic DNA
accgccaccatggaggactcggactcggcggcaaagcagctgggcctggctgaggcggcggcggtggcggccgcggccgctgtggcggcggcggccgcggccgcggcaggaggcgaggcggaggagccggtgctgagcagggacgaggactcggaggaggacgcagactcggaggcggagcgggagacgccgcgggtcacggcagtggcggtgatggcggcggagcccgggcacatggacatgggcgccgaggccctgcccggccccgacgaggccgccgctgccgcagccttcgcagaggtgaccacagtgacagtggccaacgtgggggctgctgcagacaatgtcttcaccacgtctgtggcgaacgcggcatccatctcaggacatgttctgtctggtaggacggcccttcagatcggggacagcctgaacaccgaaaaagcgacactgattgtcgtccacacagatgggagcatcgtggagaccaccgggctgaaaggcccggcagctcccctcaccccaggtcctcagtctcctccaacccctctggctcccggccaagaaaaaggtggaactaaatacaactgggacccttctgtgtacgacagtgagctgcccgtacggtgccggaacatcagcggcactctgtacaagaacaggctcggctcaggcggccggggacggtgcatcaagcagggggagaactggtacagtcccaccgagtttgaggccatggcaggaagagccagcagtaaggactggaaaagaagcattcgctacgcgggccgacccttgcagtgcctcatccaggatgggatcttaaaccctcacgctgcctcttgcacctgtgctgcctgctgcgacgacatgaccttaagtggcccagtcaggctttttgtgccttacaaaaggcgcaagaaggagaatgaactgcccacaactcccgtgaagaaggactcccccaagaacatcacattgcttccagccaccgcggctaccaccttcaccgtgaccccctcgggacagatcacgacctcgggggcactgacctttgaccgagcgtccacggtagaggccactgctgtcatatcagagagtccggcccagggcgacgtcttcgcaggggccacagtccaagaggccagcgtgcagcccccatgcagggccagccaccctgagcctcactaccccggctatcaggacagctgccagatcgcaccgtttccagaagctgcgttgccaacgtcacatcccaaaatagtgttgacatccctgcctgcgctggcggtcccacccccgactcccaccaaagcggcacctcccgcgttggtcaatgggctggagctgtcagagccgcggagctggctgtacctagaagagatggtcaactccttgctcaacacagcgcagcagctgaagacgctgtttgagcaagccaagcatgccagcacctaccgagaagctgccacaaaccaggccaagatccacgctgacgcagagcggaaggagcagtcctgcgttaactgcggccgggaggctatgagcgagtgcaccggctgccacaaggtcaactactgctccaccttctgccaacgcaaggactggaaggatcaccagcacatatgcggccagtcagcagctgtcaccgtccaggcagacgaagtccacgtggctgaaagcgtgatggagaaggtgaccgtgtagtaatgaactagtccgtaacttgaaagtatttcgatttcttggctttatatatcttgtggaaaggacgacctgggcaattcaggagatccctg

SEQ ID NO: 1274 - DNA, 1922 bp, Homo sapiens
  source 1..1922: mol_type = genomic DNA
accgccaccatgtctacagcctctgccgcctcctcctcctcctcgtcttcggccggtgagatgatcgaagccccttcccaggtcctcaactttgaagagatcgactacaaggagatcgaggtggaagaggttgttggaagaggagcctttggagttgtttgcaaagctaagtggagagcaaaagatgttgctattaaacaaatagaaagtgaatctgagaggaaagcgtttattgtagagcttcggcagttatcccgtgtgaaccatcctaatattgtaaagctttatggagcctgcttgaatccagtgtgtcttgtgatggaatatgctgaagggggctctttatataatgtgctgcatggtgctgaaccattgccatattatactgctgcccacgcaatgagttggtgtttacagtgttcccaaggagtggcttatcttcacagcatgcaacccaaagcgctaattcacagggacctgaaaccaccaaacttactgctggttgcaggggggacagttctaaaaatttgtgattttggtacagcctgtgacattcagacacacatgaccaataacaaggggagtgctgcttggatggcacctgaagtttttgaaggtagtaattacagtgaaaaatgtgacgtcttcagctggggtattattctttgggaagtgataacgcgtcggaaaccctttgatgagattggtggcccagctttccgaatcatgtgggctgttcataatggtactcgaccaccactgataaaaaatttacctaagcccattgagagcctgatgactcgttgttggtctaaagatccttcccagcgcccttcaatggaggaaattgtgaaaataatgactcacttgatgcggtactttccaggagcagatgagccattacagtatccttgtcagtattcagatgaaggacagagcaactctgccaccagtacaggctcattcatggacattgcttctacaaatacgagtaacaaaagtgacactaatatggagcaagttcctgccacaaatgatactattaagcgcttagaatcaaaattgttgaaaaatcaggcaaagcaacagagtgaatctggacgtttaagcttgggagcctcccgtgggagcagtgtggagagcttgcccccaacctctgagggcaagaggatgagtgctgacatgtctgaaatagaagctaggatcgccgcaaccacagcctattccaagcctaaacggggccaccgtaaaactgcttcatttggcaacattctggatgtccctgagatcgtcatatcaggcaacggacagccaagacgtagatccatccaagacttgactgtaactggaacagaacctggtcaggtgagcagtaggtcatccagtcccagtgtcagaatgattactacctcaggaccaacctcagaaaagccaactcgaagtcatccatggacccctgatgattccacagataccaatggatcagataactccatcccaatggcttatcttacactggatcaccaactacagcctctagcaccgtgcccaaactccaaagaatctatggcagtgtttgaacagcattgtaaaatggcacaagaatatatgaaagttcaaacagaaattgcattgttattacagagaaagcaagaactagttgcagaactggaccaggatgaaaaggaccagcaaaatacatctcgcctggtacaggaacataaaaagcttttagatgaaaacaaaagcctttctacttactaccagcaatgcaaaaaacaactagaggtcatcagaagtcagcagcagaaacgacaaggcacttcatagtaatgaactagtccgtaacttgaaagtatttcgatttcttggctttatatatcttgtggaaaggacgatcgaggcctgatgattcccatgga

SEQ ID NO: 1275 - DNA, 1658 bp, Homo sapiens
  source 1..1658: mol_type = genomic DNA
accgccaccatgtctacagcctctgccgcctcctcctcctcctcgtcttcggccggtgagatgatcgaagccccttcccaggtcctcaactttgaagagatcgactacaaggagatcgaggtggaagaggttgttggaagaggagcctttggagttgtttgcaaagctaagtggagagcaaaagatgttgctattaaacaaatagaaagtgaatctgagaggaaagcgtttattgtagagcttcggcagttatcccgtgtgaaccatcctaatattgtaaagctttatggagcctgcttgaatccagtgtgtcttgtgatggaatatgctgaagggggctctttatataatgtgctgcatggtgctgaaccattgccatattatactgctgcccacgcaatgagttggtgtttacagtgttcccaaggagtggcttatcttcacagcatgcaacccaaagcgctaattcacagggacctgaaaccaccaaacttactgctggttgcaggggggacagttctaaaaatttgtgattttggtacagcctgtgacattcagacacacatgaccaataacaaggggagtgctgcttggatggcacctgaagtttttgaaggtagtaattacagtgaaaaatgtgacgtcttcagctggggtattattctttgggaagtgataacgcgtcggaaaccctttgatgagattggtggcccagctttccgaatcatgtgggctgttcataatggtactcgaccaccactgataaaaaatttacctaagcccattgagagcctgatgactcgttgttggtctaaagatccttcccagcgcccttcaatggaggaaattgtgaaaataatgactcacttgatgcggtactttccaggagcagatgagccattacagtatccttgtcagtattcagatgaaggacagagcaactctgccaccagtacaggctcattcatggacattgcttctacaaatacgagtaacaaaagtgacactaatatggagcaagttcctgccacaaatgatactattaagcgcttagaatcaaaattgttgaaaaatcaggcaaagcaacagagtgaatctggacgtttaagcttgggagcctcccgtgggagcagtgtggagagcttgcccccaacctctgagggcaagaggatgagtgctgacatgtctgaaatagaagctaggatcgccgcaaccacagcctattccaagcctaaacggggccaccgtaaaactgcttcatttggcaacattctggatgtccctgagatcgtcatatcaggcaacggacagccaagacgtagatccatccaagacttgactgtaactggaacagaacctggtcaggtgagcagtaggtcatccagtcccagtgtcagaatgattactacctcaggaccaacctcagaaaagccaactcgaagtcatccatggacccctgatgattccacagataccaatggatcagataactccatcccaatggcttatcttacactggatcaccaactacaggcaagaactagttgcagaactggaccaggatagtaatgaactagtccgtaacttgaaagtatttcgatttcttggctttatatatcttgtggaaaggacgaccggtatttagagcgacgattgtc

SEQ ID NO: 1276 - DNA, 1841 bp, Homo sapiens
  source 1..1841: mol_type = genomic DNA
accgccaccatgtctacagcctctgccgcctcctcctcctcctcgtcttcggccggtgagatgatcgaagccccttcccaggtcctcaactttgaagagatcgactacaaggagatcgaggtggaagaggttgttggaagaggagcctttggagttgtttgcaaagctaagtggagagcaaaagatgttgctattaaacaaatagaaagtgaatctgagaggaaagcgtttattgtagagcttcggcagttatcccgtgtgaaccatcctaatattgtaaagctttatggagcctgcttgaatccagtgtgtcttgtgatggaatatgctgaagggggctctttatataatgtgctgcatggtgctgaaccattgccatattatactgctgcccacgcaatgagttggtgtttacagtgttcccaaggagtggcttatcttcacagcatgcaacccaaagcgctaattcacagggacctgaaaccaccaaacttactgctggttgcaggggggacagttctaaaaatttgtgattttggtacagcctgtgacattcagacacacatgaccaataacaaggggagtgctgcttggatggcacctgaagtttttgaaggtagtaattacagtgaaaaatgtgacgtcttcagctggggtattattctttgggaagtgataacgcgtcggaaaccctttgatgagattggtggcccagctttccgaatcatgtgggctgttcataatggtactcgaccaccactgataaaaaatttacctaagcccattgagagcctgatgactcgttgttggtctaaagatccttcccagcgcccttcaatggaggaaattgtgaaaataatgactcacttgatgcggtactttccaggagcagatgagccattacagtatccttgtcagtattcagatgaaggacagagcaactctgccaccagtacaggctcattcatggacattgcttctacaaatacgagtaacaaaagtgacactaatatggagcaagttcctgccacaaatgatactattaagcgcttagaatcaaaattgttgaaaaatcaggcaaagcaacagagtgaatctggacgtttaagcttgggagcctcccgtgggagcagtgtggagagcttgcccccaacctctgagggcaagaggatgagtgctgacatgtctgaaatagaagctaggatcgccgcaaccacaggcaacggacagccaagacgtagatccatccaagacttgactgtaactggaacagaacctggtcaggtgagcagtaggtcatccagtcccagtgtcagaatgattactacctcaggaccaacctcagaaaagccaactcgaagtcatccatggacccctgatgattccacagataccaatggatcagataactccatcccaatggcttatcttacactggatcaccaactacagcctctagcaccgtgcccaaactccaaagaatctatggcagtgtttgaacagcattgtaaaatggcacaagaatatatgaaagttcaaacagaaattgcattgttattacagagaaagcaagaactagttgcagaactggaccaggatgaaaaggaccagcaaaatacatctcgcctggtacaggaacataaaaagcttttagatgaaaacaaaagcctttctacttactaccagcaatgcaaaaaacaactagaggtcatcagaagtcagcagcagaaacgacaaggcacttcatagtaatgaactagtccgtaacttgaaagtatttcgatttcttggctttatatatcttgtggaaaggacgactacgtgagccttaatgtacgtgg

SEQ ID NO: 1277 - DNA, 1880 bp, Homo sapiens
  source 1..1880: mol_type = genomic DNA
accgccaccatgtgcatgtatttgttctttctggacttctcgattgtcgggagtgggctgaggagtggcgtgtgggtctccggaagctcgtcgcaggccatctgtgtgactccggtgcgagtggagtcatctgaggccactgctatttcccaagagaagagccaggaggaagaaagaatggctgttgggcttcttaaagccatgtaccaggagttggtgaccttcagagatgtggctgtagacttctcccaagaggaatgggattgtctggattcttctcaaagacatctgtacagtaatgtgatgctagagaactacaggatcttggtatcactgggactttgcttttccaaaccaagtgtgatattattgttggaacaaggaaaagcaccctggatggtgaagagagagctgacaaaaggcttgtgctcaggctgggagcctatatgtgagactgaagaattaaccccaaagcaggatttttatgaagaacatcaatcccagaagataatagaaacacttacaagctataaccttgaatactccagtttgagagaagagtggaaatgtgagggctattttgaaaggcaaccaggtaatcagaaggcgtgtttcaaggaagagataatcactcatgaagaacccctttttgatgagagagaacaagaatataaatcttggggaagttttcatcagaacccactgctttgtacacaaaagataatccccaaagaggagaaagtacataaacatgacacacaaaagagaagctttaaaaaaaatttaatggctattaagcccaagagtgtctgtgcagagaagaaacttttgaaatgtaatgactgtgaaaaagtcttcagccagagttcatcccttactcttcatcaaagaattcatactggagagaaaccctataaatgtatagagtgtggaaaagccttcagccagagatcaaatcttgttcaacatcagaggattcatactggagaaaaaccctatgaatgtaaggaatgtaggaaagccttcagtcagaatgcacacctagttcaacatctgcgagttcatactggagaaaaaccttacgaatgtaaggtatgtcgaaaagccttcagccagtttgcctaccttgctcaacatcagagagttcacacgggagagaaaccctatgaatgtatcgaatgtgggaaagcatttagcaacagatcatccattgctcaacaccagagagttcatacaggagagaaaccctatgaatgtaatgtctgtgggaaagcatttagccttcgtgcataccttactgtacatcagagaatacatactggagagagaccctatgaatgtaaggaatgtgggaaggcctttagccagaattcacaccttgctcaacatcagagaattcatactggagaaaaaccttataagtgtcaggaatgtaggaaagcattcagccagattgcctaccttgctcagcatcaaagagttcatactggagagaaaccctatgaatgtattgaatgtgggaaggcttttagcaatgactcgtcccttactcaacatcagcgagttcatactggagagaaaccttatgaatgtactgtttgtggaaaggcttttagttactgtggatcccttgcccaacatcagagaattcatactggagagagaccctatgaatgtaaggaatgcaaaaaaaccttcaggcagcatgcacaccttgctcatcaccagagaattcacattggggagtcactgtcaccacccaacccagtcaatcaccaagtcctatagtaatgaactagtccgtaacttgaaagtatttcgatttcttggctttatatatcttgtggaaaggacgacgtcaaccctatatacactatcta

SEQ ID NO: 1278 - DNA, 1712 bp, Homo sapiens
  source 1..1712: mol_type = genomic DNA
accgccaccatggctgttgggcttcttaaagccatgtaccaggagttggtgaccttcagagatgtggctgtagacttctcccaagaggaatgggattgtctggattcttctcaaagacatctgtacagtaatgtgatgctagagaactacaggatcttggtatcactgggactttgcttttccaaaccaagtgtgatattattgttggaacaaggaaaagcaccctggatggtgaagagagagctgacaaaaggcttgtgctcaggctgggagcctatatgtgagactgaagaattaaccccaaagcaggatttttatgaagaacatcaatcccagaagataatagaaacacttacaagctataaccttgaatactccagtttgagagaagagtggaaatgtgagggctattttgaaaggcaaccaggtaatcagaaggcgtgtttcaaggaagagataatcactcatgaagaacccctttttgatgagagagaacaagaatataaatcttggggaagttttcatcagaacccactgctttgtacacaaaagataatccccaaagaggagaaagtacataaacatgacacacaaaagagaagctttaaaaaaaatttaatggctattaagcccaagagtgtctgtgcagagaagaaacttttgaaatgtaatgactgtgaaaaagtcttcagccagagttcatcccttactcttcatcaaagaattcatactggagagaaaccctataaatgtatagagtgtggaaaagccttcagccagagatcaaatcttgttcaacatcagaggattcatactggagaaaaaccctatgaatgtaaggaatgtaggaaagccttcagtcagaatgcacacctagttcaacatctgcgagttcatactggagaaaaaccttacgaatgtaaggtatgtcgaaaagccttcagccagtttgcctaccttgctcaacatcagagagttcacacgggagagaaaccctatgaatgtatcgaatgtgggaaagcatttagcaacagatcatccattgctcaacaccagagagttcatacaggagagaaaccctatgaatgtaatgtctgtgggaaagcatttagccttcgtgcataccttactgtacatcagagaatacatactggagagagaccctatgaatgtaaggaatgtgggaaggcctttagccagaattcacaccttgctcaacatcagagaattcatactggagaaaaaccttataagtgtcaggaatgtaggaaagcattcagccagattgcctaccttgctcagcatcaaagagttcatactggagagaaaccctatgaatgtattgaatgtgggaaggcttttagcaatgactcgtcccttactcaacatcagcgagttcatactggagagaaaccttatgaatgtactgtttgtggaaaggcttttagttactgtggatcccttgcccaacatcagagaattcatactggagagagaccctatgaatgtaaggaatgcaaaaaaaccttcaggcagcatgcacaccttgctcatcaccagagaattcacattggggagtcactgtcaccacccaacccagtcaatcaccaagtcctatagtaatgaactagtccgtaacttgaaagtatttcgatttcttggctttatatatcttgtggaaaggacgagtacttcccgggcgtaaacctgtc

SEQ ID NO: 1279 - DNA, 1931 bp, Homo sapiens
  source 1..1931: mol_type = genomic DNA
accgccaccatgccccacttgttggtgactttcagggatgtggccattgacttctctcaggaggaatgggaatgcctggaccctgctcagagggacttgtacagggatgtgatgttggagaactacagcaacctgatctcattggacttggaatccagttgtgtgaccaaaaagttatctccagaaaaggaaatttatgaaatggaatcactccagtgggagaatatggggaaacgtatcaaccatcaccttcaatacaatggtcttggagacaatatggagtgcaaaggcaacttagagggtcaagaagcaagtcaggaagggctttacatgtgtgtcaaaattacctgtgaagaaaaggccactgaaagtcattcaacctcttctacttttcatcggataattcctaccaaggaaaaattgtacaaatgtaaggaatgcagacaaggtttcagctacctgtcatgccttattcaacatgaggaaaatcataatatagaaaaatgctctgaagttaagaaacacaggaatacctttagcaaaaagccaagctatattcaacatcagagaattcagactggtgagaaaccttatgagtgtatggaatgtggaaaggcctttggtcgtacttctgatctcattcaacatcagaaaattcatactaatgaaaaaccttatcagtgtaacgcatgtgggaaagcttttattcgtggttcacagctcactgaacatcagagagttcatacaggagagaaaccatatgaatgtaagaaatgtggaaaagcctttagttattgttcacaatatactcttcatcagagaattcatagtggtgaaaaaccctatgaatgtaaggattgtgggaaggcctttattcttggctctcaacttacttaccatcagagaattcatagtggtgagaaaccttatgagtgtaaggaatgtggaaaggcctttattcttggttcacaccttacataccatcagagagttcatactggtgaaaagccttacatatgtaaagaatgtgggaaagcctttttatgtgcctcccaactgaatgaacatcagagaattcatacaggagagaaaccctatgaatgtaaagaatgcgggaagaccttttttcgtggctcacaacttacttaccacctgagagttcattcaggtgagagaccttataaatgcaaagaatgtgggaaagcctttatttctaattctaatcttattcaacatcaaagaattcataccggagagaagccctacaaatgtaaggaatgtggaaaggcctttatttgtggcaaacaacttagtgaacatcagagaattcatacaggtgagaaaccctttgaatgtaaggaatgtggaaaggcctttattcgtgttgcatatcttactcaacatgagaaaattcatggtgagaaacattatgaatgtaaggaatgtgggaagacctttgtacgtgctacacaacttacatatcatcaaagaattcatacaggtgaaaagccctacaaatgtaaggaatgtgacaaggcctttatttatggctcacaacttagtgaacatcagagaattcacagaggtgaaaaaccttatgaatgtaaacagtgtgggaaggcttttattcgtggctcacaccttactgaacatctgagaactcatactggagagaaaccctatgaatgtaaggaatgtgggagggcctttagtcgtggctcagaacttactctgcatcaaaggatccatactggtgagaaaccctatacatgtgtccagtgtggtaaagactttagatgtccttcacaacttactcaacatacaaggcttcataattagtaatgaactagtccgtaacttgaaagtatttcgatttcttggctttatatatcttgtggaaaggacgaggcagtgatgccgtcgcgtacgca

SEQ ID NO: 1280 - DNA, 2099 bp, Homo sapiens
  source 1..2099: mol_type = genomic DNA
accgccaccatgtttccagtattggaaccccaccaagtaggactgatcaggtcttacaattctaaaaccatgacctgttttcaggaattagtgacattcagggatgtggccatagacttctctcggcaggagtgggaatacctggaccctaatcagagggacttatacagggatgtgatgttggagaactatagaaacctggtatcactgggaggacattccatttctaaaccagttgtggttgatttactggagcgaggaaaagagccctggatgattttgagggaagaaacacagttcacagatttggatttacagtgtgagataatcagctacatagaagtacccacttatgaaacagatatatcctctacacaacttcagagcatatataagagagagaaactctatgaatgtaagaaatgtcagaagaaatttagtagtggttatcaacttattctacatcacaggtttcatgtcattgagagaccctatgaatgcaaagagtgtgggaagaactttcgtagtggctatcaacttactctacatcaaagatttcatactggtgagaaaccctatgaatgtacagaatgtgggaagaactttagaagtggttatcagctgactgtgcatcagagatttcatactggtgagaaaacctatgaatgtaggcagtgtgggaaggcctttatatatgcctcacacattgttcaacatgagagaattcacactggtgggaagccgtatgaatgtcaggagtgtgggagggcctttagtcaaggtggacatcttagaattcatcagagagttcatactggcgaaaaaccatataaatgtaaggaatgtgggaagacttttagtaggcgctcaaatcttgttgaacatgggcagtttcatactgatgagaagccatacatatgtgagaaatgtggaaaggcctttagaagaggtcaccagcttactgtacatcagagagttcacactggtaaaaagccatatgagtgtaaagaatgtgggaagggctataccactgcctcatactttcttctacatcagagaattcataaaggtggaaaaccctatgaatgtaaggagtgtaagaaaacctttactttgtatagaaatcttactcggcatcagaatattcatactggtgagaaactttttgaatgcaagcaatgtgggaagacctatactactggttcaaaactctttcaacatcagaaaactcatactggcgagaaaccctatgaatgcaaggaatgcggaaaggcctttagcttgtatggctaccttaaacaacatcagaaaattcatactggcatgaaacactttgaatgtaaggagtgtaaaaaaacctttactttgtatagaaatcttactcgacatcagaatattcacactggtaagaaactttttgaatgtcaggaatgtgggaaggcctatagtactggctcaaaccttattcaacatcggaaaactcatactggtgagaaaccctataaatgtaaggaatgtggcaagacctttagcttgcatggatatcttaatcaacatcagaaaattcatactggtatgaaaccctatgaatgtaaggtatgtagaaaaacctttactttctatagaaatcttactctacatcaaagtattcatactgatgagaaaccttttgaatgtaaggaatgtgggaagacctttagacgtagttcacaccttactgcacatcagagcattcatgctgataaaaaaccctatgaatgtaaagaatgtggaaaggcctttaaaatgtatggctaccttacccaacatcagaaaattcatactggtggaaaaccttatgaatgtaaagaatgtgggaaggccttcagtcgtgcttcaaaccttgttcaacatgagagaattcatactggtgagaaaccctatgtgtgtaagcagtgtgggaaaaccttcagatatggttcagcccttaaagcccatcagagaattcataggagcataaaagtgtagtaatgaactagtccgtaacttgaaagtatttcgatttcttggctttatatatcttgtggaaaggacgaaggtagtatgtcttggcgcgacgc

SEQ ID NO: 1281 - DNA, 1835 bp, Homo sapiens
  source 1..1835: mol_type = genomic DNA
accgccaccatgattttgagggaagaaacacagttcacagatttggatttacagtgtgagataatcagctacatagaagtacccacttatgaaacagatatatcctctacacaacttcagagcatatataagagagagaaactctatgaatgtaagaaatgtcagaagaaatttagtagtggttatcaacttattctacatcacaggtttcatgtcattgagagaccctatgaatgcaaagagtgtgggaagaactttcgtagtggctatcaacttactctacatcaaagatttcatactggtgagaaaccctatgaatgtacagaatgtgggaagaactttagaagtggttatcagctgactgtgcatcagagatttcatactggtgagaaaacctatgaatgtaggcagtgtgggaaggcctttatatatgcctcacacattgttcaacatgagagaattcacactggtgggaagccgtatgaatgtcaggagtgtgggagggcctttagtcaaggtggacatcttagaattcatcagagagttcatactggcgaaaaaccatataaatgtaaggaatgtgggaagacttttagtaggcgctcaaatcttgttgaacatgggcagtttcatactgatgagaagccatacatatgtgagaaatgtggaaaggcctttagaagaggtcaccagcttactgtacatcagagagttcacactggtaaaaagccatatgagtgtaaagaatgtgggaagggctataccactgcctcatactttcttctacatcagagaattcataaaggtggaaaaccctatgaatgtaaggagtgtaagaaaacctttactttgtatagaaatcttactcggcatcagaatattcatactggtgagaaactttttgaatgcaagcaatgtgggaagacctatactactggttcaaaactctttcaacatcagaaaactcatactggcgagaaaccctatgaatgcaaggaatgcggaaaggcctttagcttgtatggctaccttaaacaacatcagaaaattcatactggcatgaaacactttgaatgtaaggagtgtaaaaaaacctttactttgtatagaaatcttactcgacatcagaatattcacactggtaagaaactttttgaatgtcaggaatgtgggaaggcctatagtactggctcaaaccttattcaacatcggaaaactcatactggtgagaaaccctataaatgtaaggaatgtggcaagacctttagcttgcatggatatcttaatcaacatcagaaaattcatactggtatgaaaccctatgaatgtaaggtatgtagaaaaacctttactttctatagaaatcttactctacatcaaagtattcatactgatgagaaaccttttgaatgtaaggaatgtgggaagacctttagacgtagttcacaccttactgcacatcagagcattcatgctgataaaaaaccctatgaatgtaaagaatgtggaaaggcctttaaaatgtatggctaccttacccaacatcagaaaattcatactggtggaaaaccttatgaatgtaaagaatgtgggaaggccttcagtcgtgcttcaaaccttgttcaacatgagagaattcatactggtgagaaaccctatgtgtgtaagcagtgtgggaaaaccttcagatatggttcagcccttaaagcccatcagagaattcataggagcataaaagtgtagtaatgaactagtccgtaacttgaaagtatttcgatttcttggctttatatatcttgtggaaaggacgaagagcctacgtgtgaagtaagtca

SEQ ID NO: 1282 - DNA, 1925 bp, Homo sapiens
  source 1..1925: mol_type = genomic DNA
accgccaccatggagtcttgctctgtcgcacaggctggagtgcagtggcccgatctcagctcactgcaacctccgcctcccaggttcaagcaattctcctgccacagcctccaagtagctgggattacagatttggatttacagtgtgagataatcagctacatagaagtacccacttatgaaacagatatatcctctacacaacttcagagcatatataagagagagaaactctatgaatgtaagaaatgtcagaagaaatttagtagtggttatcaacttattctacatcacaggtttcatgtcattgagagaccctatgaatgcaaagagtgtgggaagaactttcgtagtggctatcaacttactctacatcaaagatttcatactggtgagaaaccctatgaatgtacagaatgtgggaagaactttagaagtggttatcagctgactgtgcatcagagatttcatactggtgagaaaacctatgaatgtaggcagtgtgggaaggcctttatatatgcctcacacattgttcaacatgagagaattcacactggtgggaagccgtatgaatgtcaggagtgtgggagggcctttagtcaaggtggacatcttagaattcatcagagagttcatactggcgaaaaaccatataaatgtaaggaatgtgggaagacttttagtaggcgctcaaatcttgttgaacatgggcagtttcatactgatgagaagccatacatatgtgagaaatgtggaaaggcctttagaagaggtcaccagcttactgtacatcagagagttcacactggtaaaaagccatatgagtgtaaagaatgtgggaagggctataccactgcctcatactttcttctacatcagagaattcataaaggtggaaaaccctatgaatgtaaggagtgtaagaaaacctttactttgtatagaaatcttactcggcatcagaatattcatactggtgagaaactttttgaatgcaagcaatgtgggaagacctatactactggttcaaaactctttcaacatcagaaaactcatactggcgagaaaccctatgaatgcaaggaatgcggaaaggcctttagcttgtatggctaccttaaacaacatcagaaaattcatactggcatgaaacactttgaatgtaaggagtgtaaaaaaacctttactttgtatagaaatcttactcgacatcagaatattcacactggtaagaaactttttgaatgtcaggaatgtgggaaggcctatagtactggctcaaaccttattcaacatcggaaaactcatactggtgagaaaccctataaatgtaaggaatgtggcaagacctttagcttgcatggatatcttaatcaacatcagaaaattcatactggtatgaaaccctatgaatgtaaggtatgtagaaaaacctttactttctatagaaatcttactctacatcaaagtattcatactgatgagaaaccttttgaatgtaaggaatgtgggaagacctttagacgtagttcacaccttactgcacatcagagcattcatgctgataaaaaaccctatgaatgtaaagaatgtggaaaggcctttaaaatgtatggctaccttacccaacatcagaaaattcatactggtggaaaaccttatgaatgtaaagaatgtgggaaggccttcagtcgtgcttcaaaccttgttcaacatgagagaattcatactggtgagaaaccctatgtgtgtaagcagtgtgggaaaaccttcagatatggttcagcccttaaagcccatcagagaattcataggagcataaaagtgtagtaatgaactagtccgtaacttgaaagtatttcgatttcttggctttatatatcttgtggaaaggacgaccacattcttcgcacattgggtgc

SEQ ID NO: 1283 - DNA, 3062 bp, Homo sapiens
  source 1..3062: mol_type = genomic DNA
accgccaccatgccgagagcaacctgggctaacagcaaagagagaagttgggcagagtcagagaggggcccaagagacacaggaaatgggggctcaaaagcggaaagacatatccaggagatagagactggacggggtggggacagggccaaggcccaccgcaggcagaggatgaggctcagaggaacagaaagagccagtctgggaccaggacggaggcttggagacagcaggggcacggacatgccaggggcccgggcccagggccttgctgccgccatgactgaggaatcagaggagacagtcctgtacattgagcaccgctatgtctgctctgagtgcaaccagctgtatggatcactggaagaggtgcttatgcaccaaaactcccacgtgccccagcagcactttgagctggtgggcgtggctgatcccggagtcactgtggccacagacacagcttcaggcacgggcctctatcagacccttgtgcaggagagccagtaccagtgcctggagtgtggtcaactgctgatgtcacccagccagctcctggagcaccaggagctgcacctgaagatgatggcaccccaggaggcagtgccagctgagccatcacctaaggcaccacccctgagctccagcaccatccactacgagtgtgtggattgcaaggctctctttgccagccaggagctctggctgaaccaccggcagacgcacctccgggccacacccaccaaggctcctgcccctgttgtcctggggtccccagttgttctagggcctcctgtgggccaggcccgagtggctgtggagcactcataccgaaaggcagaagagggtggggaaggggcgactgtcccatctgccgctgccaccaccactgaggtagtgactgaggtggagctgctcctctacaagtgctctgagtgctcccagctcttccagctgccggcggatttcctggagcaccaggccactcacttccctgctcctgtacccgagtctcaggagcctgccttacagcaggaggtgcaggcctcgtcacctgcagaggtgcctgtgtctcagcctgaccccttgccagcttctgaccacagttacgagctgcgcaatggtgaagccattgggcgggatcgccgggggcgcagggcccggaggaacaacagtggagaagcaggcggggcagccacacaggagctcttctgctcagcctgtgaccagctctttctctcaccccaccagctacagcagcacctgcggagtcaccgggagggcgtctttaagtgccccctgtgcagtcgtgtcttccctagcccttccagtctggaccagcaccttggagaccatagcagcgagtcacacttcctgtgtgtagactgtggcctggccttcggcacagaggccctcctcctggcccaccggcgagcccacaccccgaatcctctgcattcatgtccatgtgggaagacctttgtcaaccttaccaagttcctttatcaccggcgtactcatggggtagggggtgtccctctgcccacaacaccagtcccaccagaggaacctgtcattggtttccctgagccagccccagcagagactggagagccagaggcccctgagccccctgtgtctgaggagacctcagcagggcccgctgccccaggcacctaccgctgcctcctgtgcagccgtgaatttggaaaggccttgcagctgacccggcaccaacgttttgtgcatcggctggagcggcgccataaatgcagcatttgtggcaagatgttcaagaagaagtctcacgtgcgtaaccacctgcgcacacacacaggggagcggcccttcccctgccctgactgctccaagcccttcaactcacctgccaacctggcccgccaccggctcacacacacaggagagcggccctaccggtgtggggactgtggcaaggctttcacgcaaagctccacactgaggcagcaccgcttggtgcatgcccagcacttcccctaccgctgccaggaatgtggggtgcgttttcaccgtccttaccgcctgctcatgcaccgctaccatcacacaggtgaatacccctacaagtgtcgcgagtgcccccgctccttcttgctgcgtcggctgctggaggtgcaccagctcgtggtccatgccgggcgccagccccaccgctgcccatcctgtggggctgccttcccctcctcactgcggctccgggagcaccgctgtgcagccgctgctgcccaggccccacggcgctttgagtgtggcacctgtggcaagaaagtgggctcagctgctcgactgcaggcacacgaggcggcccatgcagctgctgggcctggagaggtcctggctaaggagccccctgcccctcgagccccacgggccactcgtgcaccagttgcctctccagcagcccttggaagcactgctacagcatcccctgcggcccctgcccgccgccggggtctagagtgcagcgagtgcaagaagctgttcagcacagagacgtcactgcaggtgcaccggcgcatccacacaggtgagcggccatacccatgtccagactgtggcaaagcgttccgtcagagtacccacctgaaagaccaccggcgcctgcacacaggtgagcggccctttgcctgtgaagtgtgtggcaaggcctttgccatctccatgcgcctggcagaacatcgccgcatccacacaggcgaacgaccctactcctgccctgactgtggcaagagctaccgctccttctccaacctctggaagcaccgcaagacccatcagcagcagcatcaggcagctgtgcggcagcagctggcagaggcggaggctgccgttggcctggccgtcatggagactgctgtggaggcgctacccctggtggaagccattgagatctaccctctggccgaggctgagggggtccagatcagtggctagtaatgaactagtccgtaacttgaaagtatttcgatttcttggctttatatatcttgtggaaaggacgagtattggtccgttctcgcaatcgc

SEQ ID NO: 1284 - DNA, 839 bp, Homo sapiens
  source 1..839: mol_type = genomic DNA
accgccaccatgctggagcgaggcgcggagtccgcggccggggctaccgatcctagtcccactggcaaggaaccagtgaccaaagaagctccccaccagggcccaccgcagaagcccagccagtcagctccagggcccaccgcgtccgcgggctcgcctccccggcctcgccggcggcccccgccccagcgcccgcaccgctgccccgactgtgacaaggccttctcgtacccgtccaagctggccacgcaccgcttagcacacggaggcgcccgaccccacccatgcccagactgccccaaggccttctcctacccctccaagctggcagcccaccgcctcacgcacagcggcgcccgcccgcacccgtgcccacactgcccgaagtcctttggccaccgctccaagctggcggctcacctctggacccacgcacccacccgcccctacccgtgccccgactgccccaagtccttctgctacccttccaagctggcggcccaccgccacacgcaccacgccaccgacgcccgcccctatccttgcccgcattgccccaaggctttctcatttccctccaagctggccgcccatcgcctatgtcacgaccccccaaccgcgcccggcagccaggcgactgcctggcaccgatgctccagctgcggccaggcctttggccagagacgcttactgctccttcatcaacgcagccaccaccaggtggagcacaagggggagagagactagtaatgaactagtccgtaacttgaaagtatttcgatttcttggctttatatatcttgtggaaaggacgaaaagagcagtattaactgtggtat

SEQ ID NO: 1285 - DNA, 614 bp, Homo sapiens
  source 1..614: mol_type = genomic DNA
accgccaccatggaggacccgaaccctgaagagaacatgaagcagcaggattcacccaaggagagaagtccccagagcccaggaggcaacatctgccacctgggggccccgaagtgcacccgctgcctcatcaccttcgcagattccaagttccaggagcgtcacatgaagcgggagcacccagcggacttcgtggcccagaagctgcagggggtcctcttcatctgcttcacctgcgcccgctccttcccctcctccaaagccctaatcacccaccagcgcagccacggtccagccgccaagcccaccctgccggttgcaaccactactgcccagcccaccttcccttgtcctgactgtggcaagacctttgggcaggctgtttctctgaggcggcaccgccagatgcatgaggtccgtgcccctcctggcaccttcgcctgcacagagtgcggtcaggactttgctcaggaagcagggctgcatcaacactacattcggcatgcccggggggagctctagtaatgaactagtccgtaacttgaaagtatttcgatttcttggctttatatatcttgtggaaaggacgagcctggcgacacctagattccata

SEQ ID NO: 1286 - DNA, 1559 bp, Homo sapiens
  source 1..1559: mol_type = genomic DNA
accgccaccatgaaaaatgccacgattgtaatgtctgtgaggagagagcaaggcagttcttcaggggaggggtcattgtcattcgaagatgtggctgtgggcttcaccagggaggagtggcagtttttggaccagtctcagaaggtcttgtacaaggaagtaatgttggagaactacatcaacctagtatcaatagggtatcgaggcaccaagccagattcgctcttcaagttggagcaaggagaacccccagggatagcagaaggagcagcccacagtcaaatctgtccaggttttgtaatccagagtagaagatatgcaggaaaagattctgatgcatttggtggatatgggagatcatgcctccatatcaagcgtgacaaaactcttactggagttaaataccatagatgtgttaaacccagcagccctaaatcacagctcaatgacctacaaaaaatttgtgcaggagggaaaccacatgaatgcagtgtgtgcgggagagccttctccaggaaagcacagcttattcaacatcagagaactgaaagaggagagaaaccccatggatgtggtgaatgtgggaaaacattcatgaggaagattcagctcactgagcatcagagaactcacacaggagagaagccccatgaatgtagtgaatgtggaaaagccttctccagaaagtcacagctcatggtccatcagagaacccatacaggagagaaaccctacagatgcagcaaatgcggaaaagccttcagccggaagtgccggctcaatagacatcagcgatcacatactggagagaaactctatgggtgcagtgtgtgtgggaaagccttttctcagaaggcatacctcactgcacaccagagacttcacacaggagataagccttataaatgcagtgattgtggaagaaccttctattttaagtcagacctgaccagacatcagaggattcatacgggagagaaaccttatgaatgtagtgagtgtgaaaaagcctttagaagcaagtcgaagctcattcagcatcagcgtactcacactggagagagaccatattcatgcagagaatgtggcaaagcctttgcccacatgtcagtcctcattaaacatgagaaaactcacataagagagacagccataaattcactgacggtggagaaaccttcctcaaggagtcatacctccttatacatgagcgaactcatacaagagcaaaagactgtgaacacagtacctatagaaatgccttcctcaggaaccccgccattgttaaacaagagtgagcgcctagtgggcagaaatgtagtgattgtggaacaaccttttccaagaaatcaagcctttgtagttaatcaggaatttgaacagagaataagcctcacaaatgaagtgaatgtggccccatcagtaataaattatatcttgtatcttacagatattgtatcagaatagtaatgaactagtccgtaacttgaaagtatttcgatttcttggctttatatatcttgtggaaaggacgattgtgtaggaagacttcttggcga

SEQ ID NO: 1287 - DNA, 1382 bp, Homo sapiens
  source 1..1382: mol_type = genomic DNA
accgccaccatgaaaaatgccacgattgtaatgtctgtgaggagagagcaaggcagttcttcaggggaggggtcattgtcattcgaagatgtggctgtgggcttcaccagggaggagtggcagtttttggaccagtctcagaaggtcttgtacaaggaagtaatgttggagaactacatcaacctagtatcaatagggtatcgaggcaccaagccagattcgctcttcaagttggagcaaggagaacccccagggatagcagaaggagcagcccacagtcaaatctgtccaggagggaaaccacatgaatgcagtgtgtgcgggagagccttctccaggaaagcacagcttattcaacatcagagaactgaaagaggagagaaaccccatggatgtggtgaatgtgggaaaacattcatgaggaagattcagctcactgagcatcagagaactcacacaggagagaagccccatgaatgtagtgaatgtggaaaagccttctccagaaagtcacagctcatggtccatcagagaacccatacaggagagaaaccctacagatgcagcaaatgcggaaaagccttcagccggaagtgccggctcaatagacatcagcgatcacatactggagagaaactctatgggtgcagtgtgtgtgggaaagccttttctcagaaggcatacctcactgcacaccagagacttcacacaggagataagccttataaatgcagtgattgtggaagaaccttctattttaagtcagacctgaccagacatcagaggattcatacgggagagaaaccttatgaatgtagtgagtgtgaaaaagcctttagaagcaagtcgaagctcattcagcatcagcgtactcacactggagagagaccatattcatgcagagaatgtggcaaagcctttgcccacatgtcagtcctcattaaacatgagaaaactcacataagagagacagccataaattcactgacggtggagaaaccttcctcaaggagtcatacctccttatacatgagcgaactcatacaagagcaaaagactgtgaacacagtacctatagaaatgccttcctcaggaaccccgccattgttaaacaagagtgagcgcctagtgggcagaaatgtagtgattgtggaacaaccttttccaagaaatcaagcctttgtagttaatcaggaatttgaacagagaataagcctcacaaatgaagtgaatgtggccccatcagtaataaattatatcttgtatcttacagatattgtatcagaatagtaatgaactagtccgtaacttgaaagtatttcgatttcttggctttatatatcttgtggaaaggacgatttgaaatcgtatttattgtggga

SEQ ID NO: 1288 - DNA, 1874 bp, Homo sapiens
  source 1..1874: mol_type = genomic DNA
accgccaccatgttacatgaggaagcagctcagaagaggaaaggaaaggagccaggcatggctcttcctcagggacgcttgactttcagggatgtggctatagaattctcattggcagagtggaaattcctgaaccctgcgcagagggctttgtacagggaagtgatgttggagaactacaggaacctggaggctgtggatatctcttccaaacgcatgatgaaggaggtcttgtcaacagggcaaggcaatacagaagtgatccacacagggatgttgcaaagacatgaaagttatcacactggagatttttgcttccaggaaattgaaaaagatattcatgactttgagtttcagtcacaaaaagatgaaagaaatggccatgaagcatccatgccaaaaatcaaagagttgatgggtagcacagaccgacatgatcaaaggcatgctggaaacaagcctattaaagatcagcttggattaagctttcatttgcatcttcctgaactccacatatttcagcccgaagagaaaattgctaatcaagtggagaagtctgtcaacgatgcttcctcaatttcaacatcccaaagaatttcttgtaggcctgaaacacatactcctaataactatgggaataattttttccattcatcattactcacacaaaaacaggaagtacacatgagagaaaaatctttccaatgtaatgagactggcgaagcctttaattgtagctcatttgtaaggaaacatcagataatccatttaggagaaaaacaatataaatttgatatatgtggcaaagtctttaatgagaagcgataccttgcacgccatcgtagatgtcacactagtgagaaaccttacaagtgtaatgaatgtggaaagtccttcagttacaagtcatccctgacatgccatcgtagatgtcacactggtgagaaaccttacaagtgtaatgaatgtggaaagtccttcagttacaagtcatcccttacatgccatcataggtgtcacactggtgagaaaccttacaagtgtaatgaatgtggaaagtccttcagttacaagtcatcccttagatgccatcgtagacttcatactggaataaaaccttacaagtgtaatgagtgtggcaagatgtttggtcaaaattcaacccttgtaattcataaggcaattcatactggagagaaaccttacaagtgtaatgaatgtggcaaggcttttaatcaacaatcacacctttcacgtcatcatagacttcatactggagagaaaccttacaagtgtaatgactgtggtaaggcttttattcatcagtcaagccttgcacgtcatcatagacttcatactggagagaaatcttacaaatgtgaagaatgtgacagagttttcagtcagaaatcaaaccttgagagacacaagataattcatactggagagaaaccttacaagtgtaatgagtgtcacaagaccttcagtcacaggtcatctcttccatgccatcgtagacttcatagtggtgagaaaccttacaagtgtaatgaatgtgggaagacttttaatgtacagtcacacctttcacgtcatcatagacttcatactggagagaaaccttacaaatgtaaggtttgtgacaaggctttcatgtgccattcttatctggcaaaccatactagaattcatagcggagagaaaccttacaagtgtaatgagtgtggtaaggctcacaatcacttgattgattcatcaatcaagccttgcatgtcatcatagtaatgaactagtccgtaacttgaaagtatttcgatttcttggctttatatatcttgtggaaaggacgattgcgattcatcatcttgaaccga

SEQ ID NO: 1289 - DNA, 1790 bp, Homo sapiens
  source 1..1790: mol_type = genomic DNA
accgccaccatggatccgcagcctcctccacccgcccagggcagcccacctcaccgtggccgaggccggggccgtggccgaggccgtggtcggggccgtggccgtggcagggggggcgctggagcccctagggcgcccctgccctgccccacctgcggccgcctcttccgtttcccctactacctctcccggcaccggctgagccactcggggctccggccccacgcctgcccgctgtgccccaaggccttccgccggccggcccacctttcccgccacctgcgcggccacgggccccagcccccgctgcgctgcgccgcctgcccccgcaccttcccagaaccggcccagctcaggcgccacctggctcaggagcacgcgggcggcgaggtcgagctggccatcgagagggtggccaaggagacggccgaacccagctggggcccgcaggacgagggctcggagccgcccaccaccgctgcagcaggggccacggaggaggaggcggtcgcagcgtggcctgagacgtggcctgcgggggagccttccacgctggctgcgcccaccagcgccgcggagccccgggagtcggagtcggaggaggccgaggccggggcagcagagctgagggccgagctggcgctggcggccgggcggcaggaggagaaacaggtcctgctccaggcagactggacgctgctgtgtctgcgctgccgcgaagccttcgccaccaagggcgagctcaaggcgcacccgtgtctgcgccccgagggcgaacaggaaggggaaggggggcccccgccacgccccaagcgacaccagtgctccatctgcctcaaggccttcgccaggccctggtccctgtcgcgccaccggctggtccactccaccgaccgccctttcgtgtgcccagactgcggcctggccttccgcctcgcctcctacctccgccagcaccgccgcgtccacggccccctcagcctgctggccccgctgcccgcggcgggcaagaaggacgacaaggcctcgggtgcacggaactcagccaaggggccggaggggggcgagggggcggagtgcgggggtgcctcggaagggggagaagggcagaacggaggcgacgccgccccggctcggccccccgccggggagccccgcttctggtgcccagagtgcggcaaaggtttcaggcgccgggcgcacctgcggcagcacggggtgacccactcgggagcgcgccccttccagtgcgtgcgctgccagcgggagttcaagcgcctggccgacctggcgcgccacgcacaggtgcacgcggggggcccagccccgcacccgtgcccccgctgcccgcgccgcttctcgcgcgcctacagcctcctgcgccaccagcgctgccaccgcgcagagctggagagggccgccgcgctgcaggcactgcaggcccaggccccgacgtcgccgccaccgcccccgccgcccctgaaggccgagcaggaggaagaagggctcccgctgcccctcgcaaacattaaggaagagccgccctctccggggaccccaccccagtccccgccggctccccctgtcttcctcagcgcctcctgtttcgacagccaagaccactcagccttcgagatggaggaggaagaggtagacagcaaggctcacctgcgcgggctggggggcctggcctcctagtaatgaactagtccgtaacttgaaagtatttcgatttcttggctttatatatcttgtggaaaggacgactttaccgatttatacattcggtt

SEQ ID NO: 1290 - DNA, 1295 bp, Homo sapiens
  source 1..1295: mol_type = genomic DNA
accgccaccatgtcttcccttcctgggtgcattggtttggatgcagcaacagctacagtggagtctgaagagattgcagagctgcaacaggcagtggttgaggaactgggtatctctatggaggaacttcggcatttcatcgatgaggaactggagaagatggattgtgtacagcaacgcaagaagcagctagcagagttagagacatgggtaatacagaaagaatctgaggtggctcacgttgaccaactctttgatgatgcatccagggcagtgactaattgtgagtctttggtgaaggacttctactccaagctgggactacaataccgggacagtagctctgaggacgaatcttcccggcctacagaaataattgagattcctgatgaagatgatgatgtcctcagtattgattcaggtgatgctgggagcagaactccaaaagaccagaagctccgtgaagctatggctgccttaagaaagtcagctcaagatgttcagaagttcatggatgctgtcaacaagaagagcagttcccaggatctgcataaaggaaccttgagtcagatgtctggagaactaagcaaagatggtgacctgatagtcagcatgcgaattctgggcaagaagagaactaagacttggcacaaaggcacccttattgccatccagacagttgggccagggaagaaatacaaggtgaaatttgacaacaaaggaaagagtctactgtcggggaaccatattgcctatgattaccaccctcctgctgacaagctgtatgtgggcagtcgggtggtcgccaaatacaaagatgggaatcaggtctggctctatgctggcattgtagctgagacaccaaacgtcaaaaacaagctcaggtttctcattttctttgatgatggctatgcttcctatgtcacacagtcggaactgtatcccatttgccggccactgaaaaagacttgggaggacatagaagacatctcctgccgtgacttcatagaggagtatgtcactgcctaccccaaccgccccatggtactgctcaagagtggccagcttatcaagactgagtgggaaggcacgtggtggaagtcccgagttgaggaggtggatggcagcctagtcaggatcctcttcctggtactgttcttctctacaattttggaggcagaggttggtggggggggaacttagtaatgaactagtccgtaacttgaaagtatttcgatttcttggctttatatatcttgtggaaaggacgatatataccggtcctcgatttacaa

SEQ ID NO: 1291 - DNA, 3977 bp, Homo sapiens
  source 1..3977: mol_type = genomic DNA
accgccaccatgtcttcccttcctgggtgcattggtttggatgcagcaacagctacagtggagtctgaagagattgcagagctgcaacaggcagtggttgaggaactgggtatctctatggaggaacttcggcatttcatcgatgaggaactggagaagatggattgtgtacagcaacgcaagaagcagctagcagagttagagacatgggtaatacagaaagaatctgaggtggctcacgttgaccaactctttgatgatgcatccagggcagtgactaattgtgagtctttggtgaaggacttctactccaagctgggactacaataccgggacagtagctctgaggacgaatcttcccggcctacagaaataattgagattcctgatgaagatgatgatgtcctcagtattgattcaggtgatgctgggagcagaactccaaaagaccagaagctccgtgaagctatggctgccttaagaaagtcagctcaagatgttcagaagttcatggatgctgtcaacaagaagagcagttcccaggatctgcataaaggaaccttgagtcagatgtctggagaactaagcaaagatggtgacctgatagtcagcatgcgaattctgggcaagaagagaactaagacttggcacaaaggcacccttattgccatccagacagttgggccagggaagaaatacaaggtgaaatttgacaacaaaggaaagagtctactgtcggggaaccatattgcctatgattaccaccctcctgctgacaagctgtatgtgggcagtcgggtggtcgccaaatacaaagatgggaatcaggtctggctctatgctggcattgtagctgagacaccaaacgtcaaaaacaagctcaggtttctcattttctttgatgatggctatgcttcctatgtcacacagtcggaactgtatcccatttgccggccactgaaaaagacttgggaggacatagaagacatctcctgccgtgacttcatagaggagtatgtcactgcctaccccaaccgccccatggtactgctcaagagtggccagcttatcaagactgagtgggaaggcacgtggtggaagtcccgagttgaggaggtggatggcagcctagtcaggatcctcttcctggatgacaaaagatgtgagtggatctatcgaggctctacacggctggagcccatgttcagcatgaaaacatcctcagcctctgcactggagaagaagcaaggacagctcaggacacgtccaaatatgggtgctgtgaggagcaaaggccctgttgtccagtacacacaggatctgaccggtactggaacccagttcaagccagtggaacccccacagcctacagctccacctgccccacctttcccacctgctccacctctatccccccaagcaggtgacagtgacttggaaagccagcttgcccagtcacggaagcaggtagccaaaaagagcacgtcctttcgaccaggatctgtgggctctggtcattcctcccctacatctcctgcactcagtgaaaatgtctctggtgggaaacctgggatcaaccagacatatagatcacctttaggctccacagcctctgccccagcaccctcagcactcccggcccctccagcacccccagtcttccatggcatgctggagcgggccccagcagagccctcctaccgtgctcccatggagaagcttttctacttacctcatgtctgcagctatacctgtctgtctcgagtcagacctatgaggaatgagcagtaccggggcaagaaccctctgctggtcccgttactatatgacttccggcggatgacagcccggcgtcgagttaaccgcaagatgggctttcatgttatctataagacaccttgtggtctctgccttcggacaatgcaggagatagaacgctaccttttcgagactggctgtgacttcctcttcctggagatgttctgtttggatccatatgttcttgtggaccgaaagtttcagccctataagcctttttactatattttggacatcacttatgggaaggaagatgttcccctatcctgtgtcaatgagattgacacaacccctccaccccaggtggcctacagcaaggaacgtatcccgggcaagggtgttttcattaacacaggccctgaatttctggttggctgtgactgcaaggatgggtgtcgggacaagtccaagtgtgcctgccatcaactaactatccaggctacagcctgtaccccaggaggccaaatcaaccctaactctggctaccagtacaagagactagaagagtgtctacccacaggggtatatgagtgtaacaaacgctgcaaatgtgacccaaacatgtgcacaaaccggttggtgcaacatggactacaagttcggctacagctattcaagacacagaacaagggctggggtatccgctgcttggatgacattgccaaaggctcttttgtttgtatttatgcaggcaaaatcctgacagatgactttgcagacaaggagggtctggaaatgggtgatgagtactttgcaaatctggaccatatcgagagcgtggagaacttcaaagaaggatatgagagtgatgccccctgttcctctgacagcagtggtgtagacttgaaggaccaggaagatggcaacagcggtacagaggaccctgaagagtccaatgatgatagctcagatgataacttctgtaaggatgaggacttcagcaccagttcagtgtggcggagctatgctacccggaggcagacccggggccagaaagagaacggactctctgagacaacttccaaggactcccaccccccagatcttggacccccacatattcctgttcctccctcaatccctgtaggtggctgcaatccaccttcctccgaagagacacccaagaacaaggtggcctcatggttgagctgcaatagtgtcagtgaaggtggttttgctgactctgatagccattcatccttcaagactaatgaaggtggggagggccgggctgggggaagccgaatggaggctgagaaggcctccacctcaggactaggcatcaaggatgagggagacatcaaacaggccaagaaagaggacactgacgaccgaaacaagatgtcagtagttactgaaagctctcgaaattacggttacaatccttctcctgtgaagcctgaaggacttcgccgcccacctagtaagactagtatgcatcaaagccgaagactcatggcttctgctcagtccaaccctgatgatgtcctgacactgtccagcagcacagaaagtgagggggaaagtgggaccagccgaaagcccactgctggtcagacttcggctacagcggttgacagtgatgatatccagaccatatcctctggctctgaaggggatgactttgaggacaagaagaacatgactggtccaatgaagcgtcaagtggcagtaaaatcaacccgaggctttgctcttaaatcaacccatgggattgcaattaaatcaaccaacatggcctctgtggacaagggggagagcgcacctgttcgtaagaacacacgccaattctatgatggcgaggagtcttgctacatcattgatgccaagcttgaaggcaacctgggccgctacctcaaccacagttgcagccccaacctgtttgtccagaatgtcttcgtggatacccatgatcttcgcttcccctgggtggccttctttgccagcaaaagaatccgggctgggacagaacttacttgggactacaactacgaggtgggcagtgtggaaggcaaggagctactctgttgctgtggggccattgaatgcagaggacgtcttctttagtaatgaactagtccgtaacttgaaagtatttcgatttcttggctttatatatcttgtggaaaggacgagccgttacacctcgtccacctgca

SEQ ID NO: 1292 - DNA, 3974 bp, Homo sapiens
  source 1..3974: mol_type = genomic DNA
accgccaccatgtcttcccttcctgggtgcattggtttggatgcagcaacagctacagtggagtctgaagagattgcagagctgcaacaggcagtggttgaggaactgggtatctctatggaggaacttcggcatttcatcgatgaggaactggagaagatggattgtgtacagcaacgcaagaagcagctagcagagttagagacatgggtaatacagaaagaatctgaggtggctcacgttgaccaactctttgatgatgcatccagggcagtgactaattgtgagtctttggtgaaggacttctactccaagctgggactacaataccgggacagtagctctgaggacgaatcttcccggcctacagaaataattgagattcctgatgaagatgatgatgtcctcagtattgattcaggtgatgctgggagcagaactccaaaagaccagaagctccgtgaagctatggctgccttaagaaagtcagctcaagatgttcagaagttcatggatgctgtcaacaagaagagcagttcccaggatctgcataaaggaaccttgagtcagatgtctggagaactaagcaaagatggtgacctgatagtcagcatgcgaattctgggcaagaagagaactaagacttggcacaaaggcacccttattgccatccagacagttgggccagggaagaaatacaaggtgaaatttgacaacaaaggaaagagtctactgtcggggaaccatattgcctatgattaccaccctcctgctgacaagctgtatgtgggcagtcgggtggtcgccaaatacaaagatgggaatcaggtctggctctatgctggcattgtagctgagacaccaaacgtcaaaaacaagctcaggtttctcattttctttgatgatggctatgcttcctatgtcacacagtcggaactgtatcccatttgccggccactgaaaaagacttgggaggacatagaagacatctcctgccgtgacttcatagaggagtatgtcactgcctaccccaaccgccccatggtactgctcaagagtggccagcttatcaagactgagtgggaaggcacgtggtggaagtcccgagttgaggaggtggatggcagcctagtcaggatcctcttcctggatgacaaaagatgtgagtggatctatcgaggctctacacggctggagcccatgttcagcatgaaaacatcctcagcctctgcactggagaagaagcaaggacagctcaggacacgtccaaatatgggtgctgtgaggagcaaaggccctgttgtccagtacacacaggatctgaccggtactggaacccagttcaagccagtggaacccccacagcctacagctccacctgccccacctttcccacctgctccacctctatccccccaagcaggtgacagtgacttggaaagccagcttgcccagtcacggaagcaggtagccaaaaagagcacgtcctttcgaccaggatctgtgggctctggtcattcctcccctacatctcctgcactcagtgaaaatgtctctggtgggaaacctgggatcaaccagacatatagatcacctttaggctccacagcctctgccccagcaccctcagcactcccggcccctccagcacccccagtcttccatggcatgctggagcgggccccagcagagccctcctaccgtgctcccatggagaagcttttctacttacctcatgtctgcagctatacctgtctgtctcgagtcagacctatgaggaatgagcagtaccggggcaagaaccctctgctggtcccgttactatatgacttccggcggatgacagcccggcgtcgagttaaccgcaagatgggctttcatgttatctataagacaccttgtggtctctgccttcggacaatgcaggagatagaacgctaccttttcgagactggctgtgacttcctcttcctggagatgttctgtttggatccatatgttcttgtggaccgaaagtttcagccctataagcctttttactatattttggacatcacttatgggaaggaagatgttcccctatcctgtgtcaatgagattgacacaacccctccaccccaggtggcctacagcaaggaacgtatcccgggcaagggtgttttcattaacacaggccctgaatttctggttggctgtgactgcaaggatgggtgtcgggacaagtccaagtgtgcctgccatcaactaactatccaggctacagcctgtaccccaggaggccaaatcaaccctaactctggctaccagtacaagagactagaagagtgtctacccacaggggtatatgagtgtaacaaacgctgcaaatgtgacccaaacatgtgcacaaaccggttggtgcaacatggactacaagttcggctacagctattcaagacacagaacaagggctggggtatccgctgcttggatgacattgccaaaggctcttttgtttgtatttatgcaggcaaaatcctgacagatgactttgcagacaaggagggtctggaaatgggtgatgagtactttgcaaatctggaccatatcgagagcgtggagaacttcaaagaaggatatgagagtgatgccccctgttcctctgacagcagtggtgtagacttgaaggaccaggaagatggcaacagcggtacagaggaccctgaagagtccaatgatgatagctcagatgataacttctgtaaggatgaggacttcagcaccagttcagtgtggcggagctatgctacccggaggcagacccggggccagaaagagaacggactctctgagacaacttccaaggactcccaccccccagatcttggacccccacatattcctgttcctccctcaatccctgtaggtggctgcaatccaccttcctccgaagagacacccaagaacaaggtggcctcatggttgagctgcaatagtgtcagtgaaggtggttttgctgactctgatagccattcatccttcaagactaatgaaggtggggagggccgggctgggggaagccgaatggaggctgagaaggcctccacctcaggactaggcatcaaggatgagggagacatcaaacaggccaagaaagaggacactgacgaccgaaacaagatgtcagtagttactgaaagctctcgaaattacggttacaatccttctcctgtgaagcctgaaggacttcgccgcccacctagtaagactagtatgcatcaaagccgaagactcatggcttctgctcagtccaaccctgatgatgtcctgacactgtccagcagcacagaaagtgagggggaaagtgggaccagccgaaagcccactgctggtcagacttcggctacagcggttgacagtgatgatatccagaccatatcctctggctctgaaggggatgactttgaggacaagaagaacatgactggtccaatgaagcgtcaagtggcagtaaaatcaacccgaggctttgctcttaaatcaacccatgggattgcaattaaatcaaccaacatggcctctgtggacaagggggagagcgcacctgttcgtaagaacacacgccaattctatgatggcgaggagtcttgctacatcattgatgccaagcttgaaggcaacctgggccgctacctcaaccacagttgcagccccaacctgtttgtccagaatgtcttcgtggatacccatgatcttcgcttcccctgggtggccttctttgccagcaaaatccgggctgggacagaacttacttgggactacaactacgaggtgggcagtgtggaaggcaaggagctactctgttgctgtggggccattgaatgcagaggacgtcttctttagtaatgaactagtccgtaacttgaaagtatttcgatttcttggctttatatatcttgtggaaaggacgattatcaggtaaactgaggctgagc

SEQ ID NO: 1293 - DNA, 2261 bp, Homo sapiens
  source 1..2261: mol_type = genomic DNA
accgccaccatgggagaaaaaaatggcgatgcaaaaactttctggatggagctagaagatgatggaaaagtggacttcatttttgaacaagtacaaaatgtgctgcagtcactgaaacaaaagatcaaagatgggtctgccaccaataaagaatacatccaagcaatgattctagtgaatgaagcaactataattaacagttcaacatcaataaagggagcatcacagaaagaagtgaatgcccaaagcagtgatcctatgcctgtgactcagaaggaacaggaaaacaaatccaatgcatttccctctacatcatgtgaaaactcctttccagaagactgtacatttctaacaacagaaaataaggaaattctctctcttgaagataaagttgtagactttagagaaaaagactcatcttcgaatttatcttaccaaagtcatgactgctctggtgcttgtctgatgaaaatgccactgaacttgaagggagaaaaccctctgcagctgccaatcaaatgtcacttccaaagacgacatgcaaagacaaactctcattcttcagcactccacgtgagttataaaaccccttgtggaaggagtctacgaaacgtggaggaagtttttcgttacctgcttgagacagagtgtaactttttatttacagataacttttctttcaatacctatgttcagttggctcggaattacccaaagcaaaaagaagttgtttctgatgtggatattagcaatggagtggaatcagtgcccatttctttctgtaatgaaattgacagtagaaagctcccacagtttaagtacagaaagactgtgtggcctcgagcatataatctaaccaacttttccagcatgtttactgattcctgtgactgctctgagggctgcatagacataacaaaatgtgcatgtcttcaactgacagcaaggaatgccaaaacttcccccttgtcaagtgacaaaataaccactggatataaatataaaagactacagagacagattcctactggcatttatgaatgcagccttttgtgcaaatgtaatcgacaattgtgtcaaaaccgagttgtccaacatggtcctcaagtgaggttacaggtgttcaaaactgagcagaagggatggggtgtacgctgtctagatgacattgacagagggacatttgtttgcatttattcaggaagattactaagcagagctaacactgaaaaatcttatggtattgatgaaaacgggagagatgagaatactatgaaaaatatattttcaaaaaagaggaaattagaagttgcatgttcagattgtgaagttgaagttctcccattaggattggaaacacatcctagaactgctaaaactgagaaatgtccaccaaagttcagtaataatcccaaggagcttactgtggaaacgaaatatgataatatttcaagaattcaatatcattcagttattagagatcctgaatccaagacagccatttttcaacacaatgggaaaaaaatggaatttgtttcctcggagtctgtcactccagaagataatgatggatttaaaccaccccgagagcatctgaactctaaaaccaagggagcacaaaaggactcaagttcaaaccatgttgatgagtttgaagataatctgctgattgaatcagatgtgatagatataactaaatatagagaagaaactccaccaaggagcagatgtaaccaggcgaccacattggataatcagaatattaaaaaggcaattgaggttcaaattcagaaaccccaagagggacgatctacagcatgtcaaagacagcaggtattttgtgatgaagagttgctaagtgaaaccaagaatacttcatctgattctctaacaaagttcaataaagggaatgtgtttttattggatgccacaaaagaaggaaatgtcggccgcttccttaatcatagttgttgcccaaatctcttggtacagaatgtttttgtagaaacacacaacaggaattttccattggtggcattcttcaccaacaggtatgtgaaagcaagaacagagctaacatgggattatggctatgaagctgggactgtgcctgagaaggaaatcttctgccaatgtggggttaataaatgtagaaaaaaaatattatagtaatgaactagtccgtaacttgaaagtatttcgatttcttggctttatatatcttgtggaaaggacgaagtggagacgttatgcaaggtgta

SEQ ID NO: 1294 - DNA, 2225 bp, Homo sapiens
  source 1..2225: mol_type = genomic DNA
accgccaccatgggagaaaaaaatggcgatgcaaaaactttctggatggagctagaagatgatggaaaagtggacttcatttttgaacaagtacaaaatgtgctgcagtcactgaaacaaaagatcaaagatgggtctgccaccaataaagaatacatccaagcaatgattctagtgaatgaagcaactataattaacagttcaacatcaataaaggatcctatgcctgtgactcagaaggaacaggaaaacaaatccaatgcatttccctctacatcatgtgaaaactcctttccagaagactgtacatttctaacaacagaaaataaggaaattctctctcttgaagataaagttgtagactttagagaaaaagactcatcttcgaatttatcttaccaaagtcatgactgctctggtgcttgtctgatgaaaatgccactgaacttgaagggagaaaaccctctgcagctgccaatcaaatgtcacttccaaagacgacatgcaaagacaaactctcattcttcagcactccacgtgagttataaaaccccttgtggaaggagtctacgaaacgtggaggaagtttttcgttacctgcttgagacagagtgtaactttttatttacagataacttttctttcaatacctatgttcagttggctcggaattacccaaagcaaaaagaagttgtttctgatgtggatattagcaatggagtggaatcagtgcccatttctttctgtaatgaaattgacagtagaaagctcccacagtttaagtacagaaagactgtgtggcctcgagcatataatctaaccaacttttccagcatgtttactgattcctgtgactgctctgagggctgcatagacataacaaaatgtgcatgtcttcaactgacagcaaggaatgccaaaacttcccccttgtcaagtgacaaaataaccactggatataaatataaaagactacagagacagattcctactggcatttatgaatgcagccttttgtgcaaatgtaatcgacaattgtgtcaaaaccgagttgtccaacatggtcctcaagtgaggttacaggtgttcaaaactgagcagaagggatggggtgtacgctgtctagatgacattgacagagggacatttgtttgcatttattcaggaagattactaagcagagctaacactgaaaaatcttatggtattgatgaaaacgggagagatgagaatactatgaaaaatatattttcaaaaaagaggaaattagaagttgcatgttcagattgtgaagttgaagttctcccattaggattggaaacacatcctagaactgctaaaactgagaaatgtccaccaaagttcagtaataatcccaaggagcttactgtggaaacgaaatatgataatatttcaagaattcaatatcattcagttattagagatcctgaatccaagacagccatttttcaacacaatgggaaaaaaatggaatttgtttcctcggagtctgtcactccagaagataatgatggatttaaaccaccccgagagcatctgaactctaaaaccaagggagcacaaaaggactcaagttcaaaccatgttgatgagtttgaagataatctgctgattgaatcagatgtgatagatataactaaatatagagaagaaactccaccaaggagcagatgtaaccaggcgaccacattggataatcagaatattaaaaaggcaattgaggttcaaattcagaaaccccaagagggacgatctacagcatgtcaaagacagcaggtattttgtgatgaagagttgctaagtgaaaccaagaatacttcatctgattctctaacaaagttcaataaagggaatgtgtttttattggatgccacaaaagaaggaaatgtcggccgcttccttaatcatagttgttgcccaaatctcttggtacagaatgtttttgtagaaacacacaacaggaattttccattggtggcattcttcaccaacaggtatgtgaaagcaagaacagagctaacatgggattatggctatgaagctgggactgtgcctgagaaggaaatcttctgccaatgtggggttaataaatgtagaaaaaaaatattatagtaatgaactagtccgtaacttgaaagtatttcgatttcttggctttatatatcttgtggaaaggacgacaactgatggagatgtcaatacag

SEQ ID NO: 1295 - DNA, 1766 bp, Homo sapiens
  source 1..1766: mol_type = genomic DNA
accgccaccatgtctgcagacggcggaggcatccaggacacccaggacaaggagacacccccggaggttccagatcgtggacatcctcatcaggaaatgccttctaagctgggggaggcggtaccttcaggggacactcaggagtcactgcacattaagatggagcccgaagagccacactccgagggggcatcgcaggaggatggggctcaaggtgcctggggctgggcacccctaagtcacggctctaaggagaaagctctcttcctgcctggcggagccctcccctccccccggatccccgtgctttcccgagaggggaggaccagagaccggcagatggctgcagcgctcctcactgcctggtcccagatgccagtgactttcgaggatgtggccttgtacctctcccgggaggagtggggacggctggaccacacgcagcagaacttctacagggatgtcctgcagaagaaaaatgggctgtcactgggctttcccttcagcaggcctttctgggcccctcaagcgcacggcaagggtgaggcctcgggctccagccggcaggcaggagatgagaaggagtggagaggcgcgtgcacaggagccgtcgaggtggggcagagggtgcagacctcatccgtggcagcccttgggaatgtgaagcccttcagaaccagggcagggagagtccagtggggcgtcccgcagtgcgcgcaggaagcagcctgcggccggagctcagggccggccaaagactccgggcagccggctgagccagatcgcaccccggatgcagctccgccagaccccagtcccacggagccccaggagtaccgcgtcccggagaagcccaacgaggaggagaagggcgccccggagagtggcgaggagggcctggcccctgacagtgaggtgggcaggaagagctaccggtgcgagcagtgcggcaagggcttcagctggcactcgcacctggtgacgcaccggcgcacgcacacgggcgagaagccctacgcctgcactgactgcgggaagcgcttcggccgcagctcgcacctcatccagcaccagatcatccacacgggcgagaagccctacacctgccccgcctgccggaagagcttcagccaccactccacgctgattcagcaccagcgcatccacaccggagagaagccctacgtgtgcgaccgctgcgccaagcgcttcacccgccgctcggacttggtcacccaccagggcacccacacgggcgccaagccgcacaagtgccccatctgcgccaagtgcttcacgcagagctcggcgctagtcacccaccagcgcacccacactggggtcaagccctatccgtgccccgagtgcggcaagtgcttcagccagcgttccaacctcatcgcgcacaaccgcacacacacaggcgagaagccctaccactgcctcgactgcggcaagagcttcagccacagctcgcacctcaccgcgcaccagcgcacccaccgtggcgtgcggccctacgcctgcccgttgtgcggcaagagcttcagccggcgctccaacctgcaccggcacgagaagatccacaccaccgggcccaaggccctggccatgctgatgctgggggcggcggcggcgggggctctggccacacccccacccgctcccacctagtaatgaactagtccgtaacttgaaagtatttcgatttcttggctttatatatcttgtggaaaggacgatgcgctgattgtagtgtgcaatta

SEQ ID NO: 1296 - DNA, 2048 bp, Homo sapiens
  source 1..2048: mol_type = genomic DNA
accgccaccatggctacagccgtggaaccagaggaccaggatctttgggaagaagagggaattctgatggtgaaactggaagatgatttcacctgtcggccagagtctgtcttacagagggatgacccggtgctggaaacctcccaccagaacttccgacgcttccgctaccaggaggcagcaagccctagagaagctctcatcagactccgagaactttgtcaccagtggctgagaccagagaggcggacaaaggagcagatcctagagctgcttgtgctggaacaatttcttaccgtcctacctggagaactacagagctgggtgcggggccaacggccagaaagtggcgaggaggcagtgacgctggtggagggtttgcagaaacaacccaggagaccaaggcggtgggtgactgtccatgttcacggccaggaagtcctgtcagaggagacggtgcatttaggagtggagcctgagtcacctaatgagctgcaggatcctgtgcaaagctcgacccccgagcagtctcctgaggaaaccacacagagcccagatctgggggcaccggcagagcagcgtccacaccaggaagaggagctccagaccctgcaggagagcgaggtcccagtgcccgaggacccagaccttcctgcagagaggagctctggagactcagagatggttgctcttcttactgctctgtcacagggactggtaacgttcaaggatgtggccgtatgcttttcccaggaccagtggagtgatctggacccaacacagaaagagttctatggagaatatgtcttggaagaagactgtggaattgttgtctctctgtcatttccaatccccagacctgatgagatctcccaggttagagaggaagagccttgggtcccagatatccaagagcctcaggagactcaagagccagaaatcctgagttttacctacacaggagataggagtaaagatgaggaagagtgtctggagcaggaagatctgagtttggaggatatacacaggcctgttttgggagaaccagaaattcaccagactccagattgggaaatagtctttgaggacaatccaggtagacttaatgaaagaagatttggtactaatatttctcaagtgaatagttttgtgaaccttcgggaaactacacccgtccaccccctgttagggaggcatcatgactgttctgtgtgtggaaagagcttcacttgtaactcccaccttgttagacacctgaggactcacacaggagagaaaccctataaatgtatggaatgtggaaaaagttacacacgaagctcacatcttgccaggcaccaaaaggttcacaagatgaacgcgccttacaaatatcccctaaaccggaagaatttggaagagacctcccctgtgacacaggctgagagaactccatcagtggagaaaccctatagatgtgatgattgcggaaagcacttccgctggacttcagaccttgtcagacatcagaggacacatactggagaaaaacccttcttttgtactatttgtggcaaaagcttcagccagaaatctgtgttaacaacacaccaaagaatccacctgggaggcaaaccctacttgtgtggagagtgtggtgaggacttcagtgaacacaggcggtacctggcgcaccggaagacgcacgctgctgaggaactctacctctgcagcgagtgcgggcgctgcttcacccacagcgcagcgttcgccaagcacttgagaggacacgcctcagtgaggccctgccgatgcaacgaatgtgggaagagcttcagtcgcagggaccacctcgtcaggcatcagagaacacacactggggagaaaccattcacgtgccctacctgtggaaaaagcttcagcagaggatatcacttaattaggcatcagaggacccactcagaaaagacctcctagtaatgaactagtccgtaacttgaaagtatttcgatttcttggctttatatatcttgtggaaaggacgataaatggtacgcggttgggatggc

SEQ ID NO: 1297 - DNA, 5381 bp, Homo sapiens
  source 1..5381: mol_type = genomic DNA
accgccaccatggatcttggaacagctgagggcacccggtgcacggacccgcctgcaggcaagcccgccatggcgcccaaacgcaagggtggcctgaagctgaacgccatctgcgccaagctgagccgccaggtggtggtggagaagcgagctgacgccggctcccacacggagggcagcccatcgcagccccgggaccaagagcgcagtggccctgagtctggggcagcccgggccccccgcagcgaggaagacaagagacgggcagtgatcgagaagtgggtgaacggggagtacagcgaggagccggcacccacacccgtgttggggcggattgcccgcgagggcctggagctgcctcccgagggtgtctacatggtgcagccccaggggtgcagcgatgaggaagaccacgcggaggagccctccaaggacggcggtgccctggaggagaaggattcggacggggcagcctccaaggaggacagcggccccagcaccaggcaggcttcaggagaggcctcctcgctgcgggactacgcggcctccaccatgaccgagttcctcggcatgtttggctatgatgaccagaacacgcgggacgagctggccaggaagatcagctttgagaagctgcacgcgggctccaccccggaggcagccacctcctccatgctgcccacctccgaggataccctcagcaagcgggcgcggttctctaagtatgaggagtacatccgcaagctcaaggctggcgagcagctctcctggccggcccccagcaccaagaccgaggagcgggtgggcaaggaggtggtgggcaccctgcccggcctgcggctgcccagcagcacggcccacctggagaccaaggccaccatcctgcccctgccgtcgcacagcagtgtccagatgcagaacctggtagcccgggcctccaagtacgacttcttcatccaaaaactgaagaccggcgagaatctgcggccccagaacgggagcacctacaagaagccatccaagtacgacctggagaatgtcaagtacctgcacctcttcaaacccggggagggcagccccgacatgggcggggccatcgccttcaagacaggcaaggtggggcgcccttccaagtacgacgtccggggcatccagaagccaggccccgccaaggttccgcccacccccagcctggctcccgcacccctcgccagcgtgcccagtgcccccagcgcccccgggccagggccagagcctcctgcctccctgtccttcaacactcccgagtacctgaagtcaaccttctccaaaacagactccatcaccacggggaccgtctccactgtcaagaacggactgcccacagataaaccagccgtcactgaagatgtaaacatttaccagaaatatattgccaggttctcgggcagccagcactgtggccacatccactgtgcctaccagtaccgcgagcactaccactgccttgaccctgagtgtaactaccagaggttcacgagtaagcaggacgtgatccgccactacaacatgcacaagaagcgcgacaactccctgcagcacggcttcatgcgtttcagcccgctggacgactgcagcgtctactaccacggctgccacctcaatgggaagagcacccactatcactgcatgcaggtgggctgtaacaaggtgtacacgagcacgtctgacgtgatgacccacgagaacttccacaagaagaatacccagctcattaacgacggcttccagcgcttccgagccaccgaagactgtggcacagccgactgccagttctacggacagaagaccacgcacttccactgcaggcgccccggctgcacattcactttcaagaacaagtgtgacatcgagaagcacaagagctaccacatcaaggacgatgcctacgccaaggacggcttcaagaagttctacaagtacgaggagtgcaagtacgagggctgcgtgtacagcaaggctaccaaccacttccactgcatccgcgccggctgcggcttcaccttcacctccaccagccagatgacctctcacaagcgcaagcatgagcgccggcacatccgctcctcgggcgcgctggggctgccgccctcgctgctgggcgccaaggacacggagcacgaggagtccagcaacgacgaccttgttgacttctccgccctgagcagcaagaactccagcctgagcgcctcccctaccagccagcagtcctctgcgtccctggctgccgccactgccgccaccgaggctgggcccagtgccaccaaacctcccaacagcaagatctcggggctgctgccccagggcctgcctggctcaatccccctggccctggccctctccaactcgggcctgcccacccccacgccctacttccccatactggctggccgtgggagcacctccctgcctgtgggcacccccagcctcctgggtgccgtgtcgtctgggtcagcagcctcagccacccctgacacacccacgctggtcgcctcgggagctggagactcagcccccgtggctgccgcctctgtcccggcaccacccgcctccatcatggagaggatctctgcaagcaagggcctcatctcgcccatgatggccaggctggctgcagctgccctcaagccctctgccacctttgacccaggaagcgggcagcaggtcaccccagccaggttccccccggcccaagtgaagccggaacccggtgagagcaccggcgccccaggcccccacgaagcctcccaggaccgcagtctagacctgactgtgaaggagcccagcaacgaatcaaatggccacgcagtcccggcaaattcatctcttttatcctcgcttatgaataagatgtctcagggcaaccctggcctgggcagcctgctgaacatcaaggcggaagcggaggggagccccgctgcggagccctcgcccttcctaggcaaggccgtgaaggcgctggttcaggagaagttggcagagccctggaaggtgtacctgcgcaggtttggtacaaaggacttctgtgacggccagtgtgacttcctccacaaggcccacttccactgcgtggtggaggaatgcggcgcgctcttcagcaccttggacggggccatcaagcacgcaaacttccacttccggacagagggaggagcagcaaaaggaaacacagaggctgcctttccggcctcggccgccgagaccaaacctcccatggccccctcgtcccctccggtccctcctgtcaccacggccacggtgtcctctctggaggggcccgctcccagcccggcctccgtgccctccacccccaccctgctcgcctggaagcagctggcttccaccataccccagatgcctcagatcccagcgtcagtgcctcacctgcccgcctcgcccttggcaacgacttctctagagaacgccaagccccaggtcaaacccggattcctccagttccaggagaacgatccttgcctcgccacggactgcaagtacgccaacaagttccacttccactgtctctttgggaactgcaagtacgtctgcaaaacgtctggcaaggccgaatcccactgcctggaccacatcaaccccaacaacaacctggtgaacgtgcgagaccagtttgcatactactctctgcagtgtctctgtcccaaccagcactgcgagttccgaatgcgtgggcactaccactgcctccgcaccggctgctattttgtgaccaacatcaccaccaagctcccctggcacatcaagaagcatgagaaggcggagcggcgggcagccaatggcttcaaatacttcaccaagcgcgaggagtgtggcaggctaggttgcaagtacaaccaggtgaacagccacttccactgcatccgggagggctgccagttctccttcctcctcaagcaccagatgacctcccacgcgcggaagcacatgcggaggatgctggggaagaacttcgaccgcgtgcccccctcccagggccccccaggcctgatggatgctgagacagatgagtgcatggactacactggctgcagcccaggcgccatgtcctctgagtcatccaccatggaccggagctgctccagcacccccgtgggtaacgagagcaccgcggcagggaacaccatctctatgccgacagcctcgggggccaaaaagcgcttctggatcatcgaggacatgtcgcccttcggcaagcggcggaagacggcgtcctcccggaagatgctggacgagggcatgatgctggagggcttccggcgcttcgacctttacgaggactgcaaggacgcagcttgtcagttctcgctcaaggtcacccactaccactgcacgcgcgagaactgcggctacaagttctgcgggcgcacgcacatgtacaagcacgcgcagcaccacgaccgcgtggacaacctggtgctggacgacttcaagcgcttcaaggcctcactcagctgccacttcgccgactgccccttctcgggcaccagcacgcacttccactgcctgcgctgccgcttccgctgcaccgacagcaccaaggtcacggcgcatcgcaagcaccacggcaaacaggacgtgatcagcgccgcgggcttctgccagttcagctccagcgccgactgcgccgtgcccgactgcaagtacaagctcaagtgctcgcacttccactgcaccttcccgggctgccgccacacggtggtgggcatgtcgcagatggactcgcacaagcgcaagcacgagaagcaggagcgcggcgagcccgcggcagagggccccgcgcccgggcctcccatcagtctggacggctccctgtcgctgggcgccgagccgggctcgctgctcttcctgcagtcggcggccgccggcctgggcctggcgctgggcgacgcgggcgaccccggcccgcccgacgccgccgcccccgggccgcgcgagggcgccgccgccgccgccgccgcagctggggagtcctcgcaggaggacgaggaggaggagctggagctgccggaggaggaggccgaagacgacgaggacgaggacgacgacgaggacgacgacgacgaggacgacgacgaggacgacgacgacgaggacctgcgcaccgactcggaggagtcgctgcccgaggcggcggcggaggcggcgggcgcgggcgcgcggaccccggccttggcggcgctggcggccctgggcgcccccggccccgcgcccactgcagcctcctcgccctagtaatgaactagtccgtaacttgaaagtatttcgatttcttggctttatatatcttgtggaaaggacgacacagtcaggctgcgagccatgtg

SEQ ID NO: 1298 - DNA, 3602 bp, Homo sapiens
  source 1..3602: mol_type = genomic DNA
accgccaccatggatcttggaacagctgagggcacccggtgcacggacccgcctgcaggcaagcccgccatggcgcccaaacgcaagggtggcctgaagctgaacgccatctgcgccaagctgagccgccaggtggtggtggagaagcgagctgacgccggctcccacacggagggcagcccatcgcagccccgggaccaagagcgcagtggccctgagtctggggcagcccgggccccccgcagcgaggaagacaagagacgggcagtgatcgagaagtgggtgaacggggagtacagcgaggagccggcacccacacccgtgttggggcggattgcccgcgagggcctggagctgcctcccgagggtgtctacatggtgcagccccaggggtgcagcgatgaggaagaccacgcggaggagccctccaaggacggcggtgccctggaggagaaggattcggacggggcagcctccaaggaggacagcggccccagcaccaggcaggcttcaggagaggcctcctcgctgcgggactacgcggcctccaccatgaccgagttcctcggcatgtttggctatgatgaccagaacacgcgggacgagctggccaggaagatcagctttgagaagctgcacgcgggctccaccccggaggcagccacctcctccatgctgcccacctccgaggataccctcagcaagcgggcgcggttctctaagtatgaggagtacatccgcaagctcaaggctggcgagcagctctcctggccggcccccagcaccaagaccgaggagcgggtgggcaaggaggtggtgggcaccctgcccggcctgcggctgcccagcagcacggcccacctggagaccaaggccaccatcctgcccctgccgtcgcacagcagtgtccagatgcagaacctggtagcccgggcctccaagtacgacttcttcatccaaaaactgaagaccggcgagaatctgcggccccagaacgggagcacctacaagaagccatccaagtacgacctggagaatgtcaagtacctgcacctcttcaaacccggggagggcagccccgacatgggcggggccatcgccttcaagacaggcaaggtggggcgcccttccaagtacgacgtccggggcatccagaagccaggccccgccaaggttccgcccacccccagcctggctcccgcacccctcgccagcgtgcccagtgcccccagcgcccccgggccagggccagagcctcctgcctccctgtccttcaacactcccgagtacctgaagtcaaccttctccaaaacagactccatcaccacggggaccgtctccactgtcaagaacggactgcccacagataaaccagccgtcactgaagatgtaaacatttaccagaaatatattgccaggttctcgggcagccagcactgtggccacatccactgtgcctaccagtaccgcgagcactaccactgccttgaccctgagtgtaactaccagaggttcacgagtaagcaggacgtgatccgccactacaacatgcacaagaagcgcgacaactccctgcagcacggcttcatgcgtttcagcccgctggacgactgcagcgtctactaccacggctgccacctcaatgggaagagcacccactatcactgcatgcaggtgggctgtaacaaggtgtacacgagcacgtctgacgtgatgacccacgagaacttccacaagaagaatacccagctcattaacgacggcttccagcgcttccgagccaccgaagactgtggcacagccgactgccagttctacggacagaagaccacgcacttccactgcaggcgccccggctgcacattcactttcaagaacaagtgtgacatcgagaagcacaagagctaccacatcaaggacgatgcctacgccaaggacggcttcaagaagttctacaagtacgaggagtgcaagtacgagggctgcgtgtacagcaaggctaccaaccacttccactgcatccgcgccggctgcggcttcaccttcacctccaccagccagatgacctctcacaagcgcaagcatgagcgccggcacatccgctcctcgggcgcgctggggctgccgccctcgctgctgggcgccaaggacacggagcacgaggagtccagcaacgacgaccttgttgacttctccgccctgagcagcaagaactccagcctgagcgcctcccctaccagccagcagtcctctgcgtccctggctgccgccactgccgccaccgaggctgggcccagtgccaccaaacctcccaacagcaagatctcggggctgctgccccagggcctgcctggctcaatccccctggccctggccctctccaactcgggcctgcccacccccacgccctacttccccatactggctggccgtgggagcacctccctgcctgtgggcacccccagcctcctgggtgccgtgtcgtctgggtcagcagcctcagccacccctgacacacccacgctggtcgcctcgggagctggagactcagcccccgtggctgccgcctctgtcccggcaccacccgcctccatcatggagaggatctctgcaagcaagggcctcatctcgcccatgatggccaggctggctgcagctgccctcaagccctctgccacctttgacccaggaagcgggcagcaggtcaccccagccaggttccccccggcccaagtgaagccggaacccggtgagagcaccggcgccccaggcccccacgaagcctcccaggaccgcagtctagacctgactgtgaaggagcccagcaacgaatcaaatggccacgcagtcccggcaaattcatctcttttatcctcgcttatgaataagatgtctcagggcaaccctggcctgggcagcctgctgaacatcaaggcggaagcggaggggagccccgctgcggagccctcgcccttcctaggcaaggccgtgaaggcgctggttcaggagaagttggcagagccctggaaggtgtacctgcgcaggtttggtacaaaggacttctgtgacggccagtgtgacttcctccacaaggcccacttccactgcgtggtggaggaatgcggcgcgctcttcagcaccttggacggggccatcaagcacgcaaacttccacttccggacagagggaggagcagcaaaaggaaacacagaggctgcctttccggcctcggccgccgagaccaaacctcccatggccccctcgtcccctccggtccctcctgtcaccacggccacggtgtcctctctggaggggcccgctcccagcccggcctccgtgccctccacccccaccctgctcgcctggaagcagctggcttccaccataccccagatgcctcagatcccagcgtcagtgcctcacctgcccgcctcgcccttggcaacgacttctctagagaacgccaagccccaggtcaaacccggattcctccagttccaggagaagtagtaatgaactagtccgtaacttgaaagtatttcgatttcttggctttatatatcttgtggaaaggacgacgaagcagcatgtcagataggcat

SEQ ID NO: 1299 - DNA, 1286 bp, Homo sapiens
  source 1..1286: mol_type = genomic DNA
accgccaccatgatggctgcaaaagtggttcctatgcccccaaagccaaagcagtcctttatactgagagttccgccagactccaagctgggccaagacctacttcgagatgccactaacgggcccaagaccatccaccagctagtgctggagcacttcctcaccttcttgcccaagccaagcctggtccagcccagtcagaaagtcaaggagaccttggttattatgaaagatgtgagctcaagccttcagaacagagtgcatcctcgtcccttggtgaagcttctgcccaaaggagtccaaaaggaacaagagacagtgtctctgtatttgaaagctaaccctgaggagctggtggtctttgaggatttgaatgtatttcactgccaggaagaatgtgtgagcttggatcctactcaacaactcacgtcagagaaggaagatgacagcagtgtcggggaaatgatgttactggtcaatggcagtaatcctgaaggtgaagatcctgagagggaacctgtagaaaatgaagattatagagaaaagtcttcagatgatgatgaaatggattcttccttggtctctcagcagcctcccgataaccaggaaaaggaacgactaaatacatccattccacaaaaaaggaaaatgagaaatctgttagttaccattgagaatgatactcctctagaggaactctcaaaatatgtagacatcagtattattgcccttactcgaaatcggaggacaaggagatggtacacttgtccactgtgtgggaaacagtttaatgaaagttcttacctcatttcccaccagaggacccacactggagaaaaaccctatgactgtaatcactgtgggaaaagcttcaatcataaaacaaacctcaataaacatgagcgaattcatacaggagagaaaccttattcctgttctcagtgtggaaaaaacttccgtcagaattctcatcggagtcgtcatgaaggaatccatataagggagaagatatttaagtgtccagaatgtgggaaaaccttcccaaagaatgaggagtttgtgcttcatctgcagagtcatgaggctgagagaccatatggttgcaaaaaatgtgggagaagatttggtcggctgtcaaactgtacccggcatgagaaaacccactcagcctgtaagacccgaaagcagaagtagtaatgaactagtccgtaacttgaaagtatttcgatttcttggctttatatatcttgtggaaaggacgactaggtcctttgtctagactattg

SEQ ID NO: 1300 - DNA, 1286 bp, Homo sapiens
  source 1..1286: mol_type = genomic DNA
accgccaccatgatggctgcaaaagtggttcctatgcccccaaagccaaagcagtcctttatactgagagttccgccagactccaagctgggccaagacctacttcgagatgccactaacgggcccaagaccatccaccagctagtgctggagcacttcctcaccttcttgcccaagccaagcctggtccagcccagtcagaaagtcaaggagaccttggttattatgaaagatgtgagctcaagccttcagaacagagtgcatcctcgtcccttggtgaagcttctgcccaaaggagtccaaaaggaacaagagacagtgtctctgtatttgaaagctaaccctgagctggtggtctttgaggatttgaatgtatttcactgccaggaagaatgtgtgagcttggatcctactcaacaactcacgtcagagaaggaagatgacagcagtgtcggggaaatgatgttactggcagtcaatggcagtaatcctgaaggtgaagatcctgagagggaacctgtagaaaatgaagattatagagaaaagtcttcagatgatgatgaaatggattcttccttggtctctcagcagcctcccgataaccaggaaaaggaacgactaaatacatccattccacaaaaaaggaaaatgagaaatctgttagttaccattgagaatgatactcctctagaggaactctcaaaatatgtagacatcagtattattgcccttactcgaaatcggaggacaaggagatggtacacttgtccactgtgtgggaaacagtttaatgaaagttcttacctcatttcccaccagaggacccacactggagaaaaaccctatgactgtaatcactgtgggaaaagcttcaatcataaaacaaacctcaataaacatgagcgaattcatacaggagagaaaccttattcctgttctcagtgtggaaaaaacttccgtcagaattctcatcggagtcgtcatgaaggaatccatataagggagaagatatttaagtgtccagaatgtgggaaaaccttcccaaagaatgaggagtttgtgcttcatctgcagagtcatgaggctgagagaccatatggttgcaaaaaatgtgggagaagatttggtcggctgtcaaactgtacccggcatgagaaaacccactcagcctgtaagacccgaaagcagaagtagtaatgaactagtccgtaacttgaaagtatttcgatttcttggctttatatatcttgtggaaaggacgatcgcagtttctggtgtctcgaatg

SEQ ID NO: 1301 - DNA, 1325 bp, Homo sapiens
  source 1..1325: mol_type = genomic DNA
accgccaccatggagagccgaaaggacatggttgtgtttctggatgggggtcagcttggcactctggttggcaagagagtctcaaatttgtccgaagccgtgggcagcccgctgccggagccgcccgagaaaatggtgccccgtggttgcctgagccctcgggccgtccctccggccacccgggagcgcggcgggggaggcccggaggaggagccggtagatggactcgcaggcagcgcggcggggccgggcgccgagccccaggtagctggggcggccatgctcggcccaggacccccggccccctcagtcgacagcctctccggacaggggcaacccagtagctcggacaccgagtcggatttctatgaagaaatcgaggtgagctgcaccccggactgcgccaccgggaacgccgagtaccagcacagcaaagggtccggctccgaggcgctggtcggcagtccgaacggagggagcgagacccccaagagcaacggcggcagtggtgggggcggctcgcaaggcaccctggcgtgcagcgccagtgaccagatgcgtcgttaccgcaccgccttcacccgagagcagattgcgcggctggagaaggaattctaccgggagaactacgtatccaggccgcggagatgtgagctggcggccgccctaaacctgccggaaaccaccatcaaggtgtggttccagaaccggcgcatgaaggacaagcggcagcgcctggccatgacgtggccgcacccggcggaccccgccttctacacttacatgatgagccatgcggcggccgcgggcggcctgccctaccccttcccatcgcacctgcccctgccctactactcgccggtgggcctgggcgccgcatccgccgcctccgccgccgcctcgcccttcagcggctcgctgcgcccgctcgacacgttccgcgtgctgtcgcagccctacccgcggcccgaactgctgtgcgccttccgccacccgccgctctaccccgggcccgcgcacggactgggcgcctctgccggcggcccctgctcctgcctcgcctgtcacagcggcccggccaacgggctggcgccccgggctgccgccgcctcggacttcacctgtgcctccacctcccgctcggactccttcctcaccttcgcgccctcggtgctcagcaaggcctcctccgtcgcgctggaccagagggaggaggtgcccctcactagatagtaatgaactagtccgtaacttgaaagtatttcgatttcttggctttatatatcttgtggaaaggacgaaccaaatcccgttgggtgcgagag

SEQ ID NO: 1302 - DNA, 3944 bp, Homo sapiens
  source 1..3944: mol_type = genomic DNA
accgccaccatgggtagcttaaccttccgcgatgtggccatcgagttttctttagaagagtggcagtgcttagacaccgcacagcagaatctgtaccgtaacgtgatgctggagaattaccgcaatttagtctttttaggcattgccgccttcaaaccggatctgattatctttttagaagagggcaaggagagctggaacatgaagcgccatgagatggttgaggaaagcccggtgatctgtagccacttcgcacaagatttatggccggaacaaggtattgaggacagttttcaaaaggtgattctgcgtcgttatgagaaatgcggtcatgagaatttacatctgaagatcggctataccaacgtggacgagtgtaaagtgcacaaagagggctataacaagctgaatcagtctttaacaaccacccagagcaaagttttccagcgtggcaagtatgccaatgttttccataaatgtagcaatagtaatcgccataagatccgccacaccggtaaaaagcatttacagtgcaaagaatacgtgcgtagcttctgcatgctgagtcatttaagccaacacaagcgcatttacacccgcgagaactcttacaagtgtgaggaaggcggtaaggctttcaactggagtagtactttaacatactataaaagcgctcacactggcgaaaaaccttatcgttgtaaggaatgcggtaaggccttcagtaagttctccattttaactaaacacaaggtcatccacaccggtgagaagtcctacaaatgcgaggaatgtggtaaggctttcaatcaaagtgccatcttaaccaaacataaaattatccatactggtgaaaagccgaataagtgtgaggagtgcggtaaggccttcagcaaagtttctactctgaccacccataaagcaattcacgccggtgagaagccgtataaatgcaaggaatgtggtaaggcattctctaaggttagtactttaatcacacataaggctatccatgctggcgagaaaccttataaatgtaaggagtgcggtaaggctttcagcaaattttccattctgactaaacataaagtcatccataccggtgagaaaccttataaatgtgaagaatgtggtaaggcttacaagtggccgagtacattatcttaccacaagaagattcatactggtgagaagccttacaagtgcgaagaatgcggtaagggcttcagcatgttctctattttaacaaaacatgaagtcattcataccggtgaaaagccttacaagtgcgaagaatgcggcaaggcctttaattggagcagcaacttaatggagcataagaagatccacaccggtgaaaccccctataaatgcgaagaatgcggtaagggtttcagtatgtttagtatcttaaccaagcataaagtcatccacaacggtgaaaaaccctataaatgtgaggagtgtgacaaagccactcacgctggtgagaaaccctacaagtgtgaggaatgcggtaaagccttcaattggtcttctaacttaatggagcataaacgtatccataccggtgaaaagccctataaatgtgaggagtgtggtaaaagcttctctacattttctattttgaccaaacataaagttatccatactggcgaaaagccttataagtgcgaggagtgtggtaaagcttataagtggagctccacattaagctatcataagaaaattcacacagtggagaaaccttacaagtgtgaggaatgcggcaaggccttcaaccaaagcgccattttaattaaacacaagcgtattcacaccggtgaaaagccctataaatgcgaagagtgtggtaagacattcagcaaagtgagcaccttaactacccataaagctattcacgctggcgagaaaccctacaagtgcaaagagtgtggcaagacatttattaaagttagcactttaacaacacataaggccattcatgctggcgaaaaaccctacaagtgcaaagaatgtggcaaagcatttagcaagttttctatcttgaccaaacacaaagttattcacaccggcgaaaagccctataaatgtgaggagtgtggtaaagcttttaattggtcttctaatctgatggagcataagcgcattcacactggcgaaaagccttacaaatgcgaggagtgcggcaagagtttcagcacctttagcgtgttaacaaagcacaaagttattcataccggcgaaaagccttacaaatgcgaagagtgtggcaaagcctataaatggtctagcaccttaagctaccacaagaaaattcatacagtcgagaaaccttataagtgcgaggagtgcggcaaagcctttaaccgcagcgccattttaattaagcacaaacgtattcataccgacgaaaaaccttacaagtgtgaagagtgtggcaaaacctttagtaaagtgtctactttaactacccacaaggccatccacgccggtgaaaaaccgtacaagtgtaaagagtgcggtaaggcttttagcaaattcagtatcttgacaaagcataaggtgatccacactggcgaaaaaccttataaatgcgaggaatgcggcaaggcatacaaatggccgtctactctgtcttatcataagaagattcacactggtgaaaaaccttataagtgcgaggagtgtggcaaaggttttagcatgtttagcattttaacaaagcatgaagtgattcacaccggtgagaaaccttataaatgtgaggaatgcggcaaagcctttagttggctgagcgttttcagcaaacataagaaaacccacgctggtgaaaagttttacaagtgcgaagcatgtggtaaagcctataagagcagcagcactttaagctatcacaagaaaattcataccgaagaaaagccttataagtacgaggaatgtggtaaaggctttagcaccttttctattctgactaagcacaaagtgatccacaccggcgaaaaaccttacaaatgcgaggagtgtggtaaggcctttaactggtcctctaacttaatggagcacaaaaagattcacaccggcgagactccttacaaatgcgaagaatgcgataaagcctttagctggccgagttctctgacagagcataaggctacccacgctggtgaaaaaccttacaagtgtgaagaatgcggcaaagctttctcttggcctagccgtttaactgagcataaagcaacccatgctggtgaagagccttataaatgcgaggagtgtggcaaagctttcaattggtcctctaatttgatggaacacaaacgcattcacactggcgaaaaaccctataaatgcgaggagtgcggtaaaagttttagcactttcagtattttaactaaacataaggtcattcatactggcgaaaaaccctataaatgcgaggaatgcggcaaggcctataagtggagtagcacattatcctaccataagaaaattcacaccgtcgaaaagccgtacaaatgtgaggagtgcggcaaaggttttgttatgttttccattttagccaaacataaggttatccatactggcgagaagctgtacaaatgtgaggaatgtggtaaggcttacaagtggcctagcactttacgttatcacaagaaaattcacaccggtgagaagccttacaaatgtgaagagtgtggtaaagccttcagtacattttccatcttaactaagcacaaagtcattcataccggtgaaaaaccgtataaatgtgaggaatgcggtaaggctttcagctggctgagcgtgttcagcaagcataagaagatccataccggcgagaagctgtagtaatgaactagtccgtaacttgaaagtatttcgatttcttggctttatatatcttgtggaaaggacgatgtgtcggtaccaatctttctgct

SEQ ID NO: 1303 - DNA, 1532 bp, Homo sapiens
  source 1..1532: mol_type = genomic DNA
accgccaccatgatggaaagaataagaaaagagatgattctgatggagagagggctgcacagccctacggcgggcaagagattctccaatttgtccaactcggctggcaatgctgtgctcgaggccctggaaaattcgcagcacccggctcgcctaagcccgcgcctgccgtctgcccccctgcacagcgctctgggagaactccccgccaagggcaaattcgaaatagacactttgttcaacctgcagcacacgggcagcgaaagcaccgtctcctccgaaatctcctccgccgccgagagccgcaagaagccgggccattattcagaggcggccgctgaggccgacatgagcagcgacgtggaggtgggctgctccgcgcttcgctcccccgggggcctcggcgccgctcagcttaaggaaaacaatggcaaagggtacgcagagagcggctcggctgccggcaccacgacgtcggcgtcgggctcaggcctcggaagcctgcatggaggcagcggaggcagcggcgggagcgcggcgctgggtggctccggctctggcgcggatcaagtgcggcgctaccgtacggcgttcacccgcgagcagatcgcgcgcctggagaaggagttctaccgggagaactatgtgtcgcggccccgccggtgcgagctggccgcggcactcaacctgcccgaaaccaccatcaaggtgtggttccagaaccggcgcatgaaggacaagcggcagcgcctggccatgtcctggccgcacccagccgaccccagcttctacacctacatgatgacgcacgcggccgccaccggaagcctgccctaccccttccactcgcacgtgccgctgcactactacccgcacgtgggcgtcacggcggcggcggccgcggctgcagcctcaggcgcggcggccgcggcttcgtcgcccttcgctacttccatccggccactggacaccttccgcgccctctcgcacccctactctcggccggagctgctgtgtagcttccgccaccctggtctctaccaggctcccgcggccgccgcggggctcaacagcgcggcctctgccgcggcagccgcggcagccgcagcggctgcggcctcctcggcggcggcggccggcgcgccccccagcggcggctctgcaccctgctcgtgcctcagttgccacagcagtcagtcggcggcggcagccgcggcagcagctgccgcagccctgggttcccggggtggcggtggcggcggcggtggtggtggtggcggcggcggcgggggcgccggggccgggggaggctcggacttcggctgcagcgcggcggcgccgcgttccgagagcggcttcctgccctactcggccgcggtgcttagtaagacggccgtgagcccgccggaccagagggacgaggctccgctcaccagatagtaatgaactagtccgtaacttgaaagtatttcgatttcttggctttatatatcttgtggaaaggacgagaagtgaacgaagtgatcacgtca

SEQ ID NO: 1304 - DNA, 1199 bp, Homo sapiens
  source 1..1199: mol_type = genomic DNA
accgccaccatggggccctgcagcggctcccgcctggggcccccagaggcagagtcgccctcccagccccctaagaggaggaagaagaggtacctgcgacatgacaagcccccctacacctacttggccatgatcgccttggtgattcaggccgctccctcccgcagactgaagctggcccagatcatccgtcaggtccaggccgtgttccccttcttcagggaagactacgagggctggaaagactccattcgccacaacctttcctccaaccgatgcttccgcaaggtgcccaaggaccctgcaaagccccaggccaagggcaacttctgggcggtcgacgtgagcctgatcccagctgaggcgctccggctgcagaacaccgccctgtgccggcgctggcagaacggaggtgcgcgtggagccttcgccaaggacctgggcccctacgtgctgcacggccggccataccggccgcccagtcccccgccaccacccagtgagggcttcagcatcaagtccctgctaggagggtccggggagggggcaccctggccggggctagctccacagagcagcccagttcctgcaggcacagggaacagtggggaggaggcggtgcccaccccaccccttccctcttctgagaggcctctgtggcccctctgcccccttcctggccccacgagagtggagggggagactgtgcaggggggagccatcgggccctcaaccctctccccagagcctagggcctggcctctccacttactgcagggcaccgcagttcctgggggacggtccagcgggggacacagggcctccctctgggggcagctgcccacctcctacttgcctatctacactcccaatgtggtaatgcccttggcaccaccacccacctcctgtccccagtgtccgtcaaccagccctgcctactggggggtggcccctgaaacccgagggcccccagggctgctctgcgatctagacgccctcttccaaggggtgccacccaacaaaagcatctacgacgtttgggtcagccaccctcgggacctggcggcccctggcccaggctggctgctctcctggtgcagcctgtagtaatgaactagtccgtaacttgaaagtatttcgatttcttggctttatatatcttgtggaaaggacgactttgttggattccaccacctacc

SEQ ID NO: 1305 - DNA, 350 bp, Homo sapiens
  source 1..350: mol_type = genomic DNA
accgccaccatggccaacctggagcgcaccttcatcgccatcaagccggacggcgtgcagcgcggcctggtgggcgagatcatcaagcgcttcgagcagaagggattccgcctcgtggccatgaagttcctccgggcctctgaagaacacctgaagcagcactacattgacctgaaagaccgaccattcttccctgggctggtgaagtacatgaactcagggccggttgtggccatggaacatcattcatggcagtagtaatgaactagtccgtaacttgaaagtatttcgatttcttggctttatatatcttgtggaaaggacgactacagtgtcgcgagctcggaggc

SEQ ID NO: 1306 - DNA, 503 bp, Homo sapiens
  source 1..503: mol_type = genomic DNA
accgccaccatgatgctcaactcagacaccatggagctggacctgccgcccacccactcagagactgagtcgggcttcagtgactgtgggggcggggcgggccctgatggtgccgggcctgggggtccgggagggggccaggcccgaggcccagagccgggagagcctggccggaaagacctgcagcatctgagccgcgaggagcgccggcgccggcgccgcgccacagccaagtaccgcacggcccacgccacgcgagaacgcatccgcgtggaagccttcaacctggccttcgccgagctgcgcaagctgctgcctacgctgccccccgacaagaagctctccaagattgagattctgcgcctggccatctgctatatctcctacctgaaccacgtgctggacgtctagtaatgaactagtccgtaacttgaaagtatttcgatttcttggctttatatatcttgtggaaaggacgatctagacgtgtgaagggagctagg

SEQ ID NO: 1307 - DNA, 839 bp, Homo sapiens
  source 1..839: mol_type = genomic DNA
accgccaccatgacctccagctacgggcacgttctggagcggcaaccggcgctgggcggccgcttggacagcccgggcaacctcgacaccctgcaggcgaaaaagaacttctccgtcagtcacctgctagacctggaggaagccggggacatggtggcggcacaggcggatgagaacgtgggcgaggctggccggagcctgctggagtcgccgggactcaccagcggcagcgacaccccgcagcaggacaatgaccagctgaactcagaagaaaaaaagaagagaaagcagcgaaggaataggacaaccttcaatagcagccagctgcaggctttggagcgtgtctttgagcggacacactatcctgatgcttttgtgcgagaagaccttgcccgccgggtgaacctcaccgaggcgagagtgcaggtgtggtttcagaaccgaagagccaagttccgcaggaatgagagagccatgctagccaataaaaacgcttccctcctcaaatcctactcaggagacgtgactgctgtggagcagcccatcgtacctcgtcctgctccgagacccaccgattatctctcctgggggacagcgtctccgtacagcgccatggctacttattctgccacatgtgccaacaatagccctgcacagggcatcaacatggccaacagcattgccaacctgagactgaaggccaaggaatatagtttacagaggaaccaggtgccaacagtcaactagtaatgaactagtccgtaacttgaaagtatttcgatttcttggctttatatatcttgtggaaaggacgagtgagaggtgattctaatggctac

SEQ ID NO: 1308 - DNA, 755 bp, Homo sapiens
  source 1..755: mol_type = genomic DNA
accgccaccatgacctccagctacgggcacgttctggagcggcaaccggcgctgggcggccgcttggacagcccgggcaacctcgacaccctgcaggcgaaaaagaacttctccgtcagtcacctgctagacctggaggaagccggggacatggtggcggcacaggcggatgagaacgtgggcgaggctggccggagcctgctggagtcgccgggactcaccagcggcagcgacaccccgcagcaggacaatgaccagctgaactcagaagaaaaaaagaagagaaagcagcgaaggaataggacaaccttcaatagcagccagctgcaggctttggagcgtgtctttgagcggacacactatcctgatgcttttgtgcgagaagaccttgcccgccgggtgaacctcaccgaggcgagagtgcaggtgtggtttcagaaccgaagagccaagttccgcaggaatgagagagccatgctagccaataaaaacgcttccctcctcaaatcctactcaggagacgtgactgctgtggagcagcccatcgtacctcgtcctgctccgagacccaccgattatctctcctgggggacagcgtctccgtacagatcctcgtccctcccaagatgttgtttacacgaggggcttcataacggattctagtaatgaactagtccgtaacttgaaagtatttcgatttcttggctttatatatcttgtggaaaggacgacgcggtgctgatcccgcttctggt

SEQ ID NO: 1309 - DNA, 863 bp, Homo sapiens
  source 1..863: mol_type = genomic DNA
accgccaccatggacagcgcggccgccgccttcgccctggacaagccggcgctgggcccggggccgccgccgcctccacccgcgctggggcccggcgactgcgcccaggcgcgcaagaacttctcggtgagccacctcctggacctggaagaggtggcggcggccgggcggctggcggcgcgccccggggccagggccgaggcgcgggagggcgcagcacgggagccgtccgggggcagcagcggcagcgaggcggcgccgcaggatggtgagtgtcccagcccggggcgcggtagcgccgccaagcggaagaagaagcagcggcggaaccgcaccacgttcaacagcagccaactgcaggcgctggagcgcgtgttcgagcgcacgcactaccccgacgcctttgtgcgcgaggagcttgcccggcgcgtcaacctcagcgaggcgcgcgttcaggtctggtttcagaaccgccgcgccaagttccgcaggaatgaaagggccatgctggccagccgctctgcctcgctgctcaagtcctacagccaggaggccgccatcgagcagcccgtggctccccggcccaccgccctgagtccagattatctctcctggacagcctcgtccccctacagcacagtgccaccctacagccctgggagctcaggccccgcaaccccaggggtcaacatggccaacagcatcgccagcctccgtctcaaggccaaggagttcagcctgcaccacagccaggtgcctacggtgaactagtaatgaactagtccgtaacttgaaagtatttcgatttcttggctttatatatcttgtggaaaggacgatttgcagcttgaccacacgtctgc

SEQ ID NO: 1310 - DNA, 827 bp, Homo sapiens
  source 1..827: mol_type = genomic DNA
accgccaccatgtcagacaagctcaaggaacgcaaaagaacccccgtttctcataaagtgatagaaaagcggaggagggacaggatcaaccgctgcttgaacgagctgggcaagacagtgcccatggccttggcgaagcagagttccgggaagctggagaaggcggagatcctcgagatgaccgttcagtacctgagagcactgcactccgctgattttccccggggaagggaaaaagaacttctagcggagtttgccaactacttccactatggctaccacgagtgcatgaagaacctggtgcattacctcaccacggtggagcggatggagaccaaggacacgaagtacgcgcgcatcctcgccttcttgcagtccaaggcccgcctgggcgcggagcccgcctttccgccgctgggttcgctcccggagccggatttctcctatcagctgcaccctgcggggcccgaattcgctggtcacagcccgggcgaggccgctgtgttcccgcagggctctggtgccgggcctttcccctggccgcctggcgcggcccgcagccccgcgctgccctacctgcccagcgcgccagtgccgctcgctagcccagcgcagcagcacagccccttcctgacaccggtgcagggcctggaccggcattacctcaacctgatcggccacgcgcaccccaacgcccttaacctgcacacgccccagcaccccccggtgctctagtaatgaactagtccgtaacttgaaagtatttcgatttcttggctttatatatcttgtggaaaggacgatgatggtgttaacatcggcctgac

SEQ ID NO: 1311 - DNA, 830 bp, Homo sapiens
  source 1..830: mol_type = genomic DNA
accgccaccatgtcagacaagctcaaggaacgcaaaagaacccccgtttctcataaagtgatagaaaagcggaggagggacaggatcaaccgctgcttgaacgagctgggcaagacagtgcccatggccttggcgaagcagagttccgggaagctggagaaggcggagatcctcgagatgaccgttcagtacctgagagcactgcactccgctgattttccccggggaagggaaaaagcagaacttctagcggagtttgccaactacttccactatggctaccacgagtgcatgaagaacctggtgcattacctcaccacggtggagcggatggagaccaaggacacgaagtacgcgcgcatcctcgccttcttgcagtccaaggcccgcctgggcgcggagcccgcctttccgccgctgggttcgctcccggagccggatttctcctatcagctgcaccctgcggggcccgaattcgctggtcacagcccgggcgaggccgctgtgttcccgcagggctctggtgccgggcctttcccctggccgcctggcgcggcccgcagccccgcgctgccctacctgcccagcgcgccagtgccgctcgctagcccagcgcagcagcacagccccttcctgacaccggtgcagggcctggaccggcattacctcaacctgatcggccacgcgcaccccaacgcccttaacctgcacacgccccagcaccccccggtgctctagtaatgaactagtccgtaacttgaaagtatttcgatttcttggctttatatatcttgtggaaaggacgaattgagaccaacatgcctaagtta

SEQ ID NO: 1312 - DNA, 872 bp, Homo sapiens
  source 1..872: mol_type = genomic DNA
accgccaccatgcaagctgtagtgcccttgaacaagatgacagccatctcaccagaacctcaaactctggcctcgactgaacaaaatgaggtcccaagagtggttacttctggggaacaagaagctattttaagaggaaatgctgctgatgcagagtctttcagacagaggtttaggtggttttgttactcagaagtagctggacccaggaaagctctgagtcaactctgggagctctgcaatcagtggctgagaccagacattcacacgaaagaacagattttagagcttctggtgtttgagcagttcctgaccattttgcctggggagatcaggatttgggtaaagtcacaacatcctgagagtagtgaggaagtggtgaccctaatagaagatttgacccagatgcttgaagaaaaagatccagtctctcaagattctactgtttcccaagaggagaactcaaaagaggataaaatggtcactgtttgtcccaatactgagtcctgtgaatctataacattgaaggatgtagctgtgaacttttcaagaggagagtggaagaagctggagccttttcaaaaggagctatataaggaagtgctactggaaaacctcaggaacctagaatttctggactttccagtttcaaaattagagttgatttcccagctaaagtgggttgaattgccatggctgctggaagaagtctcaaaaagctcccgactagacatacatggagcagtaaaaaagatgcagatgttctctgaggctgaatagtaatgaactagtccgtaacttgaaagtatttcgatttcttggctttatatatcttgtggaaaggacgaaatacttcgcgttagatgtcttca

SEQ ID NO: 1313 - DNA, 2336 bp, Homo sapiens
  source 1..2336: mol_type = genomic DNA
accgccaccatgcaagctgtagtgcccttgaacaagatgacagccatctcaccagaacctcaaactctggcctcgactgaacaaaatgaggtcccaagagtggttacttctggggaacaagaagctattttaagaggaaatgctgctgatgcagagtctttcagacagaggtttaggtggttttgttactcagaagtagctggacccaggaaagctctgagtcaactctgggagctctgcaatcagtggctgagaccagacattcacacgaaagaacagattttagagcttctggtgtttgagcagttcctgaccattttgcctggggagatcaggatttgggtaaagtcacaacatcctgagagtagtgaggaagtggtgaccctaatagaagatttgacccagatgcttgaagaaaaagatccagtctctcaagattctactgtttcccaagaggagaactcaaaagaggataaaatggtcactgtttgtcccaatactgagtcctgtgaatctataacattgaaggatgtagctgtgaacttttcaagaggagagtggaagaagctggagccttttcaaaaggagctatataaggaagtgctactggaaaacctcaggaacctagaatttctggactttccagtttcaaaattagagttgatttcccagctaaagtgggttgaattgccatggctgctggaagaagtctcaaaaagctcccgactagatgaatcagctttagataaaataatagaaaggtgcctcagggatgatgatcatggcttgatggaagaatcccagcaatattgtggcagctcagaggaggatcacggtaatcagggaaattcaaaaggaagagtcgcacaaaacaaaactcttgggagtggcagtaggggtaagaaatttgacccagataaaagcccctttggacataatttcaaagaaacttcagacttaattaaacatctgagagtctacttgaggaagaaatctcggaggtataatgaaagcaagaaacccttcagttttcattcagaccttgttctgaaccgcaaggagaaaaccgccggagaaaagtcacggaaatctaatgatggtgggaaagtcctgagtcactcttcagctcttactgaacatcagaaacgtcagaagattcatttgggggataggtcccaaaaatgcagtaagtgtgggataatctttattagaagatcaactctttctaggagaaaaacccctatgtgtgagaaatgtcggaaagattcatgtcaagaagcagccttaaataaagatgagggaaatgagagtggagaaaaaactcataaatgtagtaagtgtggaaaagcctttggctatagcgcctcactcaccaaacatcggagaattcacactggagaaaaaccctatatgtgtaatgaatgtggaaaagcttttagtgatagttcatcgctcacaccacatcatagaactcatagtggagagaaacccttcaaatgtgatgactgtgggaaaggtttcaccctaagtgctcacctcattaaacatcagagaattcatactggagaaaaaccttataaatgtaaagactgtgggagaccctttagtgacagttcatctcttattcaacatcagcgaattcatactggagaaaaaccctatacatgtagcaattgtggaaaatccttcagtcatagctcatccctttccaaacatcagagaattcatactggagagaaaccctataaatgtggcgaatgtggaaaagcctttaggcagaattcatgccttacccggcatcagagaattcacactggagaaaaaccatatttgtgtaatgattgcggaatgacttttagccattttacgtctgtgatttatcatcaaagacttcattcaggagaaaaaccctacaaatgtaaccagtgtgagaaagccttcccaacccattcactgctaagtcgtcatcagagaattcatactggtgtaaaaccttataaatgtaaagaatgtgggaagtccttcagtcagagttcatctcttaatgagcaccaccgaattcatacaggagagaaaccctatgagtgtaactattgtggtgcaacctttagtcgaagctcaatccttgtagaacacctaaaaattcataccggaaggagagaatatgaatgtaacgaatgtgagaagacatttaaaagtaattcaggcctcattagacatcggggatttcactctgcagagtagtaatgaactagtccgtaacttgaaagtatttcgatttcttggctttatatatcttgtggaaaggacgacctgagctccacgaactgattgga

SEQ ID NO: 1314 - DNA, 2597 bp, Homo sapiens
  source 1..2597: mol_type = genomic DNA
accgccaccatggccagctcggagactgagatccgctgggctgagcctggcctggggaagggcccccagcggcggcgctgggcctgggccgaggacaagagggatgtggatagaagtagttcacaaagctgggaagaagagagactctttcccaatgccaccagccccgagctcctagaggacttccgcctggcccagcagcacctgccgcccctggagtgggacccacacccgcagcccgatgggcatcaggattccgagtcaggagagacttcgggagaagaggctgaagcagaggatgtggacagcccagcaagttcccatgagcctcttgcctggctcccccagcagggccgtcagctggacatgactgaagaggagccagatgggaccctcggaagtctggaggttgaggaggctggagagagctcctcaaggttggggtatgaggctggtctcagcttggaaggccatggaaacaccagccccatggctcttgggcatggtcaggccaggggctgggtggcttctggcgaacaagccagtggggacaaactttctgaacattccgaggtcaacccatccgttgaactcagcccggcaaggtcctggagcagtgggacagtgagcctcgaccaccctagtgacagccttgattctacctgggaaggagagaccgatggcccccagcccactgccctggcagaaaccttgccagagggccccagccaccacctcctaagcccagatggcagaactggaggcagtgttgctcgggcaacccccatggaattccaggactcctcagctcccccagcccagagtccgcagcatgccacagatagatggaggagagaaacgaccagattcttctgccctcagcccaaggaacacatctggaagcagacaaagacgtcacctaagccactcccttcccgattcattggctccatcagccccctgaatccccagcccaggccaacgcggcagggcaggccgctgcccagacagggagccactctggctggccgctcctcttctaatgcccccaagtatggccgggggcagttgaactacccactccctgatttctccaaggtagggccccgggtgagattccccaaagatgagagctaccgtccccccaagtccagaagccacaacaggaagcctcaggcccctgccaggcccctcatcttcaagtctccagctgagattgtgcaggaggtgctgttgagcagtggagaagcagccctggcaaaggacacgcctcctgcccaccctatcaccagggtaccccaagaatttcagacgcctgagcaagccactgagctggtccatcagctccaggaagactaccacaggctcctcaccaagtacgctgaggccgagaacaccattgaccagctacgcctcggggccaaggtgaacctgttctctgacccaccccagcccaaccacagcatccacacgggaatggtgccccaggggaccaaggtcttgtccttcaccatcccacagccccgctctgcagagtggtggccgggcccggccgaggacccccaggcctctgcggcctcagggtggccatcagctcgaggagacttgagcccctcctcgcttaccagcatgcccaccctggggtggcttccggagaaccgggacatctctgaggaccagtcctcagcagagcagacccaggcactggcttctcaggccagccagttcctggccaaggtggagtcctttgaaagactgatacaggcaggacgtctcatgccccaggaccaagtcaagggcttccagcggctgaaggctgcccacgcggccctagaggaggagtacctgaaggcttgtcgggagcaacaccctgcccagccgcttgccggctccaaggggacgcctggaagatttgatcctcgcagggagctggaggcagagatataccgtctgggaagctgcctggaagagctgaaggaacacatagaccagacccagcaagagcctgagccgcccgggtcagactcagctctggacagcaccccagccctgccctgcctccatcagccaacgcacctgcctgctccttctggacaagcccccatgccagccatcaagacctcctgccctgagcctgctaccaccactgccgccgccagcactggcccctgcccattgcacgtaaatgtggaggtgagctctggcaacagtgaggtggaggacaggccacaggaccccctggcccgactcaggcacaaggagctgcagatggagcaagtttaccatggcctcatggagcggtacctcagtgtgaagtctctcccagaagccatgagaatggaggaggaggaagaaggagaggaggaggaggaggaagaggggggaggtgactccctggaagttgatggggtggctgcaactccagggaaagcagaggccaccagggtcctcccaaggcagtgcccggtgcaggctgagaaaagtcatggggctcccctggagtagtaatgaactagtccgtaacttgaaagtatttcgatttcttggctttatatatcttgtggaaaggacgaccgataataattcgatataagcac

SEQ ID NO: 1315 - DNA, 4421 bp, Homo sapiens
  source 1..4421: mol_type = genomic DNA
accgccaccatggccagctcggagactgagatccgctgggctgagcctggcctggggaagggcccccagcggcggcgctgggcctgggccgaggacaagagggatgtggatagaagtagttcacaaagctgggaagaagagagactctttcccaatgccaccagccccgagctcctagaggacttccgcctggcccagcagcacctgccgcccctggagtgggacccacacccgcagcccgatgggcatcaggattccgagtcaggagagacttcgggagaagaggctgaagcagaggatgtggacagcccagcaagttcccatgagcctcttgcctggctcccccagcagggccgtcagctggacatgactgaagaggagccagatgggaccctcggaagtctggaggttgaggaggctggagagagctcctcaaggttggggtatgaggctggtctcagcttggaaggccatggaaacaccagccccatggctcttgggcatggtcaggccaggggctgggtggcttctggcgaacaagccagtggggacaaactttctgaacattccgaggtcaacccatccgttgaactcagcccggcaaggtcctggagcagtgggacagtgagcctcgaccaccctagtgacagccttgattctacctgggaaggagagaccgatggcccccagcccactgccctggcagaaaccttgccagagggccccagccaccacctcctaagcccagatggcagaactggaggcagtgttgctcgggcaacccccatggaattccaggactcctcagctcccccagcccagagtccgcagcatgccacagatagatggaggagagaaacgaccagattcttctgccctcagcccaaggaacacatctggaagcagacaaagacgtcacctaagccactcccttcccgattcattggctccatcagccccctgaatccccagcccaggccaacgcggcagggcaggccgctgcccagacagggagccactctggctggccgctcctcttctaatgcccccaagtatggccgggggcagttgaactacccactccctgatttctccaaggtagggccccgggtgagattccccaaagatgagagctaccgtccccccaagtccagaagccacaacaggaagcctcaggcccctgccaggcccctcatcttcaagtctccagctgagattgtgcaggaggtgctgttgagcagtggagaagcagccctggcaaaggacacgcctcctgcccaccctatcaccagggtaccccaagaatttcagacgcctgagcaagccactgagctggtccatcagctccaggaagactaccacaggctcctcaccaagtacgctgaggccgagaacaccattgaccagctacgcctcggggccaaggtgaacctgttctctgacccaccccagcccaaccacagcatccacacgggaatggtgccccaggggaccaaggtcttgtccttcaccatcccacagccccgctctgcagagtggtggccgggcccggccgaggacccccaggcctctgcggcctcagggtggccatcagctcgaggagacttgagcccctcctcgcttaccagcatgcccaccctggggtggcttccggagaaccgggacatctctgaggaccagtcctcagcagagcagacccaggcactggcttctcaggccagccagttcctggccaaggtggagtcctttgaaagactgatacaggcaggacgtctcatgccccaggaccaagtcaagggcttccagcggctgaaggctgcccacgcggccctagaggaggagtacctgaaggcttgtcgggagcaacaccctgcccagccgcttgccggctccaaggggacgcctggaagatttgatcctcgcagggagctggaggcagagatataccgtctgggaagctgcctggaagagctgaaggaacacatagaccagacccagcaagagcctgagccgcccgggtcagactcagctctggacagcaccccagccctgccctgcctccatcagccaacgcacctgcctgctccttctggacaagcccccatgccagccatcaagacctcctgccctgagcctgctaccaccactgccgccgccagcactggcccctgcccattgcacgtaaatgtggaggtgagctctggcaacagtgaggtggaggacaggccacaggaccccctggcccgactcaggcacaaggagctgcagatggagcaagtttaccatggcctcatggagcggtacctcagtgtgaagtctctcccagaagccatgagaatggaggaggaggaagaaggagaggaggaggaggaggaagaggggggaggtgactccctggaagttgatggggtggctgcaactccagggaaagcagaggccaccagggtcctcccaaggcagtgcccggtgcaggctgagaaaagtcatggggctcccctggaggaggccacggagaagatggtatctatgaagccaccaggtttccaggcatccctggctagagacgggcacatgtcaggcctgggcaaggctgaggcagcccctccaggccctggcgtgccaccccaccctccaggcaccaagtccgcagcatcccaccaaagtagtatgaccagcctggagggaagcggcatctctgagcgccttccacagaagcctttgcaccgaggcggtgggccccacctggaggagacctggatggcgtccccagagacagacagtggctttgtgggctcagaaacaagcagagtttcacccctcacccagactccagagcaccggctctcccacatcagcacagcaggaacattagcccagccctttgctgcatctgtgcccagggatggagcttcctaccccaaggccaggggttctctgattcccagaagagccacagagcccagcacaccccggagccaagcacagaggtacctctccagcccaagtgggcctctccggcagagggcacccaacttcagcctggagcggacactggcagccgagatggcggttcctggctcagagtttgaggggcacaaacggatttctgaacagccccttcccaacaagacaatcagcccacccccagcccccgcccctgccgctgcgcctctaccctgtggaccaacagagaccatccccagcttcctgctcaccagggcagggcgagaccaggccatctgtgagctgcaagaagaggtgtcccggcttcgtctgcggctggaagacagcctgcaccagccactccagggcagcccgacacgcccagcatctgcctttgaccgccccgcccggacccgcggccggccagcagactccccagccacctggggctcccattatggcagtaaatccacagagagattgcctggtgagcctagaggtgaagagcagattgtccctccaggaaggcagcgagccaggtcttcctcagtgcctcgggaggtgctccgactgtccctgagttcagaatctgagctgccctccctaccactgttctctgagaagagcaagaccaccaaggacagtccacaggcagctcgggatggaaagagaggggtgggcagtgctggatggccagacagggtcaccttccggggccaatacacaggccacgaataccatgttctgtcccctaaggcggtcccaaaaggcaatggcacagtctcctgtccccactgccggcccattaggacccaggatgcgggtggtgctgtcacaggggacccactgggaccgcctcccgctgatacccttcagtgtcccctgtgtggtcaagttgggtctcccccagaggcagatggtccaggctcagccacctctggggcagagaaggccaccacgaggagaaaagcatcttcaactcccagccccaagcagaggagcaagcaggcggggtcgtcgccacgcccaccccccggactgtggtatctggcaacagcgcccccagcaccagcccctccagcctttgcctacatctcctcggttcccatcatgccttatccacctgccgctgtgtactatgcgcctgcaggacctacctcagcccaaccagctgccaagtggccgcccacagcctctcccccaccagcccggagacaccggcactccatccagctcgacctgggcgacctagaggagctcaacaaggccctgagccgggccgtgcaggctgccgagagcgtccgctctaccaccaggcagatgagaagctcgctgtcagccgacctgcgccaggctcacagcctgcggggctcctgcctcttctagtaatgaactagtccgtaacttgaaagtatttcgatttcttggctttatatatcttgtggaaaggacgatgaccaatatcgaggtttcgtacc

SEQ ID NO: 1316 - DNA, 584 bp, Homo sapiens
  source 1..584: mol_type = genomic DNA
accgccaccatggccctcccgacaccctcggacagcaccctccccgcggaagcccggggacgaggacggcgacggagactcgtttggaccccgagccaaagcgaggccctgcgagcctgctttgagcggaacccgtacccgggcatcgccaccagagaacggctggcccaggccatcggcattccggagcccagggtccagatttggtttcagaatgagaggtcacgccagctgaggcagcaccggcgggaatctcggccctggcccgggagacgcggcccgccagaaggccggcgaaagcggaccgccgtcaccggatcccagaccgccctgctcctccgagcctttgagaaggatcgctttccaggcatcgccgcccgggaggagctggccagagagacgggcctcccggagtccaggattcagatctggtttcagaatcgaagggccaggcacccgggacagggtggcagggcgcccgcgcaggtctagtaatgaactagtccgtaacttgaaagtatttcgatttcttggctttatatatcttgtggaaaggacgaggctttcccgaaatgctgcacggg

SEQ ID NO: 1317 - DNA, 1376 bp, Homo sapiens
  source 1..1376: mol_type = genomic DNA
accgccaccatggccctcccgacaccctcggacagcaccctccccgcggaagcccggggacgaggacggcgacggagactcgtttggaccccgagccaaagcgaggccctgcgagcctgctttgagcggaacccgtacccgggcatcgccaccagagaacggctggcccaggccatcggcattccggagcccagggtccagatttggtttcagaatgagaggtcacgccagctgaggcagcaccggcgggaatctcggccctggcccgggagacgcggcccgccagaaggccggcgaaagcggaccgccgtcaccggatcccagaccgccctgctcctccgagcctttgagaaggatcgctttccaggcatcgccgcccgggaggagctggccagagagacgggcctcccggagtccaggattcagatctggtttcagaatcgaagggccaggcacccgggacagggtggcagggcgcccgcgcaggcaggcggcctgtgcagcgcggcccccggcgggggtcaccctgctccctcgtgggtcgccttcgcccacaccggcgcgtggggaacggggcttcccgcaccccacgtgccctgcgcgcctggggctctcccacagggggctttcgtgagccaggcagcgagggccgcccccgcgctgcagcccagccaggccgcgccggcagaggggatctcccaacctgccccggcgcgcggggatttcgcctacgccgccccggctcctccggacggggcgctctcccaccctcaggctcctcggtggcctccgcacccgggcaaaagccgggaggaccgggacccgcagcgcgacggcctgccgggcccctgcgcggtggcacagcctgggcccgctcaagcggggccgcagggccaaggggtgcttgcgccacccacgtcccaggggagtccgtggtggggctggggccggggtccccaggtcgccggggcggcgtgggaaccccaagccggggcagctccacctccccagcccgcgcccccggacgcctccgcctccgcgcggcaggggcagatgcaaggcatcccggcgccctcccaggcgctccaggagccggcgccctggtctgcactcccctgcggcctgctgctggatgagctcctggcgagcccggagtttctgcagcaggcgcaacctctcctagaaacggaggccccgggggagctggaggcctcggaagaggccgcctcgctggaagcacccctcagcgaggaagaataccgggctctgctggaggagctttagtaatgaactagtccgtaacttgaaagtatttcgatttcttggctttatatatcttgtggaaaggacgactgctgagctgggcacatgcccta

SEQ ID NO: 1318 - DNA, 2099 bp, Homo sapiens
  source 1..2099: mol_type = genomic DNA
accgccaccatgcagacagcagaccaccctgaggtggtcccattcctctataaccggcagcaacgtgcccactctctgtttttggcctcggcggagttctgcaacatcctctctagggtcctgtctcgggcccggagccggccagccaagctctatgtctacatcaatgagctctgcactgttctcaaggcccactcagccaaaaagaagctgaacttggcccctgccgccaccacctccaatgagccctctgggaataaccctcccacacacctctccttggaccccacaaatgctgaaaacactgcctctcagtctccaaggacccgtggttcccggcggcagatccagcgtttggagcagctgctggcgctctatgtggcagagatccggcggctgcaggaaaaggagttggatctctcagaattggatgacccagactccgcatacctgcaggaggcacggttgaagcgtaagctgatccgcctctttgggcgactatgtgagctgaaagactgctcttcactgaccggccgtgtcatagagcagcgcatcccctaccgtggcacccgctacccagaggttaacaggcgcattgagcggctcatcaacaagccagggcctgataccttccctgactatggggatgtgcttcgggctgtagagaaggcagctgcccgacacagccttggcctcccccgacagcagctccagctcatggctcaggatgccttccgagatgtgggcatcaggttacaggagcgacgtcacctcgatctcatctacaactttggctgccacctcacagatgactataggccaggcgttgaccctgcactatcagatcctgtgttggcccggcgccttcgggaaaaccggagtttggccatgagtcggctggatgaggtcatctccaaatatgcaatgttgcaagacaaaagtgaggagggcgagagaaaaaagagaagagctcggctccaaggcacctcttcccactctgcagacacccccgaagcctccttggattctggtgagggccctagtggaatggcatcccaggggtgcccttctgcctccagagctgagacagatgacgaagacgatgaggagagtgatgaggaagaggaggaggaggaggaagaagaagaggaggaggccacagattctgaagaggaggaggatctggaacagatgcaggagggtcaggaggatgatgaagaggaggacgaagaggaagaagcagcagcaggtaaagatggagacaagagccccatgtcctcactacagatctccaatgaaaagaacctggaacctggcaaacagatcagcagatcttcaggggagcagcaaaacaaaggacgcatagtgtcaccatcgttactgtcagaagaacccctggccccctccagcatagatgctgaaagcaatggagaacagcctgaggagctgaccctggaggaagaaagccctgtgtctcagctctttgagctagagattgaagctttgcccctggataccccttcctctgtggagacggacatttcctcttccaggaagcaatcagaggagcccttcaccactgtcttagagaatggagcaggcatggtctcttctacttccttcaatggaggcgtctctcctcacaactggggagattctggtcccccctgcaaaaaatctcggaaggagaagaagcaaacaggatcagggccattaggaaacagctatgtggaaaggcaaaggtcagtgcatgagaagaatgggaaaaagatatgtaccctgcccagcccaccttcccccttggcttccttggccccagttgctgattcctccacgagggtggactctcccagccatggcctggtgaccagctccctctgcatcccttctccagcccggctgtcccaaaccccccattcacagcctcctcggcctggtacttgcaagacaagtgtggccacacaatgcgatccagaagagatcatcgtgctctcagactctgattagtaatgaactagtccgtaacttgaaagtatttcgatttcttggctttatatatcttgtggaaaggacgaatcgagcgccgatactctcgcagc

SEQ ID NO: 1319 - DNA, 3593 bp, Homo sapiens
  source 1..3593: mol_type = genomic DNA
accgccaccatgaaccgtgaagaccggaatgtgctgcgtatgaaagaacgggaaaggcggaatcaggaaattcagcagggcgaagacgccttcccacctagctctcctctctttgcagagccatacaaagttactagcaaagaagataagttatcaagtcgtattcagagtatgcttggaaactacgatgaaatgaaggatttcataggagacagatctataccaaagcttgttgcaattcccaagcctacagtaccaccatcagcagatgaaaaatctaacccaaatttctttgaacagagacatggaggctctcatcagagtagcaaatggactccagtaggacccgcacccagcacttctcagtctcagaaacggtcctcaggcttacagagtggacatagtagccagcggaccagcgcaggtagcagtagtggcactaacagtagtggtcagaggcacgaccgtgagtcatataacaatagtgggagcagtagccggaaaaaaggccagcatggatcagaacactccaaatcacgttcttccagccctggaaaaccccaggctgtttcttcattaaactctagtcattccaggtctcatgggaatgatcaccatagcaaggaacatcaacgctccaaatcacctcgggaccctgatgcaaactgggattctccttcccgtgtacctttttcaagtgggcagcactcaactcaatctttcccaccctcattgatgtcaaagtccaattcaatgttacagaaacccactgcctatgtgcggcccatggacggacaggagtccatggaaccaaagctgtcctctgagcactacagcagccaatcccatggcaacagcatgactgagctgaagcccagcagcaaagcacatctcaccaagctgaaaataccttcccaaccactggatgcatcagcttctggtgatgtgagctgtgtggatgaaatcctaaaagagatgacgcattcatggcctccccctctaacggctattcatacaccatgcaaaacagaaccttccaaatttccttttccaactaaggagtctcagcagtccaattttggcactggagaacaaaaaagatataatccttctaaaacttcaaatgggcaccagtctaaatctatgttaaaagatgacttaaaactaagcagcagtgaagacagtgatggggaacaggattgtgataagacaatgccgaggagtacaccaggaagtaactctgaaccttcacaccataatagtgaaggagcagataactccagggatgattctagtagccacagtggatctgaaagcagctctggatctgactcagagagtgaaagtagttccagtgacagtgaggcaaatgagccatcccagagtgcatctcccgagcctgaacccccgccaacaaacaaatggcaacttgataattggctgaataaagtgaacccacataaagtgtcacccgcctcttcagtggacagtaacatcccatcatctcaaggctacaaaaaggaaggccgagagcagggcactgggaatagctacactgatacaagtggacctaaagaaacgagttccgctactccgggacgagactccaaaaccatccaaaagggatcagaaagtgggcgtgggaggcagaaatctcctgcacagagtgacagcacaacacagagaagaactgtaggcaaaaaacaacccaaaaaggctgagaaggcagctgctgaagagcctcgtggaggcctgaagatagaaagtgaaacccctgtagacttggctagcagcatgccctccagcagacacaaagcagccaccaaaggctcaaggaaacccaatataaagaaggagtctaagtcttcccctcgacctacagcagagaaaaagaaatataagtcaacaagtaaatcttcccagaaatcaagggaaatcatagaaacagatacctcatcctcagattcagatgaaagtgagagccttcctccttcctcacaaactcctaagtaccccgagagcaataggactcctgttaaaccctcctcagtggaggaagaagatagcttttttcggcaacgaatgttctctcctatggaagagaaggaacttctttcacccctcagtgagcctgatgacaggtacccacttattgtgaagattgacctgaatcttttgactagaataccaggaaagccttacaaagaaacagagccgcccaagggggaaaagaaaaatgtgccagaaaagcacacgagagaggctcagaaacaagcctcagaaaaagtttccaacaaaggcaagaggaagcataagaatgaagatgataaccgagccagtgagagcaagaaacccaaaacggaggacaagaattcagcaggccataagccatccagcaacagagagtcatctaagcagagtgctgcaaaagaaaaggatttgttgccttctcccgctgggcctgttccttcaaaagatccaaaaacagagcatggctctcggaagaggactattagtcagtcttcttccttaaagtcaagcagtaacagcaacaaggagacgagtggcagcagcaaaaacagttcctccacatcaaagcagaagaagaccgaagggaagacttccagtagctccaaggaggttaaggaaaaggctccaagtagctcctctaactgtcctccatctgcaccaactcttgattcttctaagcctcggagaacaaagcttgtctttgatgacagaaattattcagcagaccattatttacaagaagcaaaaaagctaaagcacaatgcagatgcattgtctgataggtttgagaaagctgtatactatcttgatgctgtggtatctttcattgaatgtgggaatgcattagagaagaatgctcaggaatccaaatccccattccctatgtattcagagacggtggatctcatcaaatacactatgaagctaaagaattacttggcaccagatgctacagctgcagataaacgactcacagtactttgcctgcgatgcgagtctttgctgtacctgaggctgttcaaactgaagaaggaaaatgctctgaagtactcaaagacactgacagagcacctgaagaattcttataataattctcaagcaccatcgcctggcttgggaagcaaagctgtggggatgccttcccctgtttctccaaagctgtcaccaggcaattcaggaaattattcatctggggccagtagtgcttctgcaagtggttcttcagtgaccattccacagaagatccaccagatggcagccagctatgttcaggtcacatccaacttcctctatgccaccgaaatttgggaccaagctgaacagctttccaaagagcaaaaagaattctttgctgaactggataaagtaatgggccctctcatctttaatgcaagcatcatgacagatctagttcgttatacccggcagggactgcactggcttcgccaggatgccaagttgatatcttagtaatgaactagtccgtaacttgaaagtatttcgatttcttggctttatatatcttgtggaaaggacgatttccttcacaggcgcttcttata

SEQ ID NO: 1320 - DNA, 3857 bp, Homo sapiens
  source 1..3857: mol_type = genomic DNA
accgccaccatggacagcttcgacttagccctgctccaggaatgggacctcgagtcactgtggggtgaagacatcttaaaccagaggaatgactctctagttgtggaatttcagtcatcagccagcagatgcaggagtgtctatgaaccagatagaaatgcattacggaggaaagaacgagaaagaagaaatcaagaaactcaacaggatgatggcacgtttaattctagttactctctcttcagtgagccctacaagactaacaagggggatgaactctccaaccggatccagaacactttaggcaattatgatgaaatgaaagactttttaactgatagatccaatcagagtcatctcgttggagttcccaaacctggggttcctcagactcctgtgaacaagatcgatgaacattttgttgcagattcaagagcccagaaccagccctcgtctatctgtagcactacaacttccacaccagcagctgtccccgtgcagcagagtaagagaggcactatgggctggcagaaggctgggcacccaccctctgacggccaacagagagcaacacaacagggctctctcaggaccttgcttggagatggtgttggcagacagcagcctcgggccaaacaagtgtgcaatgtggaggtgggccttcagacccaggagaggccacctgccatggcggccaagcacagcagcagcggacactgtgttcagaactttcctccatccctagcttcaaaacccagcctggtccagcagaaaccgaccgcgtatgtgaggccaatggacggccaagatcaggcccctgatgagtctcctaagctgaagtcgtcttcggaaaccagcgtgcactgcacatcatacaggggagtccctgccagcaagccggagcctgccagagccaaggccaagctctccaagttcagcatccccaagcagggggaggagagtagatctggagaaaccaacagctgtgttgaagaaataatccgggagatgacctggcttccaccactttctgctattcaagcacctggcaaagtggaaccaaccaaatttccatttccaaataaggactctcagcttgtatcctctggacacaataatccaaagaaaggtgatgcagagccagagagtccagacaatggcacatcgaatacatcaatgctggaagatgaccttaagctaagcagtgatgaagaggagaatgaacagcaggcagctcagagaacggctctccgcgctctctctgacagcgccgtggtccagcagcccaactgcagaacctcggtgccttccagcaagggcagcagcagcagcagcagcagcggcagcagcagctcctccagcgactcagagagcagctccggatctgactcggagaccgagagcagctccagcgagagtgagggcagcaagcccccccacttctccagccccgaggctgaaccggcatcctctaacaagtggcagctggataaatggctaaacaaagttaatccccacaagcctcctattctgatccaaaatgaaagccacgggtcagagagcaatcagtactacaacccggtgaaagaggacgtccaggactgtgggaaagtccccgacgtttgccagcccagcctgagagagaaggagatcaagagcacttgcaaggaggagcaaaggccaaggacagccaacaaggcccctgggagtaaaggcgtgaagcagaagtccccgcccgcggccgtggccgtggcggtgagcgcagccgccccgccacccgcagtgccctgtgcgcccgcggagaacgcgcccgcgcctgcccggaggtccgcgggcaagaagcccaccaggcgcaccgagaggacctcagccggggacggcgccaactgccaccggcccgaggagcccgcggccgcggacgcgctggggacgagcgtggtggtccccccggagcccaccaaaaccaggccctgtggcaacaacagagcgagccaccgcaaggagctgcgctcctccgtgacctgcgagaagcgccgcacgcgggggctaagcaggatcgtccccaaatccaaggagttcattgagacagagtcgtcatcttcatcctcctcctcggactccgacctggagtccgagcaggaggagtaccctctgtccaaagcacagaccgtggctgcctctgcctcctccgggaatgatcagaggctgaaggaggccgctgccaacgggggcagtggtcctagggcccctgtaggctccatcaacgccaggaccaccagtgacatcgccaaggagctggaggagcagttctacacactggtcccctttggccggaacgaacttctctcccctctaaaggacagtgatgagatcaggtctctctgggtcaaaatcgacctgaccctcctgtccaggatcccagaacacctgccccaggagccaggggtattgagcgcccctgccaccaaggactctgagagcgcaccgcccagccacacctcggacacacctgcagaaaaggctttgccaaaatccaagaggaaacgcaagtgtgacaacgaagacgactacagggagatcaagaagtcccagggagagaaagacagctcttcaagactggccacctccaccagtaatactttgtctgcaaaccactgcaacatgaacatcaacagtgtggcaataccaataaataaaaatgaaaaaatgcttcggtcgcccatctcacccctctctgatgcatctaaacacaaatacaccagcgaggacttaacttcttccagccgacctaatggcaacagtttgtttacttcagcctcttccagcaaaaagcctaaggccgacagccagctgcagcctcacggcggagacctcacgaaagcagctcacaacaattctgaaaacattcccctccacaagtcacggccgcagacgaagccgtggtctccaggctccaacggccacagggactgcaagaggcagaaacttgtcttcgatgatatgcctcgcagtgccgattattttatgcaagaagctaaacgaatgaagcataaagcagatgcaatggtggaaaagtttggaaaggctttgaactatgctgaagcagcattgtcgtttatcgagtgtggaaatgcaatggaacaaggccccatggaatccaaatctccttatacgatgtattcagaaacagtagagctcatcaggtatgctatgagactaaaaacccactcaggccccaatgccacaccagaagacaaacaactggctgcattatgttaccgatgcctggccctcctgtactggcggatgtttcgactcaaaagggaccacgctgtaaagtattcaaaagcactaatcgactatttcaagaactcatctaaagccgcccaagccccatctccgtggggggccagtggaaagagcactggaaccccatcccccatgtctcccaacccctctcccgccagctccgtggggtctcagggcagcctctccaacgccagcgccctgtccccgtcgaccatcgtcagcatcccacagcgcatccaccagatggcggccaaccacgtcagcatcaccaacagcatcctgcacagctacgactactgggagatggccgacaacctggccaaggaaaaccgagaattcttcaacgacctggatctgctcatggggccggtcaccctgcacagcagcatggagcacctggtccagtactcccaacagggcctgcactggctgcggaacagcgcccacctgtcatagtaatgaactagtccgtaacttgaaagtatttcgatttcttggctttatatatcttgtggaaaggacgatggttcgagtcaggctagagttca

SEQ ID NO: 1321 - DNA, 3782 bp, Homo sapiens
  source 1..3782: mol_type = genomic DNA
accgccaccatggacagcttcgacttagccctgctccaggaatgggacctcgagtcactgtgtgtctatgaaccagatagaaatgcattacggaggaaagaacgagaaagaagaaatcaagaaactcaacaggatgatggcacgtttaattctagttactctctcttcagtgagccctacaagactaacaagggggatgaactctccaaccggatccagaacactttaggcaattatgatgaaatgaaagactttttaactgatagatccaatcagagtcatctcgttggagttcccaaacctggggttcctcagactcctgtgaacaagatcgatgaacattttgttgcagattcaagagcccagaaccagccctcgtctatctgtagcactacaacttccacaccagcagctgtccccgtgcagcagagtaagagaggcactatgggctggcagaaggctgggcacccaccctctgacggccaacagagagcaacacaacagggctctctcaggaccttgcttggagatggtgttggcagacagcagcctcgggccaaacaagtgtgcaatgtggaggtgggccttcagacccaggagaggccacctgccatggcggccaagcacagcagcagcggacactgtgttcagaactttcctccatccctagcttcaaaacccagcctggtccagcagaaaccgaccgcgtatgtgaggccaatggacggccaagatcaggcccctgatgagtctcctaagctgaagtcgtcttcggaaaccagcgtgcactgcacatcatacaggggagtccctgccagcaagccggagcctgccagagccaaggccaagctctccaagttcagcatccccaagcagggggaggagagtagatctggagaaaccaacagctgtgttgaagaaataatccgggagatgacctggcttccaccactttctgctattcaagcacctggcaaagtggaaccaaccaaatttccatttccaaataaggactctcagcttgtatcctctggacacaataatccaaagaaaggtgatgcagagccagagagtccagacaatggcacatcgaatacatcaatgctggaagatgaccttaagctaagcagtgatgaagaggagaatgaacagcaggcagctcagagaacggctctccgcgctctctctgacagcgccgtggtccagcagcccaactgcagaacctcggtgccttccagcaagggcagcagcagcagcagcagcagcggcagcagcagctcctccagcgactcagagagcagctccggatctgactcggagaccgagagcagctccagcgagagtgagggcagcaagcccccccacttctccagccccgaggctgaaccggcatcctctaacaagtggcagctggataaatggctaaacaaagttaatccccacaagcctcctattctgatccaaaatgaaagccacgggtcagagagcaatcagtactacaacccggtgaaagaggacgtccaggactgtgggaaagtccccgacgtttgccagcccagcctgagagagaaggagatcaagagcacttgcaaggaggagcaaaggccaaggacagccaacaaggcccctgggagtaaaggcgtgaagcagaagtccccgcccgcggccgtggccgtggcggtgagcgcagccgccccgccacccgcagtgccctgtgcgcccgcggagaacgcgcccgcgcctgcccggaggtccgcgggcaagaagcccaccaggcgcaccgagaggacctcagccggggacggcgccaactgccaccggcccgaggagcccgcggccgcggacgcgctggggacgagcgtggtggtccccccggagcccaccaaaaccaggccctgtggcaacaacagagcgagccaccgcaaggagctgcgctcctccgtgacctgcgagaagcgccgcacgcgggggctaagcaggatcgtccccaaatccaaggagttcattgagacagagtcgtcatcttcatcctcctcctcggactccgacctggagtccgagcaggaggagtaccctctgtccaaagcacagaccgtggctgcctctgcctcctccgggaatgatcagaggctgaaggaggccgctgccaacgggggcagtggtcctagggcccctgtaggctccatcaacgccaggaccaccagtgacatcgccaaggagctggaggagcagttctacacactggtcccctttggccggaacgaacttctctcccctctaaaggacagtgatgagatcaggtctctctgggtcaaaatcgacctgaccctcctgtccaggatcccagaacacctgccccaggagccaggggtattgagcgcccctgccaccaaggactctgagagcgcaccgcccagccacacctcggacacacctgcagaaaaggctttgccaaaatccaagaggaaacgcaagtgtgacaacgaagacgactacagggagatcaagaagtcccagggagagaaagacagctcttcaagactggccacctccaccagtaatactttgtctgcaaaccactgcaacatgaacatcaacagtgtggcaataccaataaataaaaatgaaaaaatgcttcggtcgcccatctcacccctctctgatgcatctaaacacaaatacaccagcgaggacttaacttcttccagccgacctaatggcaacagtttgtttacttcagcctcttccagcaaaaagcctaaggccgacagccagctgcagcctcacggcggagacctcacgaaagcagctcacaacaattctgaaaacattcccctccacaagtcacggccgcagacgaagccgtggtctccaggctccaacggccacagggactgcaagaggcagaaacttgtcttcgatgatatgcctcgcagtgccgattattttatgcaagaagctaaacgaatgaagcataaagcagatgcaatggtggaaaagtttggaaaggctttgaactatgctgaagcagcattgtcgtttatcgagtgtggaaatgcaatggaacaaggccccatggaatccaaatctccttatacgatgtattcagaaacagtagagctcatcaggtatgctatgagactaaaaacccactcaggccccaatgccacaccagaagacaaacaactggctgcattatgttaccgatgcctggccctcctgtactggcggatgtttcgactcaaaagggaccacgctgtaaagtattcaaaagcactaatcgactatttcaagaactcatctaaagccgcccaagccccatctccgtggggggccagtggaaagagcactggaaccccatcccccatgtctcccaacccctctcccgccagctccgtggggtctcagggcagcctctccaacgccagcgccctgtccccgtcgaccatcgtcagcatcccacagcgcatccaccagatggcggccaaccacgtcagcatcaccaacagcatcctgcacagctacgactactgggagatggccgacaacctggccaaggaaaaccgagaattcttcaacgacctggatctgctcatggggccggtcaccctgcacagcagcatggagcacctggtccagtactcccaacagggcctgcactggctgcggaacagcgcccacctgtcatagtaatgaactagtccgtaacttgaaagtatttcgatttcttggctttatatatcttgtggaaaggacgacacgcgacaatgtgccaaacatcg

SEQ ID NO: 1322 - DNA, 3932 bp, Homo sapiens
  source 1..3932: mol_type = genomic DNA
accgccaccatggatctattcgactttttcagagactgggacttggagcagcagtgtcactatgaacaagaccgtagtgcacttaaaaaaagggaatgggagcggaggaatcaagaagtccagcaagaagacgatctcttttcttcaggctttgatctttttggggagccatacaaggtagctgaatatacaaacaaaggtgatgcacttgccaaccgagtccagaacacgcttggaaactatgatgaaatgaagaatttgctaactaaccattctaatcagaatcacctagtgggaattccaaagaattctgtgccccagaatcccaacaacaaaaatgaaccaagcttttttccagaacaaaagaacagaataattccacctcaccaggataatacccatccttcagcaccaatgcctccaccttctgttgtgatactgaattcaactctaatacacagcaacagaaaatcaaaacctgagtggtcacgtgatagtcataaccctagcactgtactggcaagccaggccagtggtcagccaaacaagatgcagactttgacacaggaccagtctcaagccaaactggaagacttctttgtctacccagctgaacagccccagattggagaagttgaagagtcaaacccatctgcaaaggaagacagtaaccctaattctagtggagaagatgctttcaaagaaatctttcaatccaattcaccggaagaatctgaattcgccgtgcaagcgcctgggtctcccctagtggcttcctctttattagctcctagcagtggcctttcagttcaaaacttcccaccagggctttactgcaaaacaagcatggggcagcaaaagccaactgcatacgtcagacccatggatggccaggaccaggcaccggacatctcaccaacactgaaaccttcaattgaatttgagaacagctttgggaatctgtcatttggaacactcttggatggaaaacccagtgcagccagttcaaagactaaactgccaaagttcaccatcctccaaacaagtgaagtaagccttcccagtgatccaagctgtgttgaagaaatcttgcgggaatcgcagcatctgaccccaggattcaccttacaaaagtggaatgacccaaccaccagagcttctacaaagatgcttgaggatgacctgaagctgagcagtgatgaagatgaccttgagcctgtgaagaccttgaccactcagtgcactgccactgagctctaccaggctgttgaaaaggcaaaacctaggaataatcctgtgaacccacccttggccactccccagcccccacctgcagtgcaagccagcgggggttctggcagctccagcgaatcggagagcagctctgagtcggattcagacactgaaagtagcaccactgacagcgaatctaatgaggcacctcgtgtggcaactccagagcctgagccaccctcaaccaacaagtggcaactggataaatggcttaacaaagtgacatcccagaacaagtcttttatttgtggccaaaatgaaacacccatggagactatttctctgcctcctccaatcatccaaccaatggaagtccagatgaaagtgaagacgaatgccagtcaggtcccagctgaacccaaagaaaggcctctcctcagtctcattagggagaaagcccgtccacggcccactcagaaaattccagaaacaaaggctttgaagcataagttgtcaacaactagtgagacagtgtctcaaaggacaattgggaaaaaacagcccaaaaaagttgagaagaacaccagcactgacgagtttacctggcccaaaccaaatattaccagcagcactcccaaagaaaaagaaagtgtggagcttcatgacccaccaagaggccgcaacaaagccactgcccacaaaccagcccctaggaaagaaccaagacctaacatccctttggctcccgagaagaagaagtacagagggcctggcaagattgtgccaaagtctcgggaattcattgaaacagattcatctacatctgactccaacacagatcaggaagagaccctgcaaatcaaagtcctgcctccgtgcattatttctggaggtaatactgccaaatccaaggaaatctgtggtgccagcctgaccctcagcaccttaatgagtagcagtggcagcaacaacaacttatccatcagtaatgaagagccaacattttcacctattcctgtcatgcaaactgaaatcctgtcccctctgcgagatcatgagaacctgaaaaacctctgggtgaagattgaccttgacttactctctagagtacctggccacagctcactccatgcagcacctgccaagccagaccacaaggagactgccacaaaacccaagcgtcagacagctgtcacagctgtggagaaaccagcccctaagggcaaacgtaagcacaagccaatagaagttgcagagaagatccctgagaagaagcagcgcctggaggaggccacaactatctgcttgctccctccttgcatctcaccagccccaccccacaagcctcccaacactagagaaaataattcatccaggagagcaaatagaagaaaggaagaaaaactatttcctcctccactttccccactgccagaggaccctccacgccgcagaaatgtcagtggcaataatggtccctttggtcaagacaaaaacatcgccatgactggacaaatcacatctaccaaacctaagagaactgaaggcaaattctgtgctactttcaaagggatatcggtaaatgagggagacactccaaaaaaggcatcctctgccaccatcactgtcaccaatactgctattgccactgctactgtcactgctactgccattgtcaccaccactgtcacagctactgccaccgccacggccaccaccacaactactaccactaccatttccaccatcacctctaccatcactactggcctcatggatagcagtcacctggagatgacgtcctgggcggctctgccccttctatccagcagcagcactaatgtccggagacccaagctcacttttgatgactcggttcacaatgctgattattacatgcaagaagctaagaagctgaagcacaaagctgatgcactgttcgagaaatttggcaaagctgtgaattatgctgatgccgccctctccttcactgaatgtggcaatgccatggaacgcgaccctctggaagcaaagtccccatacaccatgtactctgagactgtggagctcctcaggtatgcaatgaggctgaagaactttgcaagtcccttggcttcggatggggacaaaaagctagcagtactatgctaccgatgtttatcactcctctatttgagaatgtttaagctgaagaaggaccatgctatgaagtactccagatcactgatggaatattttaagcaaaatgcttcaaaagtcgcacagataccctctccatgggtaagcaatggaaagaacactccatccccagtgtctctcaacaacgtctcccccatcaacgcaatggggaactgtaacaatggcccagtcaccattccccagcgcattcaccacatggctgccagccacgtcaacatcactagcaatgtgttacggggctatgaacactgggatatggccgacaaactgacaagagaaaacaaagaattctttggtgatctggacacgctgatggggcctctgacccagcacagcagcatgaccaatcttgtccgctacgttcgccaaggactgtgttggctgcgcatcgatgcccacttgttgtagtaatgaactagtccgtaacttgaaagtatttcgatttcttggctttatatatcttgtggaaaggacgaaccacagtaccaaaccggatacta

SEQ ID NO: 1323 - DNA, 3932 bp, Homo sapiens
  source 1..3932: mol_type = genomic DNA
accgccaccatggatctattcgactttttcagagactgggacttggagcagcagtgtcactatgaacaagaccgtagtgcacttaaaaaaagggaatgggagcggaggaatcaagaagtccagcaagaagacgatctcttttcttcaggctttgatctttttggggagccatacaagacaaacaaaggtgatgcacttgccaaccgagtccagaacacgcttggaaactatgatgaaatgaagaatttgctaactaaccattctaatcagaatcacctagtgggaattccaaagaattctgtgccccagaatcccaacaacaaaaatgaaccaagcttttttccagaacaaaagaacagaataattccacctcaccaggataatacccatccttcagcaccaatgcctccaccttctgttgtgatactgaattcaactctaatacacagcaacagaaaatcaaaacctgagtggtcacgtgatagtcataaccctagcactgtactggcaagccaggccagtggtcagccaaacaagatgcagactttgacacaggaccagtctcaagccaaactggaagacttctttgtctacccagctgaacagccccagattggagaagttgaagagtcaaacccatctgcaaaggaagacagtaaccctaattctagtggagaagatgctttcaaagaaatctttcaatccaattcaccggaagaatctgaattcgccgtgcaagcgcctgggtctcccctagtggcttcctctttattagctcctagcagtggcctttcagttcaaaacttcccaccagggctttactgcaaaacaagcatggggcagcaaaagccaactgcatacgtcagacccatggatggccaggaccaggcaccggacatctcaccaacactgaaaccttcaattgaatttgagaacagctttgggaatctgtcatttggaacactcttggatggaaaacccagtgcagccagttcaaagactaaactgccaaagttcaccatcctccaaacaagtgaagtaagccttcccagtgatccaagctgtgttgaagaaatcttgcgggaatcgcagcatctgaccccaggattcaccttacaaaagtggaatgacccaaccaccagagcttctacaaagtcagtgtctttcaaatcgatgcttgaggatgacctgaagctgagcagtgatgaagatgaccttgagcctgtgaagaccttgaccactcagtgcactgccactgagctctaccaggctgttgaaaaggcaaaacctaggaataatcctgtgaacccacccttggccactccccagcccccacctgcagtgcaagccagcgggggttctggcagctccagcgaatcggagagcagctctgagtcggattcagacactgaaagtagcaccactgacagcgaatctaatgaggcacctcgtgtggcaactccagagcctgagccaccctcaaccaacaagtggcaactggataaatggcttaacaaagtgacatcccagaacaagtcttttatttgtggccaaaatgaaacacccatggagactatttctctgcctcctccaatcatccaaccaatggaagtccagatgaaagtgaagacgaatgccagtcaggtcccagctgaacccaaagaaaggcctctcctcagtctcattagggagaaagcccgtccacggcccactcagaaaattccagaaacaaaggctttgaagcataagttgtcaacaactagtgagacagtgtctcaaaggacaattgggaaaaaacagcccaaaaaagttgagaagaacaccagcactgacgagtttacctggcccaaaccaaatattaccagcagcactcccaaagaaaaagaaagtgtggagcttcatgacccaccaagaggccgcaacaaagccactgcccacaaaccagcccctaggaaagaaccaagacctaacatccctttggctcccgagaagaagaagtacagagggcctggcaagattgtgccaaagtctcgggaattcattgaaacagattcatctacatctgactccaacacagatcaggaagagaccctgcaaatcaaagtcctgcctccgtgcattatttctggaggtaatactgccaaatccaaggaaatctgtggtgccagcctgaccctcagcaccttaatgagtagcagtggcagcaacaacaacttatccatcagtaatgaagagccaacattttcacctattcctgtcatgcaaactgaaatcctgtcccctctgcgagatcatgagaacctgaaaaacctctgggtgaagattgaccttgacttactctctagagtacctggccacagctcactccatgcagcacctgccaagccagaccacaaggagactgccacaaaacccaagcgtcagacagctgtcacagctgtggagaaaccagcccctaagggcaaacgtaagcacaagccaatagaagttgcagagaagatccctgagaagaagcagcgcctggaggaggccacaactatctgcttgctccctccttgcatctcaccagccccaccccacaagcctcccaacactagagaaaataattcatccaggagagcaaatagaagaaaggaagaaaaactatttcctcctccactttccccactgccagaggaccctccacgccgcagaaatgtcagtggcaataatggtccctttggtcaagacaaaaacatcgccatgactggacaaatcacatctaccaaacctaagagaactgaaggcaaattctgtgctactttcaaagggatatcggagggagacactccaaaaaaggcatcctctgccaccatcactgtcaccaatactgctattgccactgctactgtcactgctactgccattgtcaccaccactgtcacagctactgccaccgccacggccaccaccacaactactaccactaccatttccaccatcacctctaccatcactactggcctcatggatagcagtcacctggagatgacgtcctgggcggctctgccccttctatccagcagcagcactaatgtccggagacccaagctcacttttgatgactcggttcacaatgctgattattacatgcaagaagctaagaagctgaagcacaaagctgatgcactgttcgagaaatttggcaaagctgtgaattatgctgatgccgccctctccttcactgaatgtggcaatgccatggaacgcgaccctctggaagcaaagtccccatacaccatgtactctgagactgtggagctcctcaggtatgcaatgaggctgaagaactttgcaagtcccttggcttcggatggggacaaaaagctagcagtactatgctaccgatgtttatcactcctctatttgagaatgtttaagctgaagaaggaccatgctatgaagtactccagatcactgatggaatattttaagcaaaatgcttcaaaagtcgcacagataccctctccatgggtaagcaatggaaagaacactccatccccagtgtctctcaacaacgtctcccccatcaacgcaatggggaactgtaacaatggcccagtcaccattccccagcgcattcaccacatggctgccagccacgtcaacatcactagcaatgtgttacggggctatgaacactgggatatggccgacaaactgacaagagaaaacaaagaattctttggtgatctggacacgctgatggggcctctgacccagcacagcagcatgaccaatcttgtccgctacgttcgccaaggactgtgttggctgcgcatcgatgcccacttgttgtagtaatgaactagtccgtaacttgaaagtatttcgatttcttggctttatatatcttgtggaaaggacgattagtagtcttcgtgtagatagat

SEQ ID NO: 1324 - DNA, 4037 bp, Homo sapiens
  source 1..4037: mol_type = genomic DNA
accgccaccatggatctattcgactttttcagagactgggacttggagcagcagtgtcactatgaacaagaccgtagtgcacttaaaaaaagggaatgggagcggaggaatcaagaagtccagcaagaagacgatctcttttcttcaggctttgatctttttggggagccatacaaggtagctgaatatacaaacaaaggtgatgcacttgccaaccgagtccagaacacgcttggaaactatgatgaaatgaagaatttgctaactaaccattctaatcagaatcacctagtgggaattccaaagaattctgtgccccagaatcccaacaacaaaaatgaaccaagcttttttccagaacaaaagaacagaataattccacctcaccaggataatacccatccttcagcaccaatgcctccaccttctgttgtgatactgaattcaactctaatacacagcaacagaaaatcaaaacctgagtggtcacgtgatagtcataaccctagcactgtactggcaagccaggccagtggtcagccaaacaagatgcagactttgacacaggaccagtctcaagccaaactggaagacttctttgtctacccagctgaacagccccagattggagaagttgaagagtcaaacccatctgcaaaggaagacagtaaccctaattctagtggagaagatgctttcaaagaaatctttcaatccaattcaccggaagaatctgaattcgccgtgcaagcgcctgggtctcccctagtggcttcctctttattagctcctagcagtggcctttcagttcaaaacttcccaccagggctttactgcaaaacaagcatggggcagcaaaagccaactgcatacgtcagacccatggatggccaggaccaggcaccggacatctcaccaacactgaaaccttcaattgaatttgagaacagctttgggaatctgtcatttggaacactcttggatggaaaacccagtgcagccagttcaaagactaaactgccaaagttcaccatcctccaaacaagtgaagtaagccttcccagtgatccaagctgtgttgaagaaatcttgcgggagatgacccattcctggcctactcctctcacttccatgcatactgctggacactctgagcagagcaccttttccatcccaggacaggaatcgcagcatctgaccccaggattcaccttacaaaagtggaatgacccaaccaccagagcttctacaaagtcagtgtctttcaaatcgatgcttgaggatgacctgaagctgagcagtgatgaagatgaccttgagcctgtgaagaccttgaccactcagtgcactgccactgagctctaccaggctgttgaaaaggcaaaacctaggaataatcctgtgaacccacccttggccactccccagcccccacctgcagtgcaagccagcgggggttctggcagctccagcgaatcggagagcagctctgagtcggattcagacactgaaagtagcaccactgacagcgaatctaatgaggcacctcgtgtggcaactccagagcctgagccaccctcaaccaacaagtggcaactggataaatggcttaacaaagtgacatcccagaacaagtcttttatttgtggccaaaatgaaacacccatggagactatttctctgcctcctccaatcatccaaccaatggaagtccagatgaaagtgaagacgaatgccagtcaggtcccagctgaacccaaagaaaggcctctcctcagtctcattagggagaaagcccgtccacggcccactcagaaaattccagaaacaaaggctttgaagcataagttgtcaacaactagtgagacagtgtctcaaaggacaattgggaaaaaacagcccaaaaaagttgagaagaacaccagcactgacgagtttacctggcccaaaccaaatattaccagcagcactcccaaagaaaaagaaagtgtggagcttcatgacccaccaagaggccgcaacaaagccactgcccacaaaccagcccctaggaaagaaccaagacctaacatccctttggctcccgagaagaagaagtacagagggcctggcaagattgtgccaaagtctcgggaattcattgaaacagattcatctacatctgactccaacacagatcaggaagagaccctgcaaatcaaagtcctgcctccgtgcattatttctggaggtaatactgccaaatccaaggaaatctgtggtgccagcctgaccctcagcaccttaatgagtagcagtggcagcaacaacaacttatccatcagtaatgaagagccaacattttcacctattcctgtcatgcaaactgaaatcctgtcccctctgcgagatcatgagaacctgaaaaacctctgggtgaagattgaccttgacttactctctagagtacctggccacagctcactccatgcagcacctgccaagccagaccacaaggagactgccacaaaacccaagcgtcagacagctgtcacagctgtggagaaaccagcccctaagggcaaacgtaagcacaagccaatagaagttgcagagaagatccctgagaagaagcagcgcctggaggaggccacaactatctgcttgctccctccttgcatctcaccagccccaccccacaagcctcccaacactagagaaaataattcatccaggagagcaaatagaagaaaggaagaaaaactatttcctcctccactttccccactgccagaggaccctccacgccgcagaaatgtcagtggcaataatggtccctttggtcaagacaaaaacatcgccatgactggacaaatcacatctaccaaacctaagagaactgaaggcaaattctgtgctactttcaaagggatatcggtaaatgagggagacactccaaaaaaggcatcctctgccaccatcactgtcaccaatactgctattgccactgctactgtcactgctactgccattgtcaccaccactgtcacagctactgccaccgccacggccaccaccacaactactaccactaccatttccaccatcacctctaccatcactactggcctcatggatagcagtcacctggagatgacgtcctgggcggctctgccccttctatccagcagcagcactaatgtccggagacccaagctcacttttgatgactcggttcacaatgctgattattacatgcaagaagctaagaagctgaagcacaaagctgatgcactgttcgagaaatttggcaaagctgtgaattatgctgatgccgccctctccttcactgaatgtggcaatgccatggaacgcgaccctctggaagcaaagtccccatacaccatgtactctgagactgtggagctcctcaggtatgcaatgaggctgaagaactttgcaagtcccttggcttcggatggggacaaaaagctagcagtactatgctaccgatgtttatcactcctctatttgagaatgtttaagctgaagaaggaccatgctatgaagtactccagatcactgatggaatattttaagcaaaatgcttcaaaagtcgcacagataccctctccatgggtaagcaatggaaagaacactccatccccagtgtctctcaacaacgtctcccccatcaacgcaatggggaactgtaacaatggcccagtcaccattccccagcgcattcaccacatggctgccagccacgtcaacatcactagcaatgtgttacggggctatgaacactgggatatggccgacaaactgacaagagaaaacaaagaattctttggtgatctggacacgctgatggggcctctgacccagcacagcagcatgaccaatcttgtccgctacgttcgccaaggactgtgttggctgcgcatcgatgcccacttgttgtagtaatgaactagtccgtaacttgaaagtatttcgatttcttggctttatatatcttgtggaaaggacgatggctgtcataagggaacaggtag

SEQ ID NO: 1325 - DNA, 2960 bp, Homo sapiens
  source 1..2960: mol_type = genomic DNA
accgccaccatgaagttcaaaaggaggcaccaagcatttccgtccttcttcaagatgaaggtaagccttcccagtgatccaagctgtgttgaagaaatcttgcgggaatcgcagcatctgaccccaggattcaccttacaaaagtggaatgacccaaccaccagagcttctacaaagtcagtgtctttcaaatcgatgcttgaggatgacctgaagctgagcagtgatgaagatgaccttgagcctgtgaagaccttgaccactcagtgcactgccactgagctctaccaggctgttgaaaaggcaaaacctaggaataatcctgtgaacccacccttggccactccccagcccccacctgcagtgcaagccagcgggggttctggcagctccagcgaatcggagagcagctctgagtcggattcagacactgaaagtagcaccactgacagcgaatctaatgaggcacctcgtgtggcaactccagagcctgagccaccctcaaccaacaagtggcaactggataaatggcttaacaaagtgacatcccagaacaagtcttttatttgtggccaaaatgaaacacccatggagactatttctctgcctcctccaatcatccaaccaatggaagtccagatgaaagtgaagacgaatgccagtcaggtcccagctgaacccaaagaaaggcctctcctcagtctcattagggagaaagcccgtccacggcccactcagaaaattccagaaacaaaggctttgaagcataagttgtcaacaactagtgagacagtgtctcaaaggacaattgggaaaaaacagcccaaaaaagttgagaagaacaccagcactgacgagtttacctggcccaaaccaaatattaccagcagcactcccaaagaaaaagaaagtgtggagcttcatgacccaccaagaggccgcaacaaagccactgcccacaaaccagcccctaggaaagaaccaagacctaacatccctttggctcccgagaagaagaagtacagagggcctggcaagattgtgccaaagtctcgggaattcattgaaacagattcatctacatctgactccaacacagatcaggaagagaccctgcaaatcaaagtcctgcctccgtgcattatttctggaggtaatactgccaaatccaaggaaatctgtggtgccagcctgaccctcagcaccttaatgagtagcagtggcagcaacaacaacttatccatcagtaatgaagagccaacattttcacctattcctgtcatgcaaactgaaatcctgtcccctctgcgagatcatgagaacctgaaaaacctctgggtgaagattgaccttgacttactctctagagtacctggccacagctcactccatgcagcacctgccaagccagaccacaaggagactgccacaaaacccaagcgtcagacagctgtcacagctgtggagaaaccagcccctaagggcaaacgtaagcacaagccaatagaagttgcagagaagatccctgagaagaagcagcgcctggaggaggccacaactatctgcttgctccctccttgcatctcaccagccccaccccacaagcctcccaacactagagaaaataattcatccaggagagcaaatagaagaaaggaagaaaaactatttcctcctccactttccccactgccagaggaccctccacgccgcagaaatgtcagtggcaataatggtccctttggtcaagacaaaaacatcgccatgactggacaaatcacatctaccaaacctaagagaactgaaggcaaattctgtgctactttcaaagggatatcggtaaatgagggagacactccaaaaaaggcatcctctgccaccatcactgtcaccaatactgctattgccactgctactgtcactgctactgccattgtcaccaccactgtcacagctactgccaccgccacggccaccaccacaactactaccactaccatttccaccatcacctctaccatcactactggcctcatggatagcagtcacctggagatgacgtcctgggcggctctgccccttctatccagcagcagcactaatgtccggagacccaagctcacttttgatgactcggttcacaatgctgattattacatgcaagaagctaagaagctgaagcacaaagctgatgcactgttcgagaaatttggcaaagctgtgaattatgctgatgccgccctctccttcactgaatgtggcaatgccatggaacgcgaccctctggaagcaaagtccccatacaccatgtactctgagactgtggagctcctcaggtatgcaatgaggctgaagaactttgcaagtcccttggcttcggatggggacaaaaagctagcagtactatgctaccgatgtttatcactcctctatttgagaatgtttaagctgaagaaggaccatgctatgaagtactccagatcactgatggaatattttaagcaaaatgcttcaaaagtcgcacagataccctctccatgggtaagcaatggaaagaacactccatccccagtgtctctcaacaacgtctcccccatcaacgcaatggggaactgtaacaatggcccagtcaccattccccagcgcattcaccacatggctgccagccacgtcaacatcactagcaatgtgttacggggctatgaacactgggatatggccgacaaactgacaagagaaaacaaagaattctttggtgatctggacacgctgatggggcctctgacccagcacagcagcatgaccaatcttgtccgctacgttcgccaaggactgtgttggctgcgcatcgatgcccacttgttgtagtaatgaactagtccgtaacttgaaagtatttcgatttcttggctttatatatcttgtggaaaggacgatcaatgaagtcgaccgtcaccgcc

SEQ ID NO: 1326 - DNA, 3758 bp, Homo sapiens
  source 1..3758: mol_type = genomic DNA
accgccaccatggcatttacagaaagagtcaacagcagtggcaacagtttgtacaatgacgacagaaacctgcttcgaattagagagaaggaaagacgcaaccaggaagcccaccaagagaaagaggcatttcctgaaaagattcccctttttggagagccctacaagacagcaaaaggtgatgagctgtctagtcgaatacagaacatgttgggaaactacgaagaagtgaaggagttccttagtactaagtctcacactcatcgcctggatgcttctgaaaataggttgggaaagccgaaatatcctttaattcctgacaaagggagcagcattccatccagctccttccacactagtgtccaccaccagtccattcacactcctgcgtctggaccactttctgttggcaacattagccacaatccaaagatggcgcagccaagaactgaaccaatgccaagtctccatgccaaaagctgcggcccaccggacagccagcacctgacccaggatcgccttggtcaggaggggttcggctctagtcatcacaagaaaggtgaccgaagagctgacggagaccactgtgcttcggtgacagattcggctccagagagggagctttctcccttaatctctttgccttccccagttccccctttgtcacctatacattccaaccagcaaactcttccccggacgcaaggaagcagcaaggttcatggcagcagcaataacagtaaaggctattgcccagccaaatctcccaaggacctagcagtgaaagtccatgataaagagacccctcaagacagtttggtggcccctgcccagccgccttctcagacatttccacctccctccctcccctcaaaaagtgttgcaatgcagcagaagcccacggcttatgtccggcccatggatggtcaagatcaggcccctagtgaatcccctgaactgaaaccactgccggaggactatcgacagcagacctttgaaaaaacagacttgaaagtgcctgccaaagccaagctcaccaaactgaagatgccttctcagtcagttgagcagacctactccaatgaagtccattgtgttgaagagattctgaaggaaatgacccattcatggccgcctcctttgacagcaatacatacgcctagtacagctgagccatccaagtttcctttccctacaaaggactctcagcatgtcagttctgtaacccaaaaccaaaaacaatatgatacatcttcaaaaactcactcaaattctcagcaaggaacgtcatccatgctcgaagacgaccttcagctcagtgacagtgaggacagtgacagtgaacaaaccccagagaagcctccctcctcatctgcacctccaagtgctccacagtcccttccagaaccagtggcatcagcacattccagcagtgcagagtcagaaagcaccagtgactcagacagttcctcagactcagagagcgagagcagttcaagtgacagcgaagaaaatgagcccctagaaaccccagctccggagcctgagcctccaacaacaaacaaatggcagctggacaactggctgaccaaagtcagccagccagctgcgccaccagagggccccaggagcacagagcccccacggcggcacccagagagtaagggcagcagcgacagtgccacgagtcaggagcattctgaatccaaagatcctccccctaaaagctccagcaaagccccccgggccccacccgaagccccccaccccggaaagaggagctgtcagaagtctccggcacagcaggagcccccacaaaggcaaaccgttggaaccaaacaacccaaaaaacctgtcaaggcctctgcccgggcaggttcacggaccagcctgcagggggaaagggagccagggcttcttccctatggctcccgagaccagacttccaaagacaagcccaaggtgaagacgaaaggacggccccgggccgcagcaagcaacgaacccaagccagcagtgcccccctccagtgagaagaagaagcacaagagctccctccctgccccctctaaggctctctcaggcccagaacccgcgaaggacaatgtggaggacaggacccctgagcactttgctcttgttcccctgactgagagccagggcccaccccacagtggcagcggcagcaggactagtggctgccgccaagccgtggtggtccaggaggacagccgcaaagacagactcccattgcctttgagagacaccaagctgctctcaccgctcagggacactcctcccccacaaagcttgatggtgaagatcaccctagacctgctctctcggataccccagcctcccgggaaggggagccgccagaggaaagcagaagataaacagccgcccgcagggaagaagcacagctctgagaagaggagctcagacagctcaagcaagttggccaaaaagagaaagggtgaagcagaaagagactgtgataacaagaaaatcagactggagaaggaaatcaaatcacagtcatcttcatcttcatcctcccacaaagaatcttctaaaacaaagccctccaggccctcctcacagtcctcaaagaaggaaatgctccccccgccacccgtgtcctcgtcctcccagaagccagccaagcctgcacttaagaggtcaaggcgggaagcagacacctgtggccaggaccctcccaaaagtgccagcagtaccaagagcaaccacaaagactcttccattcccaagcagagaagagtagaggggaagggctccagaagctcctcggagcacaagggttcttccggagatactgcaaatccttttccagtgccttctttgccaaatggtaactctaaaccagggaagcctcaagtgaagtttgacaaacaacaagcagaccttcacatgagggaggcaaaaaagatgaagcagaaagcagagttaatgacggacagggttggaaaggcttttaagtacctggaagccgtcttgtccttcattgagtgcggaattgccacagagtctgaaagccagtcatccaagtcagcttactctgtctactcagaaactgtagatctcattaaattcataatgtcattaaaatccttctcagatgccacagcgccaacacaagagaaaatatttgctgttttatgcatgcgttgccagtccattttgaacatggcgatgtttcgttgtaaaaaagacatagcaataaagtattctcgtactcttaataaacacttcgagagttcttccaaagtcgcccaggcaccttctccatgcattgcaagaagcacaggcacaccatcccctctttccccaatgccttctcctgccagctccgtagggtcccagtcaagtgctggcagtgtggggagcagtggggtggctgccactatcagcaccccagtcaccatccagaatatgacatcttcctatgtcaccatcacatcccatgttcttaccgcctttgacctttgggaacaggccgaggccctcacgaggaagaataaagaattctttgctcggctcagcacaaatgtgtgcaccttggccctcaacagcagtttggtggacctggtgcactatacacgacagggttttcagcagctacaagaattaaccaaaacaccttagtaatgaactagtccgtaacttgaaagtatttcgatttcttggctttatatatcttgtggaaaggacgacgacatcctaaatccatggctatc

SEQ ID NO: 1327 - DNA, 3734 bp, Homo sapiens
  source 1..3734: mol_type = genomic DNA
accgccaccatggcagcccagtcaagtttgtacaatgacgacagaaacctgcttcgaattagagagaaggaaagacgcaaccaggaagcccaccaagagaaagaggcatttcctgaaaagattcccctttttggagagccctacaagacagcaaaaggtgatgagctgtctagtcgaatacagaacatgttgggaaactacgaagaagtgaaggagttccttagtactaagtctcacactcatcgcctggatgcttctgaaaataggttgggaaagccgaaatatcctttaattcctgacaaagggagcagcattccatccagctccttccacactagtgtccaccaccagtccattcacactcctgcgtctggaccactttctgttggcaacattagccacaatccaaagatggcgcagccaagaactgaaccaatgccaagtctccatgccaaaagctgcggcccaccggacagccagcacctgacccaggatcgccttggtcaggaggggttcggctctagtcatcacaagaaaggtgaccgaagagctgacggagaccactgtgcttcggtgacagattcggctccagagagggagctttctcccttaatctctttgccttccccagttccccctttgtcacctatacattccaaccagcaaactcttccccggacgcaaggaagcagcaaggttcatggcagcagcaataacagtaaaggctattgcccagccaaatctcccaaggacctagcagtgaaagtccatgataaagagacccctcaagacagtttggtggcccctgcccagccgccttctcagacatttccacctccctccctcccctcaaaaagtgttgcaatgcagcagaagcccacggcttatgtccggcccatggatggtcaagatcaggcccctagtgaatcccctgaactgaaaccactgccggaggactatcgacagcagacctttgaaaaaacagacttgaaagtgcctgccaaagccaagctcaccaaactgaagatgccttctcagtcagttgagcagacctactccaatgaagtccattgtgttgaagagattctgaaggaaatgacccattcatggccgcctcctttgacagcaatacatacgcctagtacagctgagccatccaagtttcctttccctacaaaggactctcagcatgtcagttctgtaacccaaaaccaaaaacaatatgatacatcttcaaaaactcactcaaattctcagcaaggaacgtcatccatgctcgaagacgaccttcagctcagtgacagtgaggacagtgacagtgaacaaaccccagagaagcctccctcctcatctgcacctccaagtgctccacagtcccttccagaaccagtggcatcagcacattccagcagtgcagagtcagaaagcaccagtgactcagacagttcctcagactcagagagcgagagcagttcaagtgacagcgaagaaaatgagcccctagaaaccccagctccggagcctgagcctccaacaacaaacaaatggcagctggacaactggctgaccaaagtcagccagccagctgcgccaccagagggccccaggagcacagagcccccacggcggcacccagagagtaagggcagcagcgacagtgccacgagtcaggagcattctgaatccaaagatcctccccctaaaagctccagcaaagccccccgggccccacccgaagccccccaccccggaaagaggagctgtcagaagtctccggcacagcaggagcccccacaaaggcaaaccgttggaaccaaacaacccaaaaaacctgtcaaggcctctgcccgggcaggttcacggaccagcctgcagggggaaagggagccagggcttcttccctatggctcccgagaccagacttccaaagacaagcccaaggtgaagacgaaaggacggccccgggccgcagcaagcaacgaacccaagccagcagtgcccccctccagtgagaagaagaagcacaagagctccctccctgccccctctaaggctctctcaggcccagaacccgcgaaggacaatgtggaggacaggacccctgagcactttgctcttgttcccctgactgagagccagggcccaccccacagtggcagcggcagcaggactagtggctgccgccaagccgtggtggtccaggaggacagccgcaaagacagactcccattgcctttgagagacaccaagctgctctcaccgctcagggacactcctcccccacaaagcttgatggtgaagatcaccctagacctgctctctcggataccccagcctcccgggaaggggagccgccagaggaaagcagaagataaacagccgcccgcagggaagaagcacagctctgagaagaggagctcagacagctcaagcaagttggccaaaaagagaaagggtgaagcagaaagagactgtgataacaagaaaatcagactggagaaggaaatcaaatcacagtcatcttcatcttcatcctcccacaaagaatcttctaaaacaaagccctccaggccctcctcacagtcctcaaagaaggaaatgctccccccgccacccgtgtcctcgtcctcccagaagccagccaagcctgcacttaagaggtcaaggcgggaagcagacacctgtggccaggaccctcccaaaagtgccagcagtaccaagagcaaccacaaagactcttccattcccaagcagagaagagtagaggggaagggctccagaagctcctcggagcacaagggttcttccggagatactgcaaatccttttccagtgccttctttgccaaatggtaactctaaaccagggaagcctcaagtgaagtttgacaaacaacaagcagaccttcacatgagggaggcaaaaaagatgaagcagaaagcagagttaatgacggacagggttggaaaggcttttaagtacctggaagccgtcttgtccttcattgagtgcggaattgccacagagtctgaaagccagtcatccaagtcagcttactctgtctactcagaaactgtagatctcattaaattcataatgtcattaaaatccttctcagatgccacagcgccaacacaagagaaaatatttgctgttttatgcatgcgttgccagtccattttgaacatggcgatgtttcgttgtaaaaaagacatagcaataaagtattctcgtactcttaataaacacttcgagagttcttccaaagtcgcccaggcaccttctccatgcattgcaagcacaggcacaccatcccctctttccccaatgccttctcctgccagctccgtagggtcccagtcaagtgctggcagtgtggggagcagtggggtggctgccactatcagcaccccagtcaccatccagaatatgacatcttcctatgtcaccatcacatcccatgttcttaccgcctttgacctttgggaacaggccgaggccctcacgaggaagaataaagaattctttgctcggctcagcacaaatgtgtgcaccttggccctcaacagcagtttggtggacctggtgcactatacacgacagggttttcagcagctacaagaattaaccaaaacaccttagtaatgaactagtccgtaacttgaaagtatttcgatttcttggctttatatatcttgtggaaaggacgacattgggcatccactgagctgagc

SEQ ID NO: 1328 - DNA, 1754 bp, Homo sapiens
  source 1..1754: mol_type = genomic DNA
accgccaccatggtgcgaggctgggagccgccgcccgggctggactgcgctatctctgaagggcacaaatcagaaggcaccatgcctcctaataaagaggccagcggtctcagtagttcaccagcggggctcatctgcctccctccaatctctgaggagctacagcttgtgtggacgcaagcagcccagaccagtgagctagacagcaatgaacacctgctcaaaaccttcagctactttccctatcccagcctagcagacattgcccttctctgcctacgttatgggttgcagatggagaaagtcaagacttggtttatggcccagcgcctccgctgtggtattagctggtcatctgaagaaatagaagagactcgagcccgagtagtctaccgtcgggaccaactccatttcaaatcccttctctcttttactcatcatgcgggacggcccccagaggaggtgcctcctcctccagtgccagctccagagcaagttggtattggaataggtcctccaactcttagcaagcctacccagacgaaaggattgaaggtagagcctgaggagccctctcagatgccaccactgccacagagtcaccagaaattaaaggagtccctgatgacacctggcagtggagcattcccctaccaatcagatttttggcaacatcttcaaagcagtggcctctcaaaggagcaggcaggcaggggtcccaaccagtcacatggcataggtactgcttcctggaaccactccacaaccgtcccccagccacaagctcgggataaacccccaccaattgcattaattgccagtagttgtaaggaggagtcagcatctagtgttactccctcttcttcctctacctcttcttctttccaggtactggctaatggagctactgccgcctctaaacccctccagccactaggctgtgtcccacagtcagtgtcacccagtgaacaggcattacccccacatctggaaccagcctggccccaagggctacggcataactcagtaccaggtagagttggccccacagagtacctttccccagatatgcaacgccagcgaaagaccaagcgcaaaaccaaagagcagctggctatccttaaatccttttttttacagtgccagtgggcacggcgtgaggattaccaaaagttagaacagatcactggtttacctcggcctgagatcattcagtggtttggtgacacacgctatgccttgaagcatgggcaactaaagtggtttcgggacaacgcagtacctggtgcccctagtttccaagacccagcaattcctacaccaccaccatcaacccgctccttgaacgaaagggctgagacaccacctctgccgatccctccacccccaccggatatacaacccttggagaggtactgggcagcccaccaacagctacgggaaactgatatccctcaattgagtcaggcatcaaggcttagcacccagcaggtgctggattggtttgactctcgattacctcagccagctgaggtggtagtttgtctagatgaagaagaggaagaggaggaggaagaactgccagaagatgatgaggaagaggaggaggaggaggaggaagatgatgatgatgatgatgatgatgtgatcatacaagactagtaatgaactagtccgtaacttgaaagtatttcgatttcttggctttatatatcttgtggaaaggacgattcgacaatatcgcagctggatca

SEQ ID NO: 1329 - DNA, 1832 bp, Homo sapiens
  source 1..1832: mol_type = genomic DNA
accgccaccatggacgacttgaaatatggagtgtatcctctcaaggaagcaagtggatgccctggggctgagaggaatcttctagtttactcttattttgaaaaggagacattgacatttagggatgtggccatagaattctctctggaggagtgggaatgcctgaaccctgctcagcagaatttatatatgaatgtgatgttagaaaactacaaaaacctggtcttcttgggtgttgctgtctctaagcaagacccagtcacctgtctggagcaagaaaaagagccctggaatatgaagagacatgagatggtggatgaacccccagctatgtgttcttattttaccaaagacctttggccagagcaagacataaaagattcttttcaacaagtaatactgagaagatatggcaaatgtgaacatgagaatttacagttaagaaaaggctccgcaagtgtagatgagtataaggtgcacaaagaaggttataatgagctaaaccagtgtttgacaactacccagagcaaaatatttccatgtgataaatatgtgaaagtctttcataaatttttaaatgcaaatagacataagacaagacatactggaaagaaacctttcaaatgtaaaaaatgtggcaaatcattttgcatgcttttacacctaagtcaacataaaagaattcatattagagagaattcttaccaatgtgaagaatgtggcaaagcttttaaatggttctcaacccttactagacacaagagaattcatactggagagaaacccttcaaatgtgaagaatgtggcaaagcttttaagcagtcctcaacccttactacacataagataattcatactggggagaaaccatatagatgtgaagaatgtggcaaagccttcaaccggtcctcacaccttactacacataagataattcatactggagagaagccctacaaatgtgaagaatgtggcaaagcttttaaccagtcttcaacccttagtacacataagttcattcatgctggagagaaaccctacaaatgtgaggaatgtgacaaagcttttaatcgattctcataccttactaaacataagataattcatactggagaaaaatcttacaaatgtgaagaatgtggcaaaggctttaattggtcctcaacccttactaaacataaaagaattcatactggagagaaaccctacaaatgtgaagtgtgtggcaaagcctttaatgagtcctcaaaccttactacacataagatgattcatactggagagaaaccctacaaatgtgaagaatgtggcaaagcttttaaccggtccccacaacttactgcacataagataattcatactggagagaaaccttacaaatgtgaagaatgtggcaaagcttttagccagtcatcaatccttactacacataagagaattcacactggagagaaaccctacaaatgtgaagaatgtggcaaagcttttaaccgatcctcaaatcttactaaacataagataattcatacaggagagaaatcttacaaatgtgaagaatgtggtaaagcctttaaccaatcctcaactcttactaaacataggaaaattcatactagacagaaaccctacaactgtgaagaatgtgacaatacatttaaccagtcctcaaaccttattaaacaaaataattcatactggagagaaactctacaaatgtcaagaatgtgggaaagcctttagtaatgaactagtccgtaacttgaaagtatttcgatttcttggctttatatatcttgtggaaaggacgacgaatgcagaccttgcgaaagaca

SEQ ID NO: 1330 - DNA, 686 bp, Homo sapiens
  source 1..686: mol_type = genomic DNA
accgccaccatgggaaaaaggacttccctagaagtgagtcttggggagttggggggagaaaagtgtcgaggagggcgtcggagtttcccaccgctggctgcttcccggcccgcacgcccgggagggtggcggtgggcgcgcagagatctttgcaaaacagcgtccagggcggaaaacaactcacaggcctgccgcccccaaaggcgggcaggtccggacgcgctgggccctggtcccttcggccgcaaacggcgcaagtcacgcactgcgttcaccgcgcaacaggtgctggagctggagcggcgcttcgtcttccagaagtacctggcgccgtccgagcgagacgggctagctacgcgactcggcctggccaacgcgcaggtggtcacttggttccagaaccggcgagccaagctcaagcgcgatgtggaggagatgcgcgccgacgtcgcctcgctacgcgcgttgtccccggaagtcctgtgcagcttagcactgcccgaaggcgctccagatcccggcctctgcctcggccctgccggccctgactcccggccccacctgtcagacgaggagatacaggtggacgattagtaatgaactagtccgtaacttgaaagtatttcgatttcttggctttatatatcttgtggaaaggacgaagtgaccctcctcgttgatttgca

SEQ ID NO: 1331 - DNA, 698 bp, Homo sapiens
  source 1..698: mol_type = genomic DNA
accgccaccatgaactcgggacgcgagccccgaacaccccggacactcttaagcatcgcagacatcctagccccgcgcatggtcccccgagcaccctctgcgccgcagcttccagagtcgggtccgggtccaacgtcgccgctgtgcgcgctggaggagctgactagtaaaactttccgcggacttgacgcgcgcgctctgcagccctctgaagggcgggcaggtccggacgcgctgggccctggtcccttcggccgcaaacggcgcaagtcacgcactgcgttcaccgcgcaacaggtgctggagctggagcggcgcttcgtcttccagaagtacctggcgccgtccgagcgagacgggctagctacgcgactcggcctggccaacgcgcaggtggtcacttggttccagaaccggcgagccaagctcaagcgcgatgtggaggagatgcgcgccgacgtcgcctcgctacgcgcgttgtccccggaagtcctgtgcagcttagcactgcccgaaggcgctccagatcccggcctctgcctcggccctgccggccctgactcccggccccacctgtcagacgaggagatacaggtggacgattagtaatgaactagtccgtaacttgaaagtatttcgatttcttggctttatatatcttgtggaaaggacgatgattcctactgtggctttgagct

SEQ ID NO: 1332 - DNA, 947 bp, Homo sapiens
  source 1..947: mol_type = genomic DNA
accgccaccatgacttccaaggaggacggcaaggcggcgccgggggaggagcggcggcgcagcccgctggaccacctgcctccgcctgccaactccaacaagccactgacgccgttcagcatcgaggacatcctcaacaagccgtctgtgcggagaagttactcgctgtgcggggcggcgcacctgctggccgccgcggacaagcacgcgcagggcggcttgcccctggcgggccgcgcgctgctctcgcagacctcgccgctgtgcgcgctggaggagctcgccagcaagacgtttaaggggctggaggtcagcgttctgcaggcagccgaaggccgcgacggtatgaccatctttgggcagcggcagacccctaagaagcggcgaaagtcgcgcacggccttcaccaaccaccagatctatgaattggaaaagcgctttctataccagaagtacctgtcccccgccgatcgcgaccaaatcgcgcagcagctgggcctcaccaacgcgcaagtcatcacctggttccagaatcggcgcgctaagctcaagcgggacctggaggagatgaaggccgacgtagagtccgccaagaaactgggccccagcgggcagatggacatcgtggcgctggccgaactcgagcagaactcggaggccacagccggcggtggcggcggctgcggcagggccaagtcgaggcccggctctccggtcctccccccaggcgccccgaaggccccgggcgctggcgccctgcagctctcgcctgcctctccgctcacggaccagccggccagcagccaggactgctcggaggacgaggaagacgaagagatcgacgtggacgattagtaatgaactagtccgtaacttgaaagtatttcgatttcttggctttatatatcttgtggaaaggacgagaccgactcatgtcgcggcctgtg

SEQ ID NO: 1333 - DNA, 2225 bp, Homo sapiens
  source 1..2225: mol_type = genomic DNA
accgccaccatgtctcgggatcggttccggagtcgtggcggtggcggtggtggcttccacaggcgtggaggaggcggcggccgcggcggcctccacgacttccgttctccgccgcccggcatgggcctcaatcagaatcgcggccccatgggtcctggcccgggccagagcggccctaagcctccgatcccgccaccgcctccacaccaacagcagcaacagccaccaccgcagcagccaccgccgcagcagccgccaccgcatcagccgccgccgcatccacagccgcatcagcagcagcagccgccgccaccgccgcaggactcttccaagcccgtcgttgctcagggacccggccccgctcccggagtaggcagcgcaccaccagcctccagctcggccccgcccgccactccaccaacctcgggggccccgccagggtccgggccaggcccgactccgaccccgccgcctgcagtcacctcggcccctcccggggcgccgccacccaccccgccaagcagcggggtccctaccacacctcctcaggccggaggcccgccgcctccgcccgcggcagtcccgggcccgggtccagggcctaagcagggcccaggtccgggtggtcccaaaggcggcaaaatgcctggcgggccgaagccaggtggcggcccgggcctaagtacgcctggcggccaccccaagccgccgcatcgaggcggcggggagccccgcgggggccgccagcaccacccgccctaccaccagcagcatcaccaggggcccccgcccggcgggcccggcggccgcagcgaggagaagatctcggactcggaggggtttaaagccaatttgtctctcttgaggaggcctggagagaaaacttacacacagcgatgtcggttgtttgttgggaatctacctgctgatatcacggaggatgaattcaaaagactatttgctaaatatggagaaccaggagaagtttttatcaacaaaggcaaaggattcggatttattaagcttgaatctagagctttggctgaaattgccaaagccgaactggatgatacacccatgagaggtagacagcttcgagttcgctttgccacacatgctgctgccctttctgttcgtaatctttcaccttatgtttccaatgaactgttggaagaagcctttagccaatttggtcctattgaaagggctgttgtaatagtggatgatcgtggaagatctacagggaaaggcattgttgaatttgcttctaagccagcagcaagaaaggcatttgaacgatgcagtgaaggtgttttcttactgacgacaactcctcgtccagtcattgtggaaccacttgaacaactagatgatgaagatggtcttcctgaaaaacttgcccagaagaatccaatgtatcaaaaggagagagaaacccctcctcgttttgcccagcatggcacgtttgagtacgaatattctcagcgatggaagtctttggatgaaatggaaaaacagcaaagggaacaagttgaaaaaaacatgaaagatgcaaaagacaaattggaaagtgaaatggaagatgcctatcatgaacatcaggcaaatcttttgcgccaagatctgatgagacgacaggaagaattaagacgcatggaagaacttcacaatcaagaaatgcagaaacgtaaagaaatgcaattgaggcaagaggaggaacgacgtagaagagaggaagagatgatgattcgtcaacgtgagatggaagaacaaatgaggcgccaaagagaggaaagttacagccgaatgggctacatggatccacgggaaagagacatgcgaatgggtggcggaggagcaatgaacatgggagatccctatggttcaggaggccagaaatttccacctctaggaggtggtggtggcataggttatgaagctaatcctggcgttccaccagcaaccatgagtggttccatgatgggaagtgacatgcgtactgagcgctttgggcagggaggtgcggggcctgtgggtggacagggtcctagaggaatggggcctggaactccagcaggatatggtagagggagagaagagtacgaaggcccaaacaaaaaaccccgattttagtaatgaactagtccgtaacttgaaagtatttcgatttcttggctttatatatcttgtggaaaggacgacggcatcggcacgtcgtccctggt

SEQ ID NO: 1334 - DNA, 3140 bp, Homo sapiens
  source 1..3140: mol_type = genomic DNA
accgccaccatgacaaagcatccacctaacagacgaggaatcagctttgaagtgggagcccagttggaagcccgggaccgtttaaaaaactggtatccagctcacatagaagacattgactacgaggaaggaaaagtactcatccatttcaagcgttggaaccatcgttatgatgagtggttctgctgggacagtccttatttacgccctttagagaaaatacagctgaggaaagagggcttgcatgaagaggatggatcttctgaatttcaaataaatgagcaggtccttgcttgctggtctgattgtcgtttttacccggccaaagtcactgctgttaacaaggatggtacttacactgtgaaattttatgatggagtagttcagactgtcaaacatattcatgtcaaagctttttccaaagatcagaatattgtgggtaatgctaggcctaaagaaacagatcacaaaagtctttcatcatctcctgataaacgagagaagtttaaagaacagagaaaagcaacagtgaatgtgaagaaagacaaagaagataaacccttaaagacagaaaagcgacccaagcagcctgataaagaaggaaagttaatctgttctgaaaaggggaaagtgtcagagaaaagtcttcccaagaacgagaaggaagacaaggaaaacatttccgaaaatgacagagagtattctggagatgcccaagtggataagaaacctgaaaatgacattgtgaagagtccacaagaaaacttgagggaacccaaaagaaaacgaggcagacccccttccatagctcctactgctgtggattcaaactctcaaactttgcaaccaataacattggaactgagaagaaggaaaatatcaaaaggatgtgaagtcccattaaaacgtcctcggcttgacaaaaattcatcccaggaaaagtcaaaaaactactcggaaaacactgacaaagacttatcgaggagacgttcctccaggctgtccactaatgggacccatgagatcctagatcctgacttggttgtatcagatttggttgatacggatcctttgcaagacacgttgtctagtaccaaggaatctgaagaaggtcagttgaagtctgctttggaagctggccaggtctcatctgcactgacttgccactcctttggggatggatccggggctgcaggcttggagttgaactgcccatcaatgggagaaaacacgatgaaaacagaaccgacttctccccttgtggaattacaagagatttcgactgtggaagtaacaaatacttttaagaaaacagatgattttgggtcatctaatgcaccagctgtcgacctagaccataagtttagatgcaaagttgtggactgtttaaaatttttccgcaaagccaaactgttgcactatcacatgaagtatttccatggaatggagaagtcactggagccagaagagagcccgggaaagaggcatgtccaaaccaggggcccttcagcttcagacaagcccagccaggagaccctgaccaggaagcgggtctctgccagttccccaactacaaaagacaaggaaaagaataaagagaagaaattcaaggagtttgtgagagtgaagccaaagaagaaaaagaaaaagaaaaagaaaaccaaacctgaatgcccctgcagtgaggagatcagtgacacctcccaggaaccttctccacccaaggcatttgctgttaccaggtgtgggtcctcacacaagccaggggtccatatgagcccgcagcttcatggcccagaatctggacaccacaaagggaaagtgaaagcattggaggaggataatttgagtgagtcctcttctgagagctttctctggagtgatgatgagtatggccaagatgtggatgtgaccaccaacccagatgaggaacttgatggggatgaccgctatgacttcgaggtggtccgctgcatctgtgaggtccaggaggaaaatgacttcatgattcagtgtgaagagtgccagtgctggcagcatggggtctgcatgggattactggaagaaaatgtgcccgagaaatacacctgttatgtttgccaagaccctccaggtcagaggcctggcttcaagtactggtatgacaaggagtggctgagcaggggacatatgcatggcctggcatttctagaagagaactactcccatcagaatgccaagaagatcgtggccacccaccagcttcttggtgatgtgcagagagtgattgaggttctgcatggcctgcagctcaagatgagcatcttgcaaagccgggagcatcctgatctgccgctgtggtgccagccttggaaacagcactcaggggaggggagatctcatttcagaaacatccctgtcactgacaccaggagcaaggaggaagctccaagctatagaactttgaacggggcagtggagaagcccaggcccctggccctgcccctgccgcgttctgtggaggaatcctatatcaccagtgagcattgctaccagaagccccgcgcctattaccctgccgtggagcagaagctggtggtggagacgaggggctctgccctcgacgatgcggtcaaccccctccatgagaacggcgatgattccctttccccgcgcctgggctggcctctagaccaagacaggagcaagggggacagtgaccccaaacccggctccccaaaggtgaaggaatatgtctccaaaaaggccctaccagaagaagcccctgctcggaagctgctggacagaggtggagaggggctgctgagctcccagcaccagtggcagtttaacctgctgacccatgtggaatctcttcaggatgaagttacgcacaggatggactccattgagaaggagttggatgtgttggagagctggctggactacactggggaactggagccccctgagccgctggccaggcttccgcagctcaagcattgtatcaagcagctgctgatggacctgggcaaggtgcagcagatcgccctctgctgctcaacatagtaatgaactagtccgtaacttgaaagtatttcgatttcttggctttatatatcttgtggaaaggacgaccatagcatcctcgctgaatccta

SEQ ID NO: 1335 - DNA, 1520 bp, Homo sapiens
  source 1..1520: mol_type = genomic DNA
accgccaccatgatgcaacatgcctccccagcccccgctctgacgatgatggccacgcagaatgtcccgcccccaccctaccaggacagcccacagatgacggcaaccgcccagccaccctccaaggcccaggctgtccacatctctgccccctcagctgctgccagcacacctgtgcccagtgcccccatcgacccccaggcccagctggaggctgacaagcgagctgtatacaggcaccctcttttcccgctcctgacgctgctgtttgagaaatgtgaacaggccacccagggctctgagtgcatcacctccgccagctttgatgtggacatcgagaactttgtccaccagcaggaacaggagcacaaacccttcttcagcgatgacccagaactggacaatctgatggtgaaggcaatccaggtcctgagaatccacctgctggagctggagaaagtcaatgaactctgcaaggacttttgtaaccgttacatcacctgcctcaaaaccaagatgcacagcgacaacctgctcaggaatgatctaggggggccctactcccccaaccagccctccatcaaccttcactcacaggacctcctgcagaattcccccaattccatgtccggagtctccaataacccccaggggattgtggtcccagcctcagcgctccagcagggcaacatcgccatgacaaccgtcaactcacaagttgtgtcaggtggagccttataccaaccggttaccatggtaacctcccagggtcaggtggtcacccaagcaatcccccagggagccatccagatccagaacacacaggttaaccttgacctcacctccctcctggacaatgaggataagaagtccaagaacaaacgaggagtcttgcccaagcatgccaccaatataatgcgttcttggctcttccagcatctcatgcacccctaccccacggaggatgagaagaggcagatcgcagcccagaccaacctcaccctcctgcaagtaaacaactggttcatcaatgcccggaggcgcatcctgcagcccatgcttgatgccagcaacccagatcctgcccccaaagccaagaagatcaagtctcagcaccggcccacccaaagattctggcccaactccatcgctgcgggggtgctgcagcagcagggcggtgccccagggacaaaccccgatggttccatcaacttggacaacctgcagtccctgtcctcagacagtgccaccatggccatgcagcaggctatgatggctgcacacgatgactcattggatgggacagaagaagaggatgaggatgagatggaagaggaggaggaggaggagctggaggaggaggtcgacgagctgcagacgacaaatgtcagcgacctgggcttggaacacagtgactccctggagtagtaatgaactagtccgtaacttgaaagtatttcgatttcttggctttatatatcttgtggaaaggacgactaccttctattagtgtctccagc

SEQ ID NO: 1336 - DNA, 1877 bp, Homo sapiens
  source 1..1877: mol_type = genomic DNA
accgccaccatgtgtaacgggaggaagactgttctagcagatccagagccagagctctacctcgatcctttctgccctccgggtttctccagtcagaaattccccatgcagcatgtgctgtgtaatcatcccccctggatcttcacatgcttgtgtgcagaaggtaacatccagcctggggatccgggcccaggggaccaggagaagcagcaacaagcctctgaggggagaccctggagtgatcaagcagaaggtcctgagggagaaggtgccatgcctttgtttggaagaaccaagaaaaggactctgggagcgttctccaggccaccccagaggcagccagtcagctctcggaacggcctcagaggggtggagttagaagccagcccagctcagtcagggaaccctgaggaaacagacaaattgttgaagaggatagaagtcttaggatttggaacagtcaactgtggagagtgtggactgagcttcagcaagatgacaaacctgctcagtcaccagcggatacactcaggggagaagccctacgtgtgtggggtatgtgagaagggcttcagcctaaagaagagcctcgccagacaccagaaggcacactcgggggagaagccaattgtgtgcagggagtgtggacgaggctttaaccggaagtcaacgctaatcatacacgaacggacacactccggtgagaaaccttacatgtgcagtgagtgtgggcgaggcttcagccagaagtcaaacctcatcatacaccagaggacacactcaggggaaaagccttacgtgtgccgggaatgtggcaaaggcttcagccagaagtcagctgtcgtgagacaccagaggacacacttggaggagaagaccatcgtgtgcagtgactgtggcctgggcttcagcgacaggtcaaacctcatctcccaccagaggacgcactctggggagaagccctacgcctgcaaggagtgtgggcgatgcttcaggcagaggaccacccttgtcaaccaccagaggacacactcaaaggagaagccctatgtgtgcggggtgtgtgggcacagcttcagccagaattcaaccctcatctctcacaggcggacacacactggggagaagccgtatgtttgtggggtgtgtgggcgaggctttagtctcaagtcacacctcaacagacaccagaacatacactcaggagagaagcccattgtgtgcaaggactgtggccggggcttcagccagcaatccaacctcatcagacaccagaggacgcactcaggcgagaagcccatggtgtgtggggagtgcgggcgaggcttcagccagaagtcaaaccttgttgcacaccagaggacgcactcaggggagaggccgtatgtgtgccgagagtgcgggcgaggctttagccaccaggccggtctcatcaggcacaagcggaagcactcgagggagaagccctacatgtgcaggcagtgtggactgggctttggcaataagtcagctctaattacacacaagcgggctcactcggaagagaagccttgtgtgtgcagagagtgtggccaaggctttctccaaaagtcacacctcaccttacatcaaatgacacatacgggggagaagccatatgtgtgcaagacgtgtgggcggggcttcagcctcaagtctcacctcagcagacacaggaagaccacgtctgtccaccacagactgccagtgcagcccgaccctgagccgtgtgcagggcaaccttcggattccttatactctctctagtaatgaactagtccgtaacttgaaagtatttcgatttcttggctttatatatcttgtggaaaggacgaactataatcctcacgtgcggctta

SEQ ID NO: 1337 - DNA, 2066 bp, Homo sapiens
  source 1..2066: mol_type = genomic DNA
accgccaccatggcattcagggatgtggctgtggatttcacccaggatgagtggaggctgctgagccctgctcaaaggactctgtacagagaggtgatgctggagaactacagcaacctggtctcactgggaatttcattttctaaaccagaactcatcacccagctggagcaagggaaagagacctggagagaggaaaaaaaatgttcaccggcaacctgtccagcagatccagagccagagctctacctcgatcctttctgccctccgggtttctccagtcagaaattccccatgcagcatgtgctgtgtaatcatcccccctggatcttcacatgcttgtgtgcagaaggtaacatccagcctggggatccgggcccaggggaccaggagaagcagcaacaagcctctgaggggagaccctggagtgatcaagcagaaggtcctgagggagaaggtgccatgcctttgtttggaagaaccaagaaaaggactctgggagcgttctccaggccaccccagaggcagccagtcagctctcggaacggcctcagaggggtggagttagaagccagcccagctcagtcagggaaccctgaggaaacagacaaattgttgaagaggatagaagtcttaggatttggaacagtcaactgtggagagtgtggactgagcttcagcaagatgacaaacctgctcagtcaccagcggatacactcaggggagaagccctacgtgtgtggggtatgtgagaagggcttcagcctaaagaagagcctcgccagacaccagaaggcacactcgggggagaagccaattgtgtgcagggagtgtggacgaggctttaaccggaagtcaacgctaatcatacacgaacggacacactccggtgagaaaccttacatgtgcagtgagtgtgggcgaggcttcagccagaagtcaaacctcatcatacaccagaggacacactcaggggaaaagccttacgtgtgccgggaatgtggcaaaggcttcagccagaagtcagctgtcgtgagacaccagaggacacacttggaggagaagaccatcgtgtgcagtgactgtggcctgggcttcagcgacaggtcaaacctcatctcccaccagaggacgcactctggggagaagccctacgcctgcaaggagtgtgggcgatgcttcaggcagaggaccacccttgtcaaccaccagaggacacactcaaaggagaagccctatgtgtgcggggtgtgtgggcacagcttcagccagaattcaaccctcatctctcacaggcggacacacactggggagaagccgtatgtttgtggggtgtgtgggcgaggctttagtctcaagtcacacctcaacagacaccagaacatacactcaggagagaagcccattgtgtgcaaggactgtggccggggcttcagccagcaatccaacctcatcagacaccagaggacgcactcaggcgagaagcccatggtgtgtggggagtgcgggcgaggcttcagccagaagtcaaaccttgttgcacaccagaggacgcactcaggggagaggccgtatgtgtgccgagagtgcgggcgaggctttagccaccaggccggtctcatcaggcacaagcggaagcactcgagggagaagccctacatgtgcaggcagtgtggactgggctttggcaataagtcagctctaattacacacaagcgggctcactcggaagagaagccttgtgtgtgcagagagtgtggccaaggctttctccaaaagtcacacctcaccttacatcaaatgacacatacgggggagaagccatatgtgtgcaagacgtgtgggcggggcttcagcctcaagtctcacctcagcagacacaggaagaccacgtctgtccaccacagactgccagtgcagcccgaccctgagccgtgtgcagggcaaccttcggattccttatactctctctagtaatgaactagtccgtaacttgaaagtatttcgatttcttggctttatatatcttgtggaaaggacgaggactgaaggttataaggctagcc

SEQ ID NO: 1338 - DNA, 2009 bp, Homo sapiens
  source 1..2009: mol_type = genomic DNA
accgccaccatgggagctgccggccttcagggcgcgcctggtggcgccgagcatcctgggaggtgtggtccgggcgctgtgccgaggattcggggtagtgtagtcctggcgccccgctggaggagctccccagctggtggctggagcgaccccttgttctttggtggcgctgatccagagccagagctctacctcgatcctttctgccctccgggtttctccagtcagaaattccccatgcagcatgtgctgtgtaatcatcccccctggatcttcacatgcttgtgtgcagaaggtaacatccagcctggggatccgggcccaggggaccaggagaagcagcaacaagcctctgaggggagaccctggagtgatcaagcagaaggtcctgagggagaaggtgccatgcctttgtttggaagaaccaagaaaaggactctgggagcgttctccaggccaccccagaggcagccagtcagctctcggaacggcctcagaggggtggagttagaagccagcccagctcagtcagggaaccctgaggaaacagacaaattgttgaagaggatagaagtcttaggatttggaacagtcaactgtggagagtgtggactgagcttcagcaagatgacaaacctgctcagtcaccagcggatacactcaggggagaagccctacgtgtgtggggtatgtgagaagggcttcagcctaaagaagagcctcgccagacaccagaaggcacactcgggggagaagccaattgtgtgcagggagtgtggacgaggctttaaccggaagtcaacgctaatcatacacgaacggacacactccggtgagaaaccttacatgtgcagtgagtgtgggcgaggcttcagccagaagtcaaacctcatcatacaccagaggacacactcaggggaaaagccttacgtgtgccgggaatgtggcaaaggcttcagccagaagtcagctgtcgtgagacaccagaggacacacttggaggagaagaccatcgtgtgcagtgactgtggcctgggcttcagcgacaggtcaaacctcatctcccaccagaggacgcactctggggagaagccctacgcctgcaaggagtgtgggcgatgcttcaggcagaggaccacccttgtcaaccaccagaggacacactcaaaggagaagccctatgtgtgcggggtgtgtgggcacagcttcagccagaattcaaccctcatctctcacaggcggacacacactggggagaagccgtatgtttgtggggtgtgtgggcgaggctttagtctcaagtcacacctcaacagacaccagaacatacactcaggagagaagcccattgtgtgcaaggactgtggccggggcttcagccagcaatccaacctcatcagacaccagaggacgcactcaggcgagaagcccatggtgtgtggggagtgcgggcgaggcttcagccagaagtcaaaccttgttgcacaccagaggacgcactcaggggagaggccgtatgtgtgccgagagtgcgggcgaggctttagccaccaggccggtctcatcaggcacaagcggaagcactcgagggagaagccctacatgtgcaggcagtgtggactgggctttggcaataagtcagctctaattacacacaagcgggctcactcggaagagaagccttgtgtgtgcagagagtgtggccaaggctttctccaaaagtcacacctcaccttacatcaaatgacacatacgggggagaagccatatgtgtgcaagacgtgtgggcggggcttcagcctcaagtctcacctcagcagacacaggaagaccacgtctgtccaccacagactgccagtgcagcccgaccctgagccgtgtgcagggcaaccttcggattccttatactctctctagtaatgaactagtccgtaacttgaaagtatttcgatttcttggctttatatatcttgtggaaaggacgaccgaatgtctaatgcagtggcggt

SEQ ID NO: 1339 - DNA, 2075 bp, Homo sapiens
  source 1..2075: mol_type = genomic DNA
accgccaccatggcacacatggcattcagggatgtggctgtggatttcacccaggatgagtggaggctgctgagccctgctcaaaggactctgtacagagaggtgatgctggagaactacagcaacctggtctcactgggaatttcattttctaaaccagaactcatcacccagctggagcaagggaaagagacctggagagaggaaaaaaaatgttcaccggcaacctgtccagcagatccagagccagagctctacctcgatcctttctgccctccgggtttctccagtcagaaattccccatgcagcatgtgctgtgtaatcatcccccctggatcttcacatgcttgtgtgcagaaggtaacatccagcctggggatccgggcccaggggaccaggagaagcagcaacaagcctctgaggggagaccctggagtgatcaagcagaaggtcctgagggagaaggtgccatgcctttgtttggaagaaccaagaaaaggactctgggagcgttctccaggccaccccagaggcagccagtcagctctcggaacggcctcagaggggtggagttagaagccagcccagctcagtcagggaaccctgaggaaacagacaaattgttgaagaggatagaagtcttaggatttggaacagtcaactgtggagagtgtggactgagcttcagcaagatgacaaacctgctcagtcaccagcggatacactcaggggagaagccctacgtgtgtggggtatgtgagaagggcttcagcctaaagaagagcctcgccagacaccagaaggcacactcgggggagaagccaattgtgtgcagggagtgtggacgaggctttaaccggaagtcaacgctaatcatacacgaacggacacactccggtgagaaaccttacatgtgcagtgagtgtgggcgaggcttcagccagaagtcaaacctcatcatacaccagaggacacactcaggggaaaagccttacgtgtgccgggaatgtggcaaaggcttcagccagaagtcagctgtcgtgagacaccagaggacacacttggaggagaagaccatcgtgtgcagtgactgtggcctgggcttcagcgacaggtcaaacctcatctcccaccagaggacgcactctggggagaagccctacgcctgcaaggagtgtgggcgatgcttcaggcagaggaccacccttgtcaaccaccagaggacacactcaaaggagaagccctatgtgtgcggggtgtgtgggcacagcttcagccagaattcaaccctcatctctcacaggcggacacacactggggagaagccgtatgtttgtggggtgtgtgggcgaggctttagtctcaagtcacacctcaacagacaccagaacatacactcaggagagaagcccattgtgtgcaaggactgtggccggggcttcagccagcaatccaacctcatcagacaccagaggacgcactcaggcgagaagcccatggtgtgtggggagtgcgggcgaggcttcagccagaagtcaaaccttgttgcacaccagaggacgcactcaggggagaggccgtatgtgtgccgagagtgcgggcgaggctttagccaccaggccggtctcatcaggcacaagcggaagcactcgagggagaagccctacatgtgcaggcagtgtggactgggctttggcaataagtcagctctaattacacacaagcgggctcactcggaagagaagccttgtgtgtgcagagagtgtggccaaggctttctccaaaagtcacacctcaccttacatcaaatgacacatacgggggagaagccatatgtgtgcaagacgtgtgggcggggcttcagcctcaagtctcacctcagcagacacaggaagaccacgtctgtccaccacagactgccagtgcagcccgaccctgagccgtgtgcagggcaaccttcggattccttatactctctctagtaatgaactagtccgtaacttgaaagtatttcgatttcttggctttatatatcttgtggaaaggacgagttatagcataaggctcactttgg

SEQ ID NO: 1340 - DNA, 1781 bp, Homo sapiens
  source 1..1781: mol_type = genomic DNA
accgccaccatgcagcatgtgctgtgtaatcatcccccctggatcttcacatgcttgtgtgcagaaggtaacatccagcctggggatccgggcccaggggaccaggagaagcagcaacaagcctctgaggggagaccctggagtgatcaagcagaaggtcctgagggagaaggtgccatgcctttgtttggaagaaccaagaaaaggactctgggagcgttctccaggccaccccagaggcagccagtcagctctcggaacggcctcagaggggtggagttagaagccagcccagctcagtcagggaaccctgaggaaacagacaaattgttgaagaggatagaagtcttaggatttggaacagtcaactgtggagagtgtggactgagcttcagcaagatgacaaacctgctcagtcaccagcggatacactcaggggagaagccctacgtgtgtggggtatgtgagaagggcttcagcctaaagaagagcctcgccagacaccagaaggcacactcgggggagaagccaattgtgtgcagggagtgtggacgaggctttaaccggaagtcaacgctaatcatacacgaacggacacactccggtgagaaaccttacatgtgcagtgagtgtgggcgaggcttcagccagaagtcaaacctcatcatacaccagaggacacactcaggggaaaagccttacgtgtgccgggaatgtggcaaaggcttcagccagaagtcagctgtcgtgagacaccagaggacacacttggaggagaagaccatcgtgtgcagtgactgtggcctgggcttcagcgacaggtcaaacctcatctcccaccagaggacgcactctggggagaagccctacgcctgcaaggagtgtgggcgatgcttcaggcagaggaccacccttgtcaaccaccagaggacacactcaaaggagaagccctatgtgtgcggggtgtgtgggcacagcttcagccagaattcaaccctcatctctcacaggcggacacacactggggagaagccgtatgtttgtggggtgtgtgggcgaggctttagtctcaagtcacacctcaacagacaccagaacatacactcaggagagaagcccattgtgtgcaaggactgtggccggggcttcagccagcaatccaacctcatcagacaccagaggacgcactcaggcgagaagcccatggtgtgtggggagtgcgggcgaggcttcagccagaagtcaaaccttgttgcacaccagaggacgcactcaggggagaggccgtatgtgtgccgagagtgcgggcgaggctttagccaccaggccggtctcatcaggcacaagcggaagcactcgagggagaagccctacatgtgcaggcagtgtggactgggctttggcaataagtcagctctaattacacacaagcgggctcactcggaagagaagccttgtgtgtgcagagagtgtggccaaggctttctccaaaagtcacacctcaccttacatcaaatgacacatacgggggagaagccatatgtgtgcaagacgtgtgggcggggcttcagcctcaagtctcacctcagcagacacaggaagaccacgtctgtccaccacagactgccagtgcagcccgaccctgagccgtgtgcagggcaaccttcggattccttatactctctctagtaatgaactagtccgtaacttgaaagtatttcgatttcttggctttatatatcttgtggaaaggacgacgactttcactcggataggacacc

SEQ ID NO: 1341 - DNA, 2105 bp, Homo sapiens
  source 1..2105: mol_type = genomic DNA
accgccaccatgggagctgccggccttcagggcgcgcctggtggcgccgagcatcctgggaggtgtggtccgggcgctgtgccgaggattcggggtagtgtagtcctggcgccccgctggaggagctccccagctggtggctggagcgaccccttgttctttggtggcgctggaatttcattttctaaaccagaactcatcacccagctggagcaagggaaagagacctggagagaggaaaaaaaatgttcaccggcaacctgtccagatccagagccagagctctacctcgatcctttctgccctccgggtttctccagtcagaaattccccatgcagcatgtgctgtgtaatcatcccccctggatcttcacatgcttgtgtgcagaaggtaacatccagcctggggatccgggcccaggggaccaggagaagcagcaacaagcctctgaggggagaccctggagtgatcaagcagaaggtcctgagggagaaggtgccatgcctttgtttggaagaaccaagaaaaggactctgggagcgttctccaggccaccccagaggcagccagtcagctctcggaacggcctcagaggggtggagttagaagccagcccagctcagtcagggaaccctgaggaaacagacaaattgttgaagaggatagaagtcttaggatttggaacagtcaactgtggagagtgtggactgagcttcagcaagatgacaaacctgctcagtcaccagcggatacactcaggggagaagccctacgtgtgtggggtatgtgagaagggcttcagcctaaagaagagcctcgccagacaccagaaggcacactcgggggagaagccaattgtgtgcagggagtgtggacgaggctttaaccggaagtcaacgctaatcatacacgaacggacacactccggtgagaaaccttacatgtgcagtgagtgtgggcgaggcttcagccagaagtcaaacctcatcatacaccagaggacacactcaggggaaaagccttacgtgtgccgggaatgtggcaaaggcttcagccagaagtcagctgtcgtgagacaccagaggacacacttggaggagaagaccatcgtgtgcagtgactgtggcctgggcttcagcgacaggtcaaacctcatctcccaccagaggacgcactctggggagaagccctacgcctgcaaggagtgtgggcgatgcttcaggcagaggaccacccttgtcaaccaccagaggacacactcaaaggagaagccctatgtgtgcggggtgtgtgggcacagcttcagccagaattcaaccctcatctctcacaggcggacacacactggggagaagccgtatgtttgtggggtgtgtgggcgaggctttagtctcaagtcacacctcaacagacaccagaacatacactcaggagagaagcccattgtgtgcaaggactgtggccggggcttcagccagcaatccaacctcatcagacaccagaggacgcactcaggcgagaagcccatggtgtgtggggagtgcgggcgaggcttcagccagaagtcaaaccttgttgcacaccagaggacgcactcaggggagaggccgtatgtgtgccgagagtgcgggcgaggctttagccaccaggccggtctcatcaggcacaagcggaagcactcgagggagaagccctacatgtgcaggcagtgtggactgggctttggcaataagtcagctctaattacacacaagcgggctcactcggaagagaagccttgtgtgtgcagagagtgtggccaaggctttctccaaaagtcacacctcaccttacatcaaatgacacatacgggggagaagccatatgtgtgcaagacgtgtgggcggggcttcagcctcaagtctcacctcagcagacacaggaagaccacgtctgtccaccacagactgccagtgcagcccgaccctgagccgtgtgcagggcaaccttcggattccttatactctctctagtaatgaactagtccgtaacttgaaagtatttcgatttcttggctttatatatcttgtggaaaggacgattggcagatcggtgcgttacggcg

SEQ ID NO: 1342 - DNA, 1010 bp, Homo sapiens
  source 1..1010: mol_type = genomic DNA
accgccaccatggatgatttgatgctgtccccggacgatattgaacaatggttcactgaagacccaggtccagatgaagctcccagaatgccagaggctgctccccccgtggcccctgcaccagcagctcctacaccggcggcccctgcaccagccccctcctggcccctgtcatcttctgtcccttcccagaaaacctaccagggcagctacggtttccgtctgggcttcttgcattctgggacagccaagtctgtgacttgcacgtactcccctgccctcaacaagatgttttgccaactggccaagacctgccctgtgcagctgtgggttgattccacacccccgcccggcacccgcgtccgcgccatggccatctacaagcagtcacagcacatgacggaggttgtgaggcgctgcccccaccatgagcgctgctcagatagcgatggtctggcccctcctcagcatcttatccgagtggaaggaaatttgcgtgtggagtatttggatgacagaaacacttttcgacatagtgtggtggtgccctatgagccgcctgaggttggctctgactgtaccaccatccactacaactacatgtgtaacagttcctgcatgggcggcatgaaccggaggcccatcctcaccatcatcacactggaagactccagtggtaatctactgggacggaacagctttgaggtgcgtgtttgtgcctgtcctgggagagaccggcgcacagaggaagagaatctccgcaagaaaggggagcctcaccacgagctgcccccagggagcactaagcgagcactgcccaacaacaccagctcctctccccagccaaagaagaaaccactggatggagaatatttcacccttcaggaccagaccagctttcaaaaagaaaattgttagtaatgaactagtccgtaacttgaaagtatttcgatttcttggctttatatatcttgtggaaaggacgaatttcatacttggagcacttcggg

SEQ ID NO: 1343 - DNA, 1166 bp, Homo sapiens
  source 1..1166: mol_type = genomic DNA
accgccaccatggatgatttgatgctgtccccggacgatattgaacaatggttcactgaagacccaggtccagatgaagctcccagaatgccagaggctgctccccccgtggcccctgcaccagcagctcctacaccggcggcccctgcaccagccccctcctggcccctgtcatcttctgtcccttcccagaaaacctaccagggcagctacggtttccgtctgggcttcttgcattctgggacagccaagtctgtgacttgcacgtactcccctgccctcaacaagatgttttgccaactggccaagacctgccctgtgcagctgtgggttgattccacacccccgcccggcacccgcgtccgcgccatggccatctacaagcagtcacagcacatgacggaggttgtgaggcgctgcccccaccatgagcgctgctcagatagcgatggtctggcccctcctcagcatcttatccgagtggaaggaaatttgcgtgtggagtatttggatgacagaaacacttttcgacatagtgtggtggtgccctatgagccgcctgaggttggctctgactgtaccaccatccactacaactacatgtgtaacagttcctgcatgggcggcatgaaccggaggcccatcctcaccatcatcacactggaagactccagtggtaatctactgggacggaacagctttgaggtgcgtgtttgtgcctgtcctgggagagaccggcgcacagaggaagagaatctccgcaagaaaggggagcctcaccacgagctgcccccagggagcactaagcgagcactgcccaacaacaccagctcctctccccagccaaagaagaaaccactggatggagaatatttcacccttcagatccgtgggcgtgagcgcttcgagatgttccgagagctgaatgaggccttggaactcaaggatgcccaggctgggaaggagccaggggggagcagggctcactccagccacctgaagtccaaaaagggtcagtctacctcccgccataaaaaactcatgttcaagacagaagggcctgactcagactagtaatgaactagtccgtaacttgaaagtatttcgatttcttggctttatatatcttgtggaaaggacgatggtacgggatgcgacgacccgga

SEQ ID NO: 1344 - DNA, 806 bp, Homo sapiens
  source 1..806: mol_type = genomic DNA
accgccaccatggccatctacaagcagtcacagcacatgacggaggttgtgaggcgctgcccccaccatgagcgctgctcagatagcgatggtctggcccctcctcagcatcttatccgagtggaaggaaatttgcgtgtggagtatttggatgacagaaacacttttcgacatagtgtggtggtgccctatgagccgcctgaggttggctctgactgtaccaccatccactacaactacatgtgtaacagttcctgcatgggcggcatgaaccggaggcccatcctcaccatcatcacactggaagactccagtggtaatctactgggacggaacagctttgaggtgcgtgtttgtgcctgtcctgggagagaccggcgcacagaggaagagaatctccgcaagaaaggggagcctcaccacgagctgcccccagggagcactaagcgagcactgcccaacaacaccagctcctctccccagccaaagaagaaaccactggatggagaatatttcacccttcagatccgtgggcgtgagcgcttcgagatgttccgagagctgaatgaggccttggaactcaaggatgcccaggctgggaaggagccaggggggagcagggctcactccagccacctgaagtccaaaaagggtcagtctacctcccgccataaaaaactcatgttcaagacagaagggcctgactcagactagtaatgaactagtccgtaacttgaaagtatttcgatttcttggctttatatatcttgtggaaaggacgagcatactagctatcagaactcttc

SEQ ID NO: 1345 - DNA, 746 bp, Homo sapiens
  source 1..746: mol_type = genomic DNA
accgccaccatgttttgccaactggccaagacctgccctgtgcagctgtgggttgattccacacccccgcccggcacccgcgtccgcgccatggccatctacaagcagtcacagcacatgacggaggttgtgaggcgctgcccccaccatgagcgctgctcagatagcgatggtctggcccctcctcagcatcttatccgagtggaaggaaatttgcgtgtggagtatttggatgacagaaacacttttcgacatagtgtggtggtgccctatgagccgcctgaggttggctctgactgtaccaccatccactacaactacatgtgtaacagttcctgcatgggcggcatgaaccggaggcccatcctcaccatcatcacactggaagactccagtggtaatctactgggacggaacagctttgaggtgcgtgtttgtgcctgtcctgggagagaccggcgcacagaggaagagaatctccgcaagaaaggggagcctcaccacgagctgcccccagggagcactaagcgagcactgcccaacaacaccagctcctctccccagccaaagaagaaaccactggatggagaatatttcacccttcagatgctacttgacttacgatggtgttacttcctgataaactcgtcgtagtaatgaactagtccgtaacttgaaagtatttcgatttcttggctttatatatcttgtggaaaggacgacaagcagactctaaactcggatca

SEQ ID NO: 1346 - DNA, 1142 bp, Homo sapiens
  source 1..1142: mol_type = genomic DNA
accgccaccatggaggagccgcagtcagatcctagcgtcgagccccctctgagtcaggaaacattttcagacctatggaaactacttcctgaaaacaacgttctgtcccccttgccgtcccaagcaatggatgatttgatgctgtccccggacgatattgaacaatggttcactgaagacccaggtccagatgaagctcccagaatgccagaggctgctccccccgtggcccctgcaccagcagctcctacaccggcggcccctgcaccagccccctcctggcccctgtcatcttctgtcccttcccagaaaacctaccagggcagctacggtttccgtctgggcttcttgcattctgggacagccaagtctgtgacttgcacgtactcccctgccctcaacaagatgttttgccaactggccaagacctgccctgtgcagctgtgggttgattccacacccccgcccggcacccgcgtccgcgccatggccatctacaagcagtcacagcacatgacggaggttgtgaggcgctgcccccaccatgagcgctgctcagatagcgatggtctggcccctcctcagcatcttatccgagtggaaggaaatttgcgtgtggagtatttggatgacagaaacacttttcgacatagtgtggtggtgccctatgagccgcctgaggttggctctgactgtaccaccatccactacaactacatgtgtaacagttcctgcatgggcggcatgaaccggaggcccatcctcaccatcatcacactggaagactccagtggtaatctactgggacggaacagctttgaggtgcgtgtttgtgcctgtcctgggagagaccggcgcacagaggaagagaatctccgcaagaaaggggagcctcaccacgagctgcccccagggagcactaagcgagcactgcccaacaacaccagctcctctccccagccaaagaagaaaccactggatggagaatatttcacccttcagatgctacttgacttacgatggtgttacttcctgataaactcgtcgtagtaatgaactagtccgtaacttgaaagtatttcgatttcttggctttatatatcttgtggaaaggacgatgcagtgtataggtttgaggacaa

SEQ ID NO: 1347 - DNA, 1283 bp, Homo sapiens
  source 1..1283: mol_type = genomic DNA
accgccaccatggaggagccgcagtcagatcctagcgtcgagccccctctgagtcaggaaacattttcagacctatggaaactacttcctgaaaacaacgttctgtcccccttgccgtcccaagcaatggatgatttgatgctgtccccggacgatattgaacaatggttcactgaagacccaggtccagatgaagctcccagaatgccagaggctgctccccccgtggcccctgcaccagcagctcctacaccggcggcccctgcaccagccccctcctggcccctgtcatcttctgtcccttcccagaaaacctaccagggcagctacggtttccgtctgggcttcttgcattctgggacagccaagtctgtgacttgcacgtactcccctgccctcaacaagatgttttgccaactggccaagacctgccctgtgcagctgtgggttgattccacacccccgcccggcacccgcgtccgcgccatggccatctacaagcagtcacagcacatgacggaggttgtgaggcgctgcccccaccatgagcgctgctcagatagcgatggtctggcccctcctcagcatcttatccgagtggaaggaaatttgcgtgtggagtatttggatgacagaaacacttttcgacatagtgtggtggtgccctatgagccgcctgaggttggctctgactgtaccaccatccactacaactacatgtgtaacagttcctgcatgggcggcatgaaccggaggcccatcctcaccatcatcacactggaagactccagtggtaatctactgggacggaacagctttgaggtgcgtgtttgtgcctgtcctgggagagaccggcgcacagaggaagagaatctccgcaagaaaggggagcctcaccacgagctgcccccagggagcactaagcgagcactgcccaacaacaccagctcctctccccagccaaagaagaaaccactggatggagaatatttcacccttcagatccgtgggcgtgagcgcttcgagatgttccgagagctgaatgaggccttggaactcaaggatgcccaggctgggaaggagccaggggggagcagggctcactccagccacctgaagtccaaaaagggtcagtctacctcccgccataaaaaactcatgttcaagacagaagggcctgactcagactagtaatgaactagtccgtaacttgaaagtatttcgatttcttggctttatatatcttgtggaaaggacgatcgctctacagagactgtatcggc

SEQ ID NO: 1348 - DNA, 1025 bp, Homo sapiens
  source 1..1025: mol_type = genomic DNA
accgccaccatggatgatttgatgctgtccccggacgatattgaacaatggttcactgaagacccaggtccagatgaagctcccagaatgccagaggctgctccccccgtggcccctgcaccagcagctcctacaccggcggcccctgcaccagccccctcctggcccctgtcatcttctgtcccttcccagaaaacctaccagggcagctacggtttccgtctgggcttcttgcattctgggacagccaagtctgtgacttgcacgtactcccctgccctcaacaagatgttttgccaactggccaagacctgccctgtgcagctgtgggttgattccacacccccgcccggcacccgcgtccgcgccatggccatctacaagcagtcacagcacatgacggaggttgtgaggcgctgcccccaccatgagcgctgctcagatagcgatggtctggcccctcctcagcatcttatccgagtggaaggaaatttgcgtgtggagtatttggatgacagaaacacttttcgacatagtgtggtggtgccctatgagccgcctgaggttggctctgactgtaccaccatccactacaactacatgtgtaacagttcctgcatgggcggcatgaaccggaggcccatcctcaccatcatcacactggaagactccagtggtaatctactgggacggaacagctttgaggtgcgtgtttgtgcctgtcctgggagagaccggcgcacagaggaagagaatctccgcaagaaaggggagcctcaccacgagctgcccccagggagcactaagcgagcactgcccaacaacaccagctcctctccccagccaaagaagaaaccactggatggagaatatttcacccttcagatgctacttgacttacgatggtgttacttcctgataaactcgtcgtagtaatgaactagtccgtaacttgaaagtatttcgatttcttggctttatatatcttgtggaaaggacgattatccggaggaggatgatcgcaa

SEQ ID NO: 1349 - DNA, 887 bp, Homo sapiens
  source 1..887: mol_type = genomic DNA
accgccaccatgttttgccaactggccaagacctgccctgtgcagctgtgggttgattccacacccccgcccggcacccgcgtccgcgccatggccatctacaagcagtcacagcacatgacggaggttgtgaggcgctgcccccaccatgagcgctgctcagatagcgatggtctggcccctcctcagcatcttatccgagtggaaggaaatttgcgtgtggagtatttggatgacagaaacacttttcgacatagtgtggtggtgccctatgagccgcctgaggttggctctgactgtaccaccatccactacaactacatgtgtaacagttcctgcatgggcggcatgaaccggaggcccatcctcaccatcatcacactggaagactccagtggtaatctactgggacggaacagctttgaggtgcgtgtttgtgcctgtcctgggagagaccggcgcacagaggaagagaatctccgcaagaaaggggagcctcaccacgagctgcccccagggagcactaagcgagcactgcccaacaacaccagctcctctccccagccaaagaagaaaccactggatggagaatatttcacccttcagatccgtgggcgtgagcgcttcgagatgttccgagagctgaatgaggccttggaactcaaggatgcccaggctgggaaggagccaggggggagcagggctcactccagccacctgaagtccaaaaagggtcagtctacctcccgccataaaaaactcatgttcaagacagaagggcctgactcagactagtaatgaactagtccgtaacttgaaagtatttcgatttcttggctttatatatcttgtggaaaggacgatgaatggatgttatcatcaatatc

SEQ ID NO: 1350 - DNA, 1127 bp, Homo sapiens
  source 1..1127: mol_type = genomic DNA
accgccaccatggaggagccgcagtcagatcctagcgtcgagccccctctgagtcaggaaacattttcagacctatggaaactacttcctgaaaacaacgttctgtcccccttgccgtcccaagcaatggatgatttgatgctgtccccggacgatattgaacaatggttcactgaagacccaggtccagatgaagctcccagaatgccagaggctgctccccccgtggcccctgcaccagcagctcctacaccggcggcccctgcaccagccccctcctggcccctgtcatcttctgtcccttcccagaaaacctaccagggcagctacggtttccgtctgggcttcttgcattctgggacagccaagtctgtgacttgcacgtactcccctgccctcaacaagatgttttgccaactggccaagacctgccctgtgcagctgtgggttgattccacacccccgcccggcacccgcgtccgcgccatggccatctacaagcagtcacagcacatgacggaggttgtgaggcgctgcccccaccatgagcgctgctcagatagcgatggtctggcccctcctcagcatcttatccgagtggaaggaaatttgcgtgtggagtatttggatgacagaaacacttttcgacatagtgtggtggtgccctatgagccgcctgaggttggctctgactgtaccaccatccactacaactacatgtgtaacagttcctgcatgggcggcatgaaccggaggcccatcctcaccatcatcacactggaagactccagtggtaatctactgggacggaacagctttgaggtgcgtgtttgtgcctgtcctgggagagaccggcgcacagaggaagagaatctccgcaagaaaggggagcctcaccacgagctgcccccagggagcactaagcgagcactgcccaacaacaccagctcctctccccagccaaagaagaaaccactggatggagaatatttcacccttcaggaccagaccagctttcaaaaagaaaattgttagtaatgaactagtccgtaacttgaaagtatttcgatttcttggctttatatatcttgtggaaaggacgacatcttgttgcctagatcgttagt

SEQ ID NO: 1351 - DNA, 731 bp, Homo sapiens
  source 1..731: mol_type = genomic DNA
accgccaccatgttttgccaactggccaagacctgccctgtgcagctgtgggttgattccacacccccgcccggcacccgcgtccgcgccatggccatctacaagcagtcacagcacatgacggaggttgtgaggcgctgcccccaccatgagcgctgctcagatagcgatggtctggcccctcctcagcatcttatccgagtggaaggaaatttgcgtgtggagtatttggatgacagaaacacttttcgacatagtgtggtggtgccctatgagccgcctgaggttggctctgactgtaccaccatccactacaactacatgtgtaacagttcctgcatgggcggcatgaaccggaggcccatcctcaccatcatcacactggaagactccagtggtaatctactgggacggaacagctttgaggtgcgtgtttgtgcctgtcctgggagagaccggcgcacagaggaagagaatctccgcaagaaaggggagcctcaccacgagctgcccccagggagcactaagcgagcactgcccaacaacaccagctcctctccccagccaaagaagaaaccactggatggagaatatttcacccttcaggaccagaccagctttcaaaaagaaaattgttagtaatgaactagtccgtaacttgaaagtatttcgatttcttggctttatatatcttgtggaaaggacgacgctggatccaacccaacagtgga

SEQ ID NO: 1352 - DNA, 650 bp, Homo sapiens
  source 1..650: mol_type = genomic DNA
accgccaccatggccatctacaagcagtcacagcacatgacggaggttgtgaggcgctgcccccaccatgagcgctgctcagatagcgatggtctggcccctcctcagcatcttatccgagtggaaggaaatttgcgtgtggagtatttggatgacagaaacacttttcgacatagtgtggtggtgccctatgagccgcctgaggttggctctgactgtaccaccatccactacaactacatgtgtaacagttcctgcatgggcggcatgaaccggaggcccatcctcaccatcatcacactggaagactccagtggtaatctactgggacggaacagctttgaggtgcgtgtttgtgcctgtcctgggagagaccggcgcacagaggaagagaatctccgcaagaaaggggagcctcaccacgagctgcccccagggagcactaagcgagcactgcccaacaacaccagctcctctccccagccaaagaagaaaccactggatggagaatatttcacccttcaggaccagaccagctttcaaaaagaaaattgttagtaatgaactagtccgtaacttgaaagtatttcgatttcttggctttatatatcttgtggaaaggacgagagctcagttcgtcaagcagtatg

SEQ ID NO: 1353 - DNA, 665 bp, Homo sapiens
  source 1..665: mol_type = genomic DNA
accgccaccatggccatctacaagcagtcacagcacatgacggaggttgtgaggcgctgcccccaccatgagcgctgctcagatagcgatggtctggcccctcctcagcatcttatccgagtggaaggaaatttgcgtgtggagtatttggatgacagaaacacttttcgacatagtgtggtggtgccctatgagccgcctgaggttggctctgactgtaccaccatccactacaactacatgtgtaacagttcctgcatgggcggcatgaaccggaggcccatcctcaccatcatcacactggaagactccagtggtaatctactgggacggaacagctttgaggtgcgtgtttgtgcctgtcctgggagagaccggcgcacagaggaagagaatctccgcaagaaaggggagcctcaccacgagctgcccccagggagcactaagcgagcactgcccaacaacaccagctcctctccccagccaaagaagaaaccactggatggagaatatttcacccttcagatgctacttgacttacgatggtgttacttcctgataaactcgtcgtagtaatgaactagtccgtaacttgaaagtatttcgatttcttggctttatatatcttgtggaaaggacgagagcgccctcccggaaggaattgg

SEQ ID NO: 1354 - DNA, 1274 bp, Homo sapiens
  source 1..1274: mol_type = genomic DNA
accgccaccatggagttaggctcgcgccggcgcagtgtcggctgccggtgccgcggcctttgtctcgcagtcaggagggagcaagtgacgtttgaggacgtggtagtgggcttcagccaggaggagtgggggcagctgaagcctgcccagaggaccctgtaccgtgatgtaatgctggacaccttcaggcttctggtctctgtgggacattggttaccgaagccgaatgtcatctccctgctggagcaagaggcagagctgtgggcggtggagtctagacttccccaaggcgtgtacccagacttggaaactagacccaaagtcaaactgtcagttctaaagcaaggcatctctgaagaaatatccaacagtgtcatcttggtagaaagattcctgtgggatggtctgtggtactgcaggggtgaggacactgagggccactgggaatggagttgtgagagtctagagagcctggcagtgccggtggccttcacgcctgtgaagacgcctgttctggagcagtggcagaggaatgggtttggggaaaacataagtctgaaccctgatctcccacatcaaccaatgactcctgaaagacaaagcccccacacatggggaacacgtggaaaaagggagaagccagacctaaatgttttacagaaaacctgtgtaaaagagaaaccctacaaatgtcaggaatgcggaaaggcctttagtcacagctcagcacttatcgaacaccaccggacgcacacaggagagagaccttacgaatgtcacgaatgcttaaaaggcttccggaacagctcggcacttaccaaacaccagagaatccatactggggagaaaccctataaatgcactcagtgtgggaggaccttcaaccaaattgccccactgatccagcaccagagaactcacacaggtgagaagccctatgaatgcagcgaatgtgggaaatccttcagttttaggtcctccttcagccagcacgagcgaactcacacaggcgagaagccctacgagtgcagtgagtgtgggaaagccttccggcaaagcatccacctcacccagcatctgcgaatccacactggggagaaaccctatcagtgtggtgagtgtggcaaggcctttacccacagctcctcccttaccaagcaccagagaactcacactggatagtaatgaactagtccgtaacttgaaagtatttcgatttcttggctttatatatcttgtggaaaggacgatttcgacttaacaaacgagtagtg

SEQ ID NO: 1355 - DNA, 2114 bp, Homo sapiens
  source 1..2114: mol_type = genomic DNA
accgccaccatgacccctggggtgcgcgtctccacagacccggagcaagtgacgtttgaggacgtggtagtgggcttcagccaggaggagtgggggcagctgaagcctgcccagaggaccctgtaccgtgatgtaatgctggacaccttcaggcttctggtctctgtgggacattggttaccgaagccgaatgtcatctccctgctggagcaagaggcagagctgtgggcggtggagtctagacttccccaaggcgtgtacccagagattaagggacatttccagtttttgcttctttcagacttggaaactagacccaaagtcaaactgtcagttctaaagcaaggcatctctgaagaaatatccaacagtgtcatcttggtagaaagattcctgtgggatggtctgtggtactgcaggggtgaggacactgagggccactgggaatggagttgtgagagtctagagagcctggcagtgccggtggccttcacgcctgtgaagacgcctgttctggagcagtggcagaggaatgggtttggggaaaacataagtctgaaccctgatctcccacatcaaccaatgactcctgaaagacaaagcccccacacatggggaacacgtggaaaaagggagaagccagacctaaatgttttacagaaaacctgtgtaaaagagaaaccctacaaatgtcaggaatgcggaaaggcctttagtcacagctcagcacttatcgaacaccaccggacgcacacaggagagagaccttacgaatgtcacgaatgcttaaaaggcttccggaacagctcggcacttaccaaacaccagagaatccatactggggagaaaccctataaatgcactcagtgtgggaggaccttcaaccaaattgccccactgatccagcaccagagaactcacacaggtgagaagccctatgaatgcagcgaatgtgggaaatccttcagttttaggtcctccttcagccagcacgagcgaactcacacaggcgagaagccctacgagtgcagtgagtgtgggaaagccttccggcaaagcatccacctcacccagcatctgcgaatccacactggggagaaaccctatcagtgtggtgagtgtggcaaggccttcagccacagctcatccttgaccaaacaccagcgaatccacacaggggagaagccctacgagtgccatgagtgtggaaaagccttcacccagatcacaccactgattcagcaccagaggacccacacaggagaaaagccctatgagtgtggtgagtgtgggaaagccttcagtcagagcacactcctgaccgagcatcggaggattcacacaggagagaagccctatggatgcaacgagtgtgggaaaaccttcagccacagctcctcactcagccagcatgagcggacacacacaggagagaagccctatgagtgcagtcagtgtgggaaggccttccggcagagcacacacctcacccaacaccagcgaatccacacaggggagaagccctatgaatgcaatgactgcggcaaggcattcagtcacagctcgtccctcaccaaacatcagcgaatccacactggggagaagccctacgaatgcaaccagtgtggcagagccttcagccagcttgctcccctcattcagcatcagaggatccacacaggagagaaaccctatgaatgtaaccagtgtggcagagccttcagccagagctcccttctcatcgaacaccagaggattcacaccaaggaaaagccgtatgggtgcaatgagtgtgggaaatccttcagccacagctcctcgctcagccagcacgaaaggacgcacactggggaaaagccctatgagtgtcacgattgcggaaagtcctttaggcagagcacccacctcactcagcaccggaggatccacacaggagagaagccatatgcatgcagggactgtggaaaggcctttacccacagctcctcccttaccaagcaccagagaactcacactggatagtaatgaactagtccgtaacttgaaagtatttcgatttcttggctttatatatcttgtggaaaggacgacgcttccagttctctgggtgaatg

SEQ ID NO: 1356 - DNA, 2078 bp, Homo sapiens
  source 1..2078: mol_type = genomic DNA
accgccaccatgacccctggggtgcgcgtctccacagacccggagcaagtgacgtttgaggacgtggtagtgggcttcagccaggaggagtgggggcagctgaagcctgcccagaggaccctgtaccgtgatgtaatgctggacaccttcaggcttctggtctctgtgggacattggttaccgaagccgaatgtcatctccctgctggagcaagaggcagagctgtgggcggtggagtctagacttccccaaggcgtgtacccagacttggaaactagacccaaagtcaaactgtcagttctaaagcaaggcatctctgaagaaatatccaacagtgtcatcttggtagaaagattcctgtgggatggtctgtggtactgcaggggtgaggacactgagggccactgggaatggagttgtgagagtctagagagcctggcagtgccggtggccttcacgcctgtgaagacgcctgttctggagcagtggcagaggaatgggtttggggaaaacataagtctgaaccctgatctcccacatcaaccaatgactcctgaaagacaaagcccccacacatggggaacacgtggaaaaagggagaagccagacctaaatgttttacagaaaacctgtgtaaaagagaaaccctacaaatgtcaggaatgcggaaaggcctttagtcacagctcagcacttatcgaacaccaccggacgcacacaggagagagaccttacgaatgtcacgaatgcttaaaaggcttccggaacagctcggcacttaccaaacaccagagaatccatactggggagaaaccctataaatgcactcagtgtgggaggaccttcaaccaaattgccccactgatccagcaccagagaactcacacaggtgagaagccctatgaatgcagcgaatgtgggaaatccttcagttttaggtcctccttcagccagcacgagcgaactcacacaggcgagaagccctacgagtgcagtgagtgtgggaaagccttccggcaaagcatccacctcacccagcatctgcgaatccacactggggagaaaccctatcagtgtggtgagtgtggcaaggccttcagccacagctcatccttgaccaaacaccagcgaatccacacaggggagaagccctacgagtgccatgagtgtggaaaagccttcacccagatcacaccactgattcagcaccagaggacccacacaggagaaaagccctatgagtgtggtgagtgtgggaaagccttcagtcagagcacactcctgaccgagcatcggaggattcacacaggagagaagccctatggatgcaacgagtgtgggaaaaccttcagccacagctcctcactcagccagcatgagcggacacacacaggagagaagccctatgagtgcagtcagtgtgggaaggccttccggcagagcacacacctcacccaacaccagcgaatccacacaggggagaagccctatgaatgcaatgactgcggcaaggcattcagtcacagctcgtccctcaccaaacatcagcgaatccacactggggagaagccctacgaatgcaaccagtgtggcagagccttcagccagcttgctcccctcattcagcatcagaggatccacacaggagagaaaccctatgaatgtaaccagtgtggcagagccttcagccagagctcccttctcatcgaacaccagaggattcacaccaaggaaaagccgtatgggtgcaatgagtgtgggaaatccttcagccacagctcctcgctcagccagcacgaaaggacgcacactggggaaaagccctatgagtgtcacgattgcggaaagtcctttaggcagagcacccacctcactcagcaccggaggatccacacaggagagaagccatatgcatgcagggactgtggaaaggcctttacccacagctcctcccttaccaagcaccagagaactcacactggatagtaatgaactagtccgtaacttgaaagtatttcgatttcttggctttatatatcttgtggaaaggacgagatcggcctcaatcccgaggcagg

SEQ ID NO: 1357 - DNA, 1952 bp, Homo sapiens
  source 1..1952: mol_type = genomic DNA
accgccaccatgctggacaccttcaggcttctggtctctgtgggacattggttaccgaagccgaatgtcatctccctgctggagcaagaggcagagctgtgggcggtggagtctagacttccccaaggcgtgtacccagacttggaaactagacccaaagtcaaactgtcagttctaaagcaaggcatctctgaagaaatatccaacagtgtcatcttggtagaaagattcctgtgggatggtctgtggtactgcaggggtgaggacactgagggccactgggaatggagttgtgagagtctagagagcctggcagtgccggtggccttcacgcctgtgaagacgcctgttctggagcagtggcagaggaatgggtttggggaaaacataagtctgaaccctgatctcccacatcaaccaatgactcctgaaagacaaagcccccacacatggggaacacgtggaaaaagggagaagccagacctaaatgttttacagaaaacctgtgtaaaagagaaaccctacaaatgtcaggaatgcggaaaggcctttagtcacagctcagcacttatcgaacaccaccggacgcacacaggagagagaccttacgaatgtcacgaatgcttaaaaggcttccggaacagctcggcacttaccaaacaccagagaatccatactggggagaaaccctataaatgcactcagtgtgggaggaccttcaaccaaattgccccactgatccagcaccagagaactcacacaggtgagaagccctatgaatgcagcgaatgtgggaaatccttcagttttaggtcctccttcagccagcacgagcgaactcacacaggcgagaagccctacgagtgcagtgagtgtgggaaagccttccggcaaagcatccacctcacccagcatctgcgaatccacactggggagaaaccctatcagtgtggtgagtgtggcaaggccttcagccacagctcatccttgaccaaacaccagcgaatccacacaggggagaagccctacgagtgccatgagtgtggaaaagccttcacccagatcacaccactgattcagcaccagaggacccacacaggagaaaagccctatgagtgtggtgagtgtgggaaagccttcagtcagagcacactcctgaccgagcatcggaggattcacacaggagagaagccctatggatgcaacgagtgtgggaaaaccttcagccacagctcctcactcagccagcatgagcggacacacacaggagagaagccctatgagtgcagtcagtgtgggaaggccttccggcagagcacacacctcacccaacaccagcgaatccacacaggggagaagccctatgaatgcaatgactgcggcaaggcattcagtcacagctcgtccctcaccaaacatcagcgaatccacactggggagaagccctacgaatgcaaccagtgtggcagagccttcagccagcttgctcccctcattcagcatcagaggatccacacaggagagaaaccctatgaatgtaaccagtgtggcagagccttcagccagagctcccttctcatcgaacaccagaggattcacaccaaggaaaagccgtatgggtgcaatgagtgtgggaaatccttcagccacagctcctcgctcagccagcacgaaaggacgcacactggggaaaagccctatgagtgtcacgattgcggaaagtcctttaggcagagcacccacctcactcagcaccggaggatccacacaggagagaagccatatgcatgcagggactgtggaaaggcctttacccacagctcctcccttaccaagcaccagagaactcacactggatagtaatgaactagtccgtaacttgaaagtatttcgatttcttggctttatatatcttgtggaaaggacgatctctctccgtccattacctaata

SEQ ID NO: 1358 - DNA, 2150 bp, Homo sapiens
  source 1..2150: mol_type = genomic DNA
accgccaccatggagttaggctcgcgccggcgcagtgtcggctgccggtgccgcggcctttgtctcgcagtcaggagggagcaagtgacgtttgaggacgtggtagtgggcttcagccaggaggagtgggggcagctgaagcctgcccagaggaccctgtaccgtgatgtaatgctggacaccttcaggcttctggtctctgtgggacattggttaccgaagccgaatgtcatctccctgctggagcaagaggcagagctgtgggcggtggagtctagacttccccaaggcgtgtacccagagattaagggacatttccagtttttgcttctttcagacttggaaactagacccaaagtcaaactgtcagttctaaagcaaggcatctctgaagaaatatccaacagtgtcatcttggtagaaagattcctgtgggatggtctgtggtactgcaggggtgaggacactgagggccactgggaatggagttgtgagagtctagagagcctggcagtgccggtggccttcacgcctgtgaagacgcctgttctggagcagtggcagaggaatgggtttggggaaaacataagtctgaaccctgatctcccacatcaaccaatgactcctgaaagacaaagcccccacacatggggaacacgtggaaaaagggagaagccagacctaaatgttttacagaaaacctgtgtaaaagagaaaccctacaaatgtcaggaatgcggaaaggcctttagtcacagctcagcacttatcgaacaccaccggacgcacacaggagagagaccttacgaatgtcacgaatgcttaaaaggcttccggaacagctcggcacttaccaaacaccagagaatccatactggggagaaaccctataaatgcactcagtgtgggaggaccttcaaccaaattgccccactgatccagcaccagagaactcacacaggtgagaagccctatgaatgcagcgaatgtgggaaatccttcagttttaggtcctccttcagccagcacgagcgaactcacacaggcgagaagccctacgagtgcagtgagtgtgggaaagccttccggcaaagcatccacctcacccagcatctgcgaatccacactggggagaaaccctatcagtgtggtgagtgtggcaaggccttcagccacagctcatccttgaccaaacaccagcgaatccacacaggggagaagccctacgagtgccatgagtgtggaaaagccttcacccagatcacaccactgattcagcaccagaggacccacacaggagaaaagccctatgagtgtggtgagtgtgggaaagccttcagtcagagcacactcctgaccgagcatcggaggattcacacaggagagaagccctatggatgcaacgagtgtgggaaaaccttcagccacagctcctcactcagccagcatgagcggacacacacaggagagaagccctatgagtgcagtcagtgtgggaaggccttccggcagagcacacacctcacccaacaccagcgaatccacacaggggagaagccctatgaatgcaatgactgcggcaaggcattcagtcacagctcgtccctcaccaaacatcagcgaatccacactggggagaagccctacgaatgcaaccagtgtggcagagccttcagccagcttgctcccctcattcagcatcagaggatccacacaggagagaaaccctatgaatgtaaccagtgtggcagagccttcagccagagctcccttctcatcgaacaccagaggattcacaccaaggaaaagccgtatgggtgcaatgagtgtgggaaatccttcagccacagctcctcgctcagccagcacgaaaggacgcacactggggaaaagccctatgagtgtcacgattgcggaaagtcctttaggcagagcacccacctcactcagcaccggaggatccacacaggagagaagccatatgcatgcagggactgtggaaaggcctttacccacagctcctcccttaccaagcaccagagaactcacactggatagtaatgaactagtccgtaacttgaaagtatttcgatttcttggctttatatatcttgtggaaaggacgagatgacccgggcgatcgagaataa

SEQ ID NO: 1359 - DNA, 7442 bp, Homo sapiens
  source 1..7442: mol_type = genomic DNA
accgccaccatggacactggggacacagctctaggacaaaaagctacctcaaggtctggagaaactgataaagcatcaggtagatggagacaggaacaatcagctgttattaagatgagcacttttggcagtcatgaaggacagcggcaaccacaaatagagcctgagcaaatcggaaacacagcatcagcacaactgtttggttctgggaaactggcctcccctagtgaagtggtgcagcaagtcgcagagaagcaatatccaccgcatcgtccgagtccttactcatgccaacactcactctctttccctcagcactcattgccacagggggtcatgcacagcaccaagccacatcagagcctcgaaggtcctccgtggcttttccctggccctttgccatccgttgcctctgaggacttatttccttttcctatacatggccacagtggtggttatcctagaaaaaagatttcaagtctgaaccctgcttatagccaatactcccagaaaagtattgaacaggcagaagaggctcacaagaaagagcacaaacccaaaaagcctggcaagtacatttgcccttactgcagcagagcgtgtgccaaacctagtgtactgaaaaaacacatcaggtcccatactggggagcggccatatccatgtataccttgtggtttctctttcaagacaaagagcaatttgtacaagcacaggaagtcacatgcccatgcaattaaggcaggattagtacctttcacagagtcagctgtatctaaattggacctagaggctggttttattgatgtagaagcagaaatacattcagatggtgaacagagtacagacacagatgaggagagttctttatttgccgaggcttctgacaaaatgagtcctggtccacccatcccactggacattgccagcagaggcggctatcatgggtcattggaagaatcattgggaggtccaatgaaggtgccgattttgattatccctaaaagtgggattcctctccctaatgaaagctctcagtatattggccctgatatgctaccaaatccatctttaaatactaaggctgatgattcgcacacagtcaaacagaaacttgcactaagactgtcagagaaaaaaggacaagattctgagccatcgctcaaccttctgagcccgcacagtaaaggaagcactgattctggttacttttctcgctcagaaagtgctgagcagcaaataagccctcccaacacaaatgcaaagtcttatgaagaaatcatctttggaaaatactgtcggcttagtccgagaaatgcactcagtgttacaaccacaagtcaggagcgtgccgcaatgggtaggaagggcataatggaaccattacctcacgttaacaccaggttagatgtcaagatgtttgaagatcctgtttcacagctgatcccaagcaagggagatgtcgaccccagtcaaacgagcatgctgaaatccactaagttcaacagtgagtccagacaaccccagattattccatcatctatcaggaacgaaggaaaactttatccagcaaacttccaaggcagcaacccggttctcttagaagctcctgtagactcttcaccccttattagaagcaactcagtgccaacttcttcagcaactaatctaactattcctccttctttgagaggaagtcactcatttgatgaaaggatgactggttccgacgatgtattctatccagggaccgtgggcataccccctcagcgcatgctaagaagacaagcggcatttgagctgccttcggtacaggagggccacgtggaagtcgagcaccatggcaggatgttgaagggtatcagcagttcatccctgaaggaaaagaaattgtctcctggggacagggttgggtatgactatgatgtctgtcggaaaccctataagaagtgggaggactctgaaacaccaaagcaaaactacagggacatttcctgcttgagttctttaaagcatggtggagaatatttcatggatcccgtggtgccattgcagggagtaccaagcatgtttggaactacctgtgaaaacaggaaacgccggaaagagaagagcgtaggggatgaagaggacacgcccatgatctgcagcagcattgtaagcactcctgtgggcatcatggcttccgattatgaccccaaactgcagatgcaggaaggagtcaggagtggatttgccatggctggacacgaaaacctttctcatggtcacacggaacgctttgacccatgtcggccccaactgcagcctggaagtccatctcttgtgtcagaggagtcaccttcagccattgattcagacaagatgtcagacctagggggcaggaaacctcctggaaatgtgatttctgtgattcagcacaccaactcactgagccgacccaattcatttgaaaggtctgagtcagccgaacttgtggcttgcacacaggataaagccccttccccttcagagacttgtgacagtgagatttcagaagccccagtgagtcctgagtgggctccacctggggatggtgcagaaagtggggggaaaccctctccatctcagcaggtgcagcagcagtcctatcacacacagcccaggctagttcggcaacacaacatccaggttcctgagattcgagtgaccgaggagcctgataaacctgagaaggagaaggaagcccagagcaaagagccagagaagcctgtggaagaatttcagtggccccagagaagtgagaccctttcccagctccccgcggagaagttgccacccaaaaagaagcgtctgcgacttgcagatatggagcactcctcaggggagtccagctttgaatccacaggcacaggcctctcccgcagccccagccaagaaagcaacttgtcccacagctccagtttctccatgtcttttgaaagagaagaaaccagtaagctttctgcacttcctaagcaggatgagtttgggaagcattcagagtttctgactgtccctgctggttcatactcattgtctgtcccaggccatcaccaccagaaagagatgcgacgctgctcatcagagcagatgccttgtcctcacccagcggaagtcccagaagttcggagcaaatcatttgattatgggaatctgtcccatgctcctgtgtcgggagcagcagcctccacggtatcaccgtccagggagaggaagaaatgctttctggtgcggcaagcttccttcagtggctccccagaaatctcccagggcgaggttggcatggatcagagcgtgaagcaagagcagctggagcacctgcatgctggcctccggtccgggtggcaccatggcccgcctgctgtgctgcctcctcttcagcaagaggacccagggaagcaggtggcgggtccttgtcccccgctgagctcggggccactgcacctggcccagccacagatcatgcacatggacagtcaggaatctttgagaaatcccttgatccaaccaacatcctatatgacaagcaagcacttacctgaacagccacacttatttccacatcaagagacaattccattttctccaatccagaatgccttgtttcagtttcagtatcctacagtttgtatggttcatttaccagctcagcagcctccctggtggcaggcacatttcccacatccctttgctcagcaccctcagaagagctatggcaagccctcttttcagacagaaatccattcgagctatcccttagagcatgtggcagagcacactggaaagaaacctgctgagtatgcacacacgaaagagcagacctacccatgttattcaggagcatcagggctacacccaaagaaccttcttccaaagtttccatcagaccagagcagtaagtcaactgaaacgccctctgagcaggttcttcaagaagattttgcctcggcaaatgctgggtctttgcagtccctcccaggaacagtggttcctgttcggatccagacgcacgtaccatcctatggaagtgtcatgtacacaagcatttctcagatacttgggcagaatagccctgccattgtcatatgcaaagtcgatgagaatatgacccaaaggacactggtcaccaacgcagccatgcaagggataggattcaacattgcccaggtgctggggcagcatgcgggcttggagaagtaccccatttggaaagcacctcagactttgcccctcggcttagaatcctccatccccttgtgtttaccttccacctctgacagcgtggccaccctgggaggtagcaagcgaatgctttctccagccagtagcttggagctcttcatggaaaccaagcagcagaaaagggtcaaagaagaaaagatgtacggacagattgtggaggagcttagtgctgtggagctgaccaactcagacatcaaaaaggacctctcccgcccccagaaaccccagctggttcgacaaggatgtgcttctgagccaaaagatggcttgcagtcagggtcatcttccttctcctcgctgtcgccctcctcatctcaagactatccttctgttagcccgtcttccagggagccattcctgcccagcaaggagatgctttccggttcccgggcaccacttccggggcagaagtccagtgggccttctgaaagcaaagaatcttcagatgaattagatatcgatgagacggcatcggacatgagcatgagcccacagagttcttcattaccagcaggagatggtcagctggaagaggaagggaagggccacaagcggcctgttggcatgctggtccgcatggcctctgcccccagcgggaacgtggcagactcaactcttcttctcacggacatggcagatttccagcagattcttcagttccccagtctgcggacaacaactactgtgagttggtgcttcttgaattatacaaaacccaattatgtgcaacaggccaccttcaaatcctcggtttatgcttcatggtgcattagttcctgtaatccaaacccatcaggattgaacaccaagaccacgctggctcttctgaggtccaagcaaaaaatcactgcagaaatttatactctggctgctatgcataggcctggaaccggcaagcttacatcatcaagtgcttggaagcagtttactcagatgaaacctgatgcgtcctttttatttggcagcaaactagaaaggaaactagtgggaaatatcttaaaggaaagagggaaaggagatattcatggagataaagatattggatccaaacaaactgagccaatccgaattaaaatatttgaaggagggtacaaatcgaatgaagattatgtatatgtcagaggacgtggccggggaaagtacatttgtgaagaatgtgggattcgctgtaagaagccaagcatgctcaaaaaacacatccgtacccatactgatgttcggccttatgtatgcaagttatgtaactttgccttcaaaacgaaaggaaacctaacgaagcatatgaaatctaaagcacacatgaaaaaatgcctggaattgggagtctcaatgacatcggtggatgatacagaaactgaggaagcagaaaatttggaagatttgcacaaagcagcagagaagcatagcatgtccagcatttcaactgatcatcagttctccgatgctgaggaatcagatggtgaggatggagatgataatgatgatgatgatgaagatgaagatgactttgacgaccagggagatttaacaccaaaaacaagatcaagaagcaccagtcctcagcctcctagattctcctccttgcctgtgaatgttggcgccgtaccccacggggttccttcagatagttccctgggacattcttcgttgatcagctatttggttactttgccaagtattcgagttactcagcttatgacacccagtgattcatgtgaagatacccagatgacagaataccagaggctattccagagcaaaagtacggactcagaaccagacaaagacagattggacatacctagttgtatggatgaggagtgcatgctaccttcagagccaagctcctctcccagggacttctcaccctcaagccaccattcctctccaggatatgattcttcaccctgtcgagataattcaccaaagaggtatctgatacccaaaggagatttatctcccaggagacatttatcacctaggagagatctgtcacccatgagacatctttcaccaagaaaggaagctgcattgagaagagagatgtcccaaagagatgtttcaccaagaaggcatttgtctccaaggaggccagtgtctcctgggaaagatatcacagcaagaagagacctctctcctagaagagagagaagatacatgaccacaataagagcgccatctcccagaagggctttataccataacccaccattgtccatgggacagtatttgcaagcagagccaattgtattggggcctcctaatttaagaagaggattacctcaggttccttacttcagtctctatggagaccaagaaggtgcttatgaacatccaggctccagccttttccctgagggtcctaatgactatgtcttcagtcatcttccactccactctcagcaacaagtgcgagcccctatccccatggtgcccgttggtgggatccagatggttcactccatgccgccagccctttccagtttacatccttcacccacattgcccctgccaatggagggctttgaggagaagaaaggcgcgtcaggggagtccttctccaaggacccctatgtgctttctaagcagcatgagaagcgaggtcctcacgctttgcagtcatctggtccacctagcactccctcctctcctcggctgttgatgaaacagagcacttcggaagacagcctaaacgcaacagagcgggaacaggaggaaaatatacagacttgtacaaaagccattgcctctctccggattgccacggaagaggcagctctgctcgggccagatcagccagcgcgggtgcaggagccccaccagaaccccctgggaagtgcacatgttagcattagacactttagtagacctgagccaggtcagccctgtacctcagccacccaccctgacttgcatgatggtgaaaaggacaattttggtacatcacagactccattagctcactccacgttttacagcaagagttgtgtggatgacaagcagttggactttcacagcagcaaggaattatcttcaagcacagaggaaagcaaagatccttcatcagaaaagagtcagctacattagtaatgaactagtccgtaacttgaaagtatttcgatttcttggctttatatatcttgtggaaaggacgagagatgctgctcagagttgctccg

SEQ ID NO: 1360 - DNA, 3128 bp, Homo sapiens
  source 1..3128: mol_type = genomic DNA
accgccaccatgtcctggatgttcaagagggatccagtttggaagtacttgcagactgtccagtatggagttcatggaaattttccacgcctctcatatccaactttctttccacgttttgaattccaagatgttatccctccagatgactttctaactagtgatgaagaagtagattccgttttatttggaagtttgagaggtcatgtggttggactacgctattacacgggagtagttaataataatgaaatggttgcattacaacgagatcctaataacccttatgataagaatgcaattaaagtaaacaatgtgaatggaaatcaagttggccatttaaagaaagagcttgcaggtgctttggcctatatcatggacaacaaattggcacaaattgaaggggtagttccttttggtgcaaacaatgcttttaccatgcctctgcatatgactttttggggaaaagaagaaaatagaaaagcggtttcagatcagttgaagaaacatggatttaaattgggtcctgcaccaaaaactttaggattcaatttggaaagtggttggggctctggaagagctggaccaagctatagtatgccagtgcatgctgcagtacagatgacaactgaacagcttaaaacagaatttgacaaattgtttgaagatttaaaagaagatgataaaacccatgaaatggaaccagctgaggctattgaaacaccactgcttccacatcaaaaacaagctctagcttggatggtgtcacgggaaaatagcaaagaacttccaccattctgggaacagcgaaatgacttatactataacacaataacaaatttttctgagaaggaccgaccagaaaatgtccatggaggaattttagctgatgatatgggtttgggtaaaactcttacggccattgcagtaatccttaccaacttccatgatggcagacctcttcctattgaaagagttaaaaagaatctactgaagaaggaatataatgttaacgatgactctatgaaacttggaggaaacaataccagtgaaaaggcagatggactaagcaaagacgcatctagatgtagtgaacaacccagtatttcagatatcaaggagaagagtaagtttcgcatgtcagaattgtctagctcccgccccaaaagaagaaaaactgctgtccagtacatagaaagcagtgattcagaggaaattgaaacaagtgaattgccgcagaaaatgaaaggcaaactgaaaaatgtacagtctgaaactaaaggcagggcgaaaggatcttctaaggttatagaagatgtggcatttgcatgtgcattaacttcatctgttcctacaacaaaaaagaaaatgttgaaaaagggagcttgtgcagtggaggggtcaaagaaaactgatgttgaggagagaccaagaacaacactgatcatctgtccgctttctgtgttaagcaactggattgaccagtttggacaacatataaaatcagatgtacacttgaatttttatgtttattatggtcctgatcgtattagagaaccggccttactttcaaaacaggatattgttttgactacgtataatattttaactcatgactatggaactaaaggagatagtccattacatagcataaggtggctaagagtgatcctggatgaaggacatgccatacgaaatccaaatgctcagcagacaaaagctgtacttgacttagaatcagaaagaagatgggttttgacaggtactccaatccagaattctttaaaggacttgtggtctcttctttcctttttaaaacttaaaccatttattgatagagaatggtggcatagaacaatacagcgtcctgtcacaatgggagatgaaggaggacttaggcgtttacagtccctaattaaaaatattacacttagaagaacaaagacaagcaaaattaaaggaaaacctgttttggagttaccagaacgtaaagtatttattcagcacattacactttcagatgaagagagaaagatttatcagtctgtgaaaaatgaaggcagagccactattggaaggtattttaatgaagggactgtcctggcacattatgcagatgtcctgggtcttttgcttagactgcggcaaatttgttgccatacttaccttcttacaaatgcagtgtcttccaatggcccctcaggaaatgatacacctgaagaactgagaaagaagttaataaggaagatgaagttaattctgagctcaggttcagatgaggaatgtgcaatttgcctggattctttaacagttcctgtgataacacattgtgcacatgtattttgtaaaccctgtatttgccaagtcattcagaatgagcagccacatgctaaatgccctttatgcagaaatgatatacatgaagataatttattagaatgtcctccagaagaattagcacgtgacagtgagaaaaagtctgatatggaatggacatccagttcaaagattaatgcgctaatgcacgcattgactgacttaagaaagaagaatcccaacataaaaagtttggttgtttctcagtttacaacattcctgtctttaatagaaataccacttaaagcctctggatttgtgtttactcgtttggatggttccatggcccaaaagaaaagagttgaatcaattcagtgttttcaaaacactgaagcaggatctccaactataatgcttctgtccttaaaagcaggtggagttggtttgaatctgtctgcagcttctcgagtgtttttaatggatccagcctggaatcctgctgctgaagatcagtgctttgacagatgccatagacttggtcagaagcaagaagttatcatcacaaaattcattgtaaaggactctgttgaagaaaatatgctgaaaatacaaaacaaaaagagagaacttgcagcaggagcctttggaactaaaaaaccaaatgctgacgaaatgaaacaagccaaaattaatgaaatcagaacattaattgacttatagtaatgaactagtccgtaacttgaaagtatttcgatttcttggctttatatatcttgtggaaaggacgacgcaacatgggtcagcatcctcat

SEQ ID NO: 1361 - DNA, 3131 bp, Homo sapiens
  source 1..3131: mol_type = genomic DNA
accgccaccatgtcctggatgttcaagagggatccagtttggaagtacttgcagactgtccagtatggagttcatggaaattttccacgcctctcatatccaactttctttccacgttttgaattccaagatgttatccctccagatgactttctaactagtgatgaagaagtagattccgttttatttggaagtttgagaggtcatgtggttggactacgctattacacgggagtagttaataataatgaaatggttgcattacaacgagatcctaataacccttatgataagaatgcaattaaagtaaacaatgtgaatggaaatcaagttggccatttaaagaaagagcttgcaggtgctttggcctatatcatggacaacaaattggcacaaattgaaggggtagttccttttggtgcaaacaatgcttttaccatgcctctgcatatgactttttggggaaaagaagaaaatagaaaagcggtttcagatcagttgaagaaacatggatttaaattgggtcctgcaccaaaaactttaggattcaatttggaaagtggttggggctctggaagagctggaccaagctatagtatgccagtgcatgctgcagtacagatgacaactgaacagcttaaaacagaatttgacaaattgtttgaagatttaaaagaagatgataaaacccatgaaatggaaccagctgaggctattgaaacaccactgcttccacatcaaaaacaagctctagcttggatggtgtcacgggaaaatagcaaagaacttccaccattctgggaacagcgaaatgacttatactataacacaataacaaatttttctgagaaggaccgaccagaaaatgtccatggaggaattttagctgatgatatgggtttgggtaaaactcttacggccattgcagtaatccttaccaacttccatgatggcagacctcttcctattgaaagagttaaaaagaatctactgaagaaggaatataatgttaacgatgactctatgaaacttggaggaaacaataccagtgaaaaggcagatggactaagcaaagacgcatctagatgtagtgaacaacccagtatttcagatatcaaggagaagagtaagtttcgcatgtcagaattgtctagctcccgccccaaaagaagaaaaactgctgtccagtacatagaaagcagtgattcagaggaaattgaaacaagtgaattgccgcagaaaatgaaaggcaaactgaaaaatgtacagtctgaaactaaaggcagggcgaaagcaggatcttctaaggttatagaagatgtggcatttgcatgtgcattaacttcatctgttcctacaacaaaaaagaaaatgttgaaaaagggagcttgtgcagtggaggggtcaaagaaaactgatgttgaggagagaccaagaacaacactgatcatctgtccgctttctgtgttaagcaactggattgaccagtttggacaacatataaaatcagatgtacacttgaatttttatgtttattatggtcctgatcgtattagagaaccggccttactttcaaaacaggatattgttttgactacgtataatattttaactcatgactatggaactaaaggagatagtccattacatagcataaggtggctaagagtgatcctggatgaaggacatgccatacgaaatccaaatgctcagcagacaaaagctgtacttgacttagaatcagaaagaagatgggttttgacaggtactccaatccagaattctttaaaggacttgtggtctcttctttcctttttaaaacttaaaccatttattgatagagaatggtggcatagaacaatacagcgtcctgtcacaatgggagatgaaggaggacttaggcgtttacagtccctaattaaaaatattacacttagaagaacaaagacaagcaaaattaaaggaaaacctgttttggagttaccagaacgtaaagtatttattcagcacattacactttcagatgaagagagaaagatttatcagtctgtgaaaaatgaaggcagagccactattggaaggtattttaatgaagggactgtcctggcacattatgcagatgtcctgggtcttttgcttagactgcggcaaatttgttgccatacttaccttcttacaaatgcagtgtcttccaatggcccctcaggaaatgatacacctgaagaactgagaaagaagttaataaggaagatgaagttaattctgagctcaggttcagatgaggaatgtgcaatttgcctggattctttaacagttcctgtgataacacattgtgcacatgtattttgtaaaccctgtatttgccaagtcattcagaatgagcagccacatgctaaatgccctttatgcagaaatgatatacatgaagataatttattagaatgtcctccagaagaattagcacgtgacagtgagaaaaagtctgatatggaatggacatccagttcaaagattaatgcgctaatgcacgcattgactgacttaagaaagaagaatcccaacataaaaagtttggttgtttctcagtttacaacattcctgtctttaatagaaataccacttaaagcctctggatttgtgtttactcgtttggatggttccatggcccaaaagaaaagagttgaatcaattcagtgttttcaaaacactgaagcaggatctccaactataatgcttctgtccttaaaagcaggtggagttggtttgaatctgtctgcagcttctcgagtgtttttaatggatccagcctggaatcctgctgctgaagatcagtgctttgacagatgccatagacttggtcagaagcaagaagttatcatcacaaaattcattgtaaaggactctgttgaagaaaatatgctgaaaatacaaaacaaaaagagagaacttgcagcaggagcctttggaactaaaaaaccaaatgctgacgaaatgaaacaagccaaaattaatgaaatcagaacattaattgacttatagtaatgaactagtccgtaacttgaaagtatttcgatttcttggctttatatatcttgtggaaaggacgatatgttctcaccatctcattcaaa

SEQ ID NO: 1362 - DNA, 716 bp, Homo sapiens
  source 1..716: mol_type = genomic DNA
accgccaccatggccgaagacacctattcacacaagatggtaaaaacaaatcataggcgctgtcgcacaaaattcacagaagaacagttgaaaatcctcatcaataccttcaatcaaaagccttacccaggttatgctaccaaacaaaaacttgctttagaaatcaatacagaagagtccagaatccagatttggtttcagaatcgaagagctaggcacggattccagaaaagaccagaagctgagactttagaatcaagccagagccaggggcaagatcaacctggtgtggagtttcaaagtagagaagccagacggtgtcgtaccacctacagcgcctctcagttacacactctcatcaaggcatttatgaaaaacccatatcctgggattgattccagagaagaacttgctaaagaaatcggtgttccagagtcaagagtccaaatttggttccaaaatcgaagatctagattacttctccagagaaaaagggaacctgtggcgtccttagaacaagaagagcagggcaagattcctgagggactgcaaggtgcagaagatacacaaaatggcaccaacttcactagtgactctcatttctctggagccagaacgtggtagtaatgaactagtccgtaacttgaaagtatttcgatttcttggctttatatatcttgtggaaaggacgaaagtctattcatgatatgccacgc

SEQ ID NO: 1363 - DNA, 1319 bp, Homo sapiens
  source 1..1319: mol_type = genomic DNA
accgccaccatggcggctgtggtggagaatgtagtgaagctccttggggagcagtactacaaagatgccatggagcagtgccacaattacaatgctcgcctctgtgctgagcgcagcgtgcgcctgcctttcttggactcacagaccggagtagcccagagcaattgttacatctggatggaaaagcgacaccggggtccaggattggcctccggacagctgtactcctaccctgcccggcgctggcggaaaaagcggcgagcccatccccctgaggatccacgactttccttcccatctattaagccagacacagaccagaccctgaagaaggaggggctgatctctcaggatggcagtagtttagaggctctgttgcgcactgaccccctggagaagcgaggtgccccggatccccgagttgatgatgacagcctgggcgagtttcctgtgaccaacagtcgagcgcgaaagcggatcctagaaccagatgacttcctggatgacctcgatgatgaagactatgaagaagatactcccaagcgtcggggaaaggggaaatccaagggtaagggtgtgggcagtgcccgtaagaagctggatgcttccatcctggaggaccgggataagccctatgcctgtgacaatagtttcaaacaaaagcatacctcgaaagcgccccagagagtttgtggaaaacgttacaagaaccgaccaggcctcagttaccactatgcccactcccacttggctgaggaggagggcgaggacaaggaagactctcaaccacccactcctgtttcccagaggtctgaggagcagaaatccaaaaagggtcctgatggattggccttgcccaacaactactgtgacttctgcctgggggactcaaagattaacaagaagacgggacaacccgaggagctggtgtcctgttctgactgtggccgctcagggcatccatcttgcctccaatttacccccgtgatgatggcggcagtgaagacataccgctggcagtgcatcgagtgcaaatgttgcaatatctgcggcacctccgagaatgacgaccagttgctcttctgtgatgactgcgatcgtggctaccacatgtactgtctcaccccgtccatgtctgagccccctgaaggaagttggagctgccacctgtgtctggacctgttgaaagagaaagcttccatctaccagaaccagaactcctcttagtaatgaactagtccgtaacttgaaagtatttcgatttcttggctttatatatcttgtggaaaggacgaacaaaccgttaaatgtggacgtgg

SEQ ID NO: 1364 - DNA, 1061 bp, Homo sapiens
  source 1..1061: mol_type = genomic DNA
accgccaccatggtaaaagcaatccaggttttgcgcattcatcttcttgagctggaaaaggttaacgaactctgcaaagatttctgcagtcgatacattgcttgtctgaaaacaaaaatgaacagtgaaactctgttgagtggagagcctggaagcccgtactcaccagtgcagtcccagcagattcaaagtgccatcacaggcaccatcagccctcagggaattgtggtgccggcgtccgcgctgcagcagggaaacgtagccatggcgacggtggcaggtggcacagtgtatcagcctgtcacggtcgtcactccccaaggccaagtggtcacacagacattgtcgcctgggacaattaggatccagaactcccagcttcagttacagttaaaccaagatctcagcatcttgcatcaagatgatggttcatctaagaacaagaggggcgtcctgccaaagcatgccacgaacgtgatgcggtcctggctcttccagcacatcgggcatccctacccaacagaggatgagaaaaaacagattgctgctcagacaaatttgacactactccaagtcaacaactggttcatcaatgccagaagacgaattcttcagccaatgttggattcaagttgttcagagacccccaaaacaaagaaaaaaactgctcagaaccggccagttcagaggttttggcctgattctattgcatcaggagtcgcacagccaccgccgagcgagctcaccatgtcggaaggagctgttgtcaccatcaccacgcccgtgaacatgaacgtggacagccttcagtctctgtcctcggacggggccaccctggcggtgcagcaggtcatgatggcagggcagagcgaggacgagtctgtggacagcacagaggaggatgcgggtgccctggcccctgcccacatcagcgggctggtcttggagaacagtgactccctgcagtagtaatgaactagtccgtaacttgaaagtatttcgatttcttggctttatatatcttgtggaaaggacgattccgtcctttcgaattgagtgaa

SEQ ID NO: 1365 - DNA, 1337 bp, Homo sapiens
  source 1..1337: mol_type = genomic DNA
accgccaccatgctcagcctcagggagcaacagctgcaggtgtggttcaagaatcgccgcgccaaactagctcgggagcggcggctccagcagcagccccagcgcgtccctgggcagagaggccgaggagcccgcgctgcgcccctagtccctgcagcctctgcctccgcacctcagcggggcccctcgggaatccttccagcggcggaacccacgatctgcagcctccaccaggcctggggtggccctgggtgcagagcccagaagggcatcccagctgccctgagtccaggccctggcccgatccctgccccaatcccaggcccagcccagatcccaggcccactccctggctcaattccaggcccaattccaggcccagctcagatcccaagcccgatcccagccccaatcccaggcccaatttcaggcccagtccagatcccaggcccattccgtggcccaatcccaggcccaatttcaggcccagccccgatcccaggcccaatctcaggcccattctcaggcccaaacccaggcccgatcccaggcccaaacccaggcccgatcccaggcccaatctcaggcccgatcccaggcccaatctcagtcccgatcccaggcccgatcccaggcccaatctcaggcccaatctcaggcccaaacccaggcccgatcccaggcccaatcccaggcccaatctcaggcccgaacccaggcccgatcccaggcccaatctcaggcccgaacccaggcctgatcccaggcccaatcccaggcccaatctcaggcccaggcccaattataggcccgattcccagcccagcccagatcccaggcccaggcagactccaaggcccaggtcccatcttaagtcctggccggatgcgaagccctggctcacttccaggcctagccccgattttaggcccaggctcaggcccaggctcaggctcagtcccagctccaatcccaggcccaggatcactcccagccccagcccccttatggcctcagagccccgatgcctccgacttcttgccagacacccagttattccctcacttcacagagctgctcctacccctagaccccttggagggatcctcagtctccaccatgacctctcagtaccaagaaggggatgactctatgggcaaaaaacactcagggtctcagccccaagaggagggtggctctgtgaatgaaaatcactcaggccccaggttattactggatttatagtaatgaactagtccgtaacttgaaagtatttcgatttcttggctttatatatcttgtggaaaggacgaatggtggttgtaatgtcgatacat

SEQ ID NO: 1366 - DNA, 1601 bp, Homo sapiens
  source 1..1601: mol_type = genomic DNA
accgccaccatgggaccattgcaatttagagatgtggccatagaattctctctggaggagtggcattgcctggacactgcacagcggaatttatatagggatgtgatgttagagaactacagaaacttggtcttccttggtattgttgtctctaagccagacctggttacctgtctggagcaaggaaaaaaacctttaactatggaaagacatgagatgattgccaaacccccagttatgagttctcattttgcccaagacctttggccagagaacatacaaaattctttccaaatagggatgctgagaagatatgaagaatgcagacatgacaatttacagttaaaaaaaggctgtaaaagcgtgggtgagcataaggtgcacaaaggaggttataatggacttaaccaatgtttgacaactacccagaaagaaatatttcaatgtgataaatatggaaaagtctttcataagttttcaaattcaaacacatataagacaagacatactggaataaatcttttcaaatgtataatatgtggcaaagcttttaaacggtcctcaacccttactacacataagaaaattcatactggagagaaaccttacagatgtgaagaatgtggcaaagcttttaaccaatctgcaaaccttactacacataagagaattcataccggagagaaaccctacagatgtgaagaatgtggcaaagcctttaagcagtcctcaaaccttactacacataagaaaattcatactggagagaaaccctacaaatgtgaagaatgtggcaaagccttcaaccgatccacagaccttactacacataagatagttcatactggagagaaaccctacaaatgtgaagaatgtggcaaagcctttaagcacccctcacacgttaccacacataagaaaattcatactagagggaaaccctacaactgtgaagaatgtggcaaatcctttaagcactgctctaaccttactatacataagagaattcatacaggagagaaaccctacaaatgtgaagaatgtggcaaagcctttcacctatcctcacaccttactacacataagatacttcatactggagagaaaccctacagatgtagagaatgtggcaaagcttttaaccattccacaacccttttttcacatgagaaaattcatactggagagaaaccctacaaatgtgatgaatgtggcaaaacctttacctggccctcaatcctctccaaacataaaagaactcatactggagagaaaccctacaaatgtgaagaatgtggcaaatcctttactgcatcctcaactctaactacacataagagaattcatactggagagaaaccttacaaatgtgaagaatgtggcaaagcttttaactggtcctcagaccttaataaacataagaaaattcatattgaacgaaaaccctacatagtgaagaatgtgacagatcttttaaatgttcctccacttttaattagcataagatagtaatgaactagtccgtaacttgaaagtatttcgatttcttggctttatatatcttgtggaaaggacgattggtgaacctacaatgacaaggg

SEQ ID NO: 1367 - DNA, 1826 bp, Homo sapiens
  source 1..1826: mol_type = genomic DNA
accgccaccatggcagcggctgtgccgaggcgcccaactcagggcactgtgacctttgaagatgtggctgtgaacttttcccaggaggagtggtgtcttcttagtgaggctcagaggtgcttgtaccgtgatgtgatgctagagaacctggctctcatatcctcgctgggttgttggtgtggatcaaaagatgaggaggcaccttgtaagcagagaatttctgtacaaagagagtctcagagcaggactcctagggcaggtgtttctcctaagaaggctcacccctgtgaaatgtgtggcctcatcttggaggatgtttttcactttgctgaccaccaggaaactcatcacaagcagaagctgaacaggagtggagcatgtggaaaaaacttggatgacactgcataccttcatcagcaccagaagcagcatattggagagaaattctacagaaagagtgtcagagaagcatcgtttgtaaagaaacgtaagctcagggtgtcacaggagccatttgtcttccgcgagtttgggaaggacgttctgcccagttcaggattgtgccaagaagaagctgctgtagagaagacagacagtgaaactatgcatggcccaccctttcaggagggaaaaactaattacagttgtggaaaacgcacaaaagccttcagcaccaaacactcagttattccacaccagaaacttttcactagagatggatgttatgtgtgcagtgattgtggaaaatcctttagcagatatgtcagcttcagtaatcatcagcgagatcacactgcaaaaggaccttatgattgtggagagtgtgggaaatcttatagtcgaaagagcagccttattcaacatcagcgagtccacactggacagacagcttatccctgtgaggagtgcgggaaatcttttagtcagaagggcagccttattagccatcagcttgttcacactggagaagggccttatgagtgtagagaatgtgggaaatcttttggtcaaaagggtaacctcattcaacatcagcaaggtcacactggagagagagcttatcactgtggggaatgtgggaaatcttttcgtcagaagttctgctttattaaccatcagcgtgttcacactggagaaaggccttacaagtgtggagaatgtgggaaatcttttggtcaaaagggcaacctcgttcaccatcagcgaggtcatactggagaaaggccctatgagtgcaaggaatgtgggaaatcatttaggtacagatcccacctcactgaacaccagagacttcacactggggaaagaccttacaattgtagggaatgtgggaaattatttaacaggaagtatcatcttctggttcatgagagagttcacactggagaaaggccatatgcgtgtgaggtatgtgggaaattatttggcaataagcacagcgtgactatacatcagaggattcacactggagaaaggccgtatgaatgcagtgaatgtgggaaatcatttctttccagctctgcgcttcatgttcataaaagagttcattctggacaaaagccttataagtgcagtgaatgtggaaaatccttttctgaatgttccagtctcattaaacacaggagaattcacactggagaaaggccttatgaatgcaccaaatgtggaaaaacatttcagcgaagctctaccctccttcatcatcagagttcacacaggagaaaggccttatagtaatgaactagtccgtaacttgaaagtatttcgatttcttggctttatatatcttgtggaaaggacgacgtgaagagggcgagaaccaagcc

SEQ ID NO: 1368 - DNA, 1829 bp, Homo sapiens
  source 1..1829: mol_type = genomic DNA
accgccaccatggcagcggctgtgccgaggcgcccaactcagcagggcactgtgacctttgaagatgtggctgtgaacttttcccaggaggagtggtgtcttcttagtgaggctcagaggtgcttgtaccgtgatgtgatgctagagaacctggctctcatatcctcgctgggttgttggtgtggatcaaaagatgaggaggcaccttgtaagcagagaatttctgtacaaagagagtctcagagcaggactcctagggcaggtgtttctcctaagaaggctcacccctgtgaaatgtgtggcctcatcttggaggatgtttttcactttgctgaccaccaggaaactcatcacaagcagaagctgaacaggagtggagcatgtggaaaaaacttggatgacactgcataccttcatcagcaccagaagcagcatattggagagaaattctacagaaagagtgtcagagaagcatcgtttgtaaagaaacgtaagctcagggtgtcacaggagccatttgtcttccgcgagtttgggaaggacgttctgcccagttcaggattgtgccaagaagaagctgctgtagagaagacagacagtgaaactatgcatggcccaccctttcaggagggaaaaactaattacagttgtggaaaacgcacaaaagccttcagcaccaaacactcagttattccacaccagaaacttttcactagagatggatgttatgtgtgcagtgattgtggaaaatcctttagcagatatgtcagcttcagtaatcatcagcgagatcacactgcaaaaggaccttatgattgtggagagtgtgggaaatcttatagtcgaaagagcagccttattcaacatcagcgagtccacactggacagacagcttatccctgtgaggagtgcgggaaatcttttagtcagaagggcagccttattagccatcagcttgttcacactggagaagggccttatgagtgtagagaatgtgggaaatcttttggtcaaaagggtaacctcattcaacatcagcaaggtcacactggagagagagcttatcactgtggggaatgtgggaaatcttttcgtcagaagttctgctttattaaccatcagcgtgttcacactggagaaaggccttacaagtgtggagaatgtgggaaatcttttggtcaaaagggcaacctcgttcaccatcagcgaggtcatactggagaaaggccctatgagtgcaaggaatgtgggaaatcatttaggtacagatcccacctcactgaacaccagagacttcacactggggaaagaccttacaattgtagggaatgtgggaaattatttaacaggaagtatcatcttctggttcatgagagagttcacactggagaaaggccatatgcgtgtgaggtatgtgggaaattatttggcaataagcacagcgtgactatacatcagaggattcacactggagaaaggccgtatgaatgcagtgaatgtgggaaatcatttctttccagctctgcgcttcatgttcataaaagagttcattctggacaaaagccttataagtgcagtgaatgtggaaaatccttttctgaatgttccagtctcattaaacacaggagaattcacactggagaaaggccttatgaatgcaccaaatgtggaaaaacatttcagcgaagctctaccctccttcatcatcagagttcacacaggagaaaggccttatagtaatgaactagtccgtaacttgaaagtatttcgatttcttggctttatatatcttgtggaaaggacgatatgcaagtatatccgtcctcatg

SEQ ID NO: 1369 - DNA, 1826 bp, Homo sapiens
  source 1..1826: mol_type = genomic DNA
accgccaccatgtgtcctcattttgctcaagacctttggccagagcagggcatggaagattcttttcaaaaagcaatactgagaagatatggaaaatatggacatgagaatttacagttaagaaaaggctgtaaaagtgtggatgagtataaggtgaacaaagaaggttataatggacttaaccagtgtttcacaactgcccagagcaaagtatttcaatgtgataaatatttgaaagtcttctataaatttttaaattcaaacagacctaagataagacatactgaaaagaaatctttcaaatgtaaaaaacgtgtcaaattattttgcatgctttcacataaaacccaacacaaaagcatttatcatagagagaagtcctacaaatgtaaagaatgtggaaaaacctttaattggtcctcaacccttactaatcataggaaaatttatactgaagagaaaccttacaaatgtgaagaatataacaaatctcctaagcaactctcaacccttactacacatgaaataattcatgctggagagaaactctacaaatgtgaagaatgtggtgaagcttttaatcgatcctcaaatcttactacacataagataattcatactggagagaaaccttacaagtgtgaagaatgtggcaaagcatttatctggtcctcaacccttactgagcataagaaaattcatactagaaagaaaccctacaagtgtgaagaatgtggcaaagcatttatatggtcctcaacactaactagacataagaggatgcacactggagagaaaccctacaaatgtgaagaatgtggcaaagcttttagccagtcctcaacccttactacacataagataattcatactggagagaaacgctacaaatgcttagaatgtggcaaagcttttaagcaactctcaactcttactacacataaaataattcatgttggagagaaactctacaaatgtgaagaatgcggcaaaggttttaatcgatcttcaaatcttactacacataagataattcatactggagagaaaccttacaagtgtgaagaatgtggcaaagcatttatctggtcctcaacccttactaaacataagagaattcatactagagagaaaccctacaaatgtgaagaatgtggcaaggcatttatatggtcctcaaccctaactagacataagaggatgcacactggagagaaaccctacaaatgtgaagaatgtggcaaatcttttagccaatcctcaacccttactacacataagataattcatactggagagaaaccctacaaatgtgaagaatgtggcaaagcctttaactggtcctcaactcttactaaacataagataattcatactgaagagaaaccctacaaatgtgaaaaatgtggcaaagcctttaagcagtcttcaatccttactaaccataagagaattcatactggagagaaaccctataaatgtgaagaatgtggcaaatcttttaaccggtcttcaacttttactaaacataaggtaattcatactggagtaaaaccctacaaatgtgaagaatgtggcaaagcatttttctggtcctcaaccctaactaaacataagagaattcatactggagagcaaccctacaaatgggaaaaatttggcaaagcctttaatcggtcctcgcacctcaccacagataagataactcattggagagaaatcttacaagtatagtaatgaactagtccgtaacttgaaagtatttcgatttcttggctttatatatcttgtggaaaggacgaaataagggagccggatatgtcgag

SEQ ID NO: 1370 - DNA, 1862 bp, Homo sapiens
  source 1..1862: mol_type = genomic DNA
accgccaccatgaagcgacatgagatggtggatgaacccccaggtatgtgtcctcattttgctcaagacctttggccagagcagggcatggaagattcttttcaaaaagcaatactgagaagatatggaaaatatggacatgagaatttacagttaagaaaaggctgtaaaagtgtggatgagtataaggtgaacaaagaaggttataatggacttaaccagtgtttcacaactgcccagagcaaagtatttcaatgtgataaatatttgaaagtcttctataaatttttaaattcaaacagacctaagataagacatactgaaaagaaatctttcaaatgtaaaaaacgtgtcaaattattttgcatgctttcacataaaacccaacacaaaagcatttatcatagagagaagtcctacaaatgtaaagaatgtggaaaaacctttaattggtcctcaacccttactaatcataggaaaatttatactgaagagaaaccttacaaatgtgaagaatataacaaatctcctaagcaactctcaacccttactacacatgaaataattcatgctggagagaaactctacaaatgtgaagaatgtggtgaagcttttaatcgatcctcaaatcttactacacataagataattcatactggagagaaaccttacaagtgtgaagaatgtggcaaagcatttatctggtcctcaacccttactgagcataagaaaattcatactagaaagaaaccctacaagtgtgaagaatgtggcaaagcatttatatggtcctcaacactaactagacataagaggatgcacactggagagaaaccctacaaatgtgaagaatgtggcaaagcttttagccagtcctcaacccttactacacataagataattcatactggagagaaacgctacaaatgcttagaatgtggcaaagcttttaagcaactctcaactcttactacacataaaataattcatgttggagagaaactctacaaatgtgaagaatgcggcaaaggttttaatcgatcttcaaatcttactacacataagataattcatactggagagaaaccttacaagtgtgaagaatgtggcaaagcatttatctggtcctcaacccttactaaacataagagaattcatactagagagaaaccctacaaatgtgaagaatgtggcaaggcatttatatggtcctcaaccctaactagacataagaggatgcacactggagagaaaccctacaaatgtgaagaatgtggcaaatcttttagccaatcctcaacccttactacacataagataattcatactggagagaaaccctacaaatgtgaagaatgtggcaaagcctttaactggtcctcaactcttactaaacataagataattcatactgaagagaaaccctacaaatgtgaaaaatgtggcaaagcctttaagcagtcttcaatccttactaaccataagagaattcatactggagagaaaccctataaatgtgaagaatgtggcaaatcttttaaccggtcttcaacttttactaaacataaggtaattcatactggagtaaaaccctacaaatgtgaagaatgtggcaaagcatttttctggtcctcaaccctaactaaacataagagaattcatactggagagcaaccctacaaatgggaaaaatttggcaaagcctttaatcggtcctcgcacctcaccacagataagataactcattggagagaaatcttacaagtatagtaatgaactagtccgtaacttgaaagtatttcgatttcttggctttatatatcttgtggaaaggacgactgtttcctgatatatgtaccaag

SEQ ID NO: 1371 - DNA, 1958 bp, Homo sapiens
  source 1..1958: mol_type = genomic DNA
accgccaccatgttagagaactacagaaacctggccttcctgggtattgctgtctctaagccagacctgatcacctgtctggaacaagggaaagagccctggaatatgaagcgacatgagatggtggatgaacccccaggtatgtgtcctcattttgctcaagacctttggccagagcagggcatggaagattcttttcaaaaagcaatactgagaagatatggaaaatatggacatgagaatttacagttaagaaaaggctgtaaaagtgtggatgagtataaggtgaacaaagaaggttataatggacttaaccagtgtttcacaactgcccagagcaaagtatttcaatgtgataaatatttgaaagtcttctataaatttttaaattcaaacagacctaagataagacatactgaaaagaaatctttcaaatgtaaaaaacgtgtcaaattattttgcatgctttcacataaaacccaacacaaaagcatttatcatagagagaagtcctacaaatgtaaagaatgtggaaaaacctttaattggtcctcaacccttactaatcataggaaaatttatactgaagagaaaccttacaaatgtgaagaatataacaaatctcctaagcaactctcaacccttactacacatgaaataattcatgctggagagaaactctacaaatgtgaagaatgtggtgaagcttttaatcgatcctcaaatcttactacacataagataattcatactggagagaaaccttacaagtgtgaagaatgtggcaaagcatttatctggtcctcaacccttactgagcataagaaaattcatactagaaagaaaccctacaagtgtgaagaatgtggcaaagcatttatatggtcctcaacactaactagacataagaggatgcacactggagagaaaccctacaaatgtgaagaatgtggcaaagcttttagccagtcctcaacccttactacacataagataattcatactggagagaaacgctacaaatgcttagaatgtggcaaagcttttaagcaactctcaactcttactacacataaaataattcatgttggagagaaactctacaaatgtgaagaatgcggcaaaggttttaatcgatcttcaaatcttactacacataagataattcatactggagagaaaccttacaagtgtgaagaatgtggcaaagcatttatctggtcctcaacccttactaaacataagagaattcatactagagagaaaccctacaaatgtgaagaatgtggcaaggcatttatatggtcctcaaccctaactagacataagaggatgcacactggagagaaaccctacaaatgtgaagaatgtggcaaatcttttagccaatcctcaacccttactacacataagataattcatactggagagaaaccctacaaatgtgaagaatgtggcaaagcctttaactggtcctcaactcttactaaacataagataattcatactgaagagaaaccctacaaatgtgaaaaatgtggcaaagcctttaagcagtcttcaatccttactaaccataagagaattcatactggagagaaaccctataaatgtgaagaatgtggcaaatcttttaaccggtcttcaacttttactaaacataaggtaattcatactggagtaaaaccctacaaatgtgaagaatgtggcaaagcatttttctggtcctcaaccctaactaaacataagagaattcatactggagagcaaccctacaaatgggaaaaatttggcaaagcctttaatcggtcctcgcacctcaccacagataagataactcattggagagaaatcttacaagtatagtaatgaactagtccgtaacttgaaagtatttcgatttcttggctttatatatcttgtggaaaggacgacaaaggagctgtctaactcgggac

SEQ ID NO: 1372 - DNA, 1952 bp, Homo sapiens
  source 1..1952: mol_type = genomic DNA
accgccaccatgtcgaggcgcaagcaggcgaaaccccagcacatcaactcggaggaggaccagggcgagcagcagccgcagcagcagaccccggagtttgcagatgcggccccagcggcgcccgcggcgggggagctgggtgctccagtgaaccacccagggaatgacgaggtggcgagtgaggatgaagccacagtaaagcggcttcgtcgggaggagacgcacgtctgtgagaaatgctgtgcggagttcttcagcatctctgagttcctggaacataagaaaaattgcactaaaaatccacctgtcctcatcatgaatgacagcgaggggcctgtgccttcagaagacttctccggagctgtactgagccaccagcccaccagtcccggcagtaaggactgtcacagggagaatggcggcagctcagaggacatgaaggagaagccggatgcggagtctgtggtgtacctaaagacagagacagccctgccacccaccccccaggacataagctatttagccaaaggcaaagtggccaacactaatgtgaccttgcaggcactacggggcaccaaggtggcggtgaatcagcggagcgcggatgcactccctgcccccgtgcctggtgccaacagcatcccgtgggtcctcgagcagatcttgtgtctgcagcagcagcagctacagcagatccagctcaccgagcagatccgcatccaggtgaacatgtgggcctcccacgccctccactcaagcggggcaggggccgacactctgaagaccttgggcagccacatgtctcagcaggtttctgcagctgtggctttgctcagccagaaagctggaagccaaggtctgtctctggatgccttgaaacaagccaagctacctcacgccaacatcccttctgccaccagctccctgtccccagggctggcacccttcactctgaagccggatgggacccgggtgctcccgaacgtcatgtcccgcctcccgagcgctttgcttcctcaggccccgggctcggtgctcttccagagccctttctccactgtggcgctagacacatccaagaaagggaaggggaagccaccgaacatctccgcggtggatgtcaaacccaaagacgaggcggccctctacaagcacaagtgtcggagcagtctcccttccacgtttatccgagccccgccgacctatgtcaaggttgaagttcctggcacatttgtgggaccctcgacattgtccccagggatgacccctttgttagcagcccagccacgccgacaggccaagcaacatggctgcacacggtgtgggaagaacttctcgtctgctagcgctcttcagatccacgagcggactcacactggagagaagccttttgtgtgcaacatttgtgggcgagcttttaccaccaaaggcaacttaaaggttcactacatgacacacggggcgaacaataactcagcccgccgtggaaggaagttggccatcgagaacaccatggctctgttaggtacggacggaaaaagagtctcagaaatctttcccaaggaaatcctggccccttcagtgaatgtggaccctgttgtgtggaaccagtacaccagcatgctcaatggcggtctggccgtgaagaccaatgagatctctgtgatccagagtgggggggttcctaccctcccggtttccttgggggccacctccgttgtgaataacgccactgtctccaagatggatggctcccagtcgggtatcagtgcagatgtggaaaaaccaagtgctactgacggcgttcccaaacaccagtttcctcacttcctggaagaaaacaagattgcggtcagctagtaatgaactagtccgtaacttgaaagtatttcgatttcttggctttatatatcttgtggaaaggacgacgcctcacttattccgggtaaaga

SEQ ID NO: 1373 - DNA, 3785 bp, Homo sapiens
  source 1..3785: mol_type = genomic DNA
accgccaccatgaatgacacagttaacaaaacagatcaagtggactgcagcgacctttcagaacacaacggacttgacagggaagagtccatggaggtggaggccccggttgctaacaaaagcggcagcggcacttccagcggcagccacagcagtaccgccccaagcagcagcagcagcagcagcagcagcagcggcggcggcggcagctcctccacaggtacctcagcgatcacaacctctctacctcaactcggggacctgacaacactgggcaacttctccgtaatcaacagcaacgtcatcatcgagaacctccagagcaccaaggtggcggtggcccagttctcccaggaagcgaggtgcggcggggcctctgggggcaagctggccgtcccagccctcatggaacaactcctagctctgcagcagcagcagatccaccagctgcaattgatcgaacagattcgtcaccaaatattgctgttggcttctcagaatgcagacttgccaacatcttctagtccttctcaaggtactttacgaacatctgccaaccccttgtccacgctaagttcccatttatctcagcagctggcagcagcagctggattggcacagagcctcgccagccaatctgccagcattagtggtgtgaaacagctacccccaatccagctacctcagagcagttctggcaacaccatcattccatccaacagcggctcttctcccaatatgaacatattggcagcggcagttaccaccccgtcctctgaaaaagtggcttcaagtgctggggcctcccatgtcagcaacccagcggtctcatcatcgtcctcaccagcttttgcaataagcagtttattaagtcctgcgtctaatccacttctacctcagcaagcctccgctaactcggttttccccagccctttgcccaacatcggaacaactgcagaggatttaaactccttgtctgccttggcccagcaaagaaaaagcaagccaccaaatgtcactgcctttgaagcgaaaagtacttccgatgaggcattcttcaaacacaagtgcaggttctgcgcgaaggtctttgggagtgacagtgccttgcagatccacttgcgttcccataccggagagaggccattcaagtgcaacatctgcgggaacaggttctccaccaaggggaatctgaaagtccactttcagcgccacaaagagaaataccctcatatccagatgaacccctatcctgtgcctgagcatttggacaatatccccacgagtactggcatcccatatggcatgtccatccctccagagaagccagtcaccagctggctagacaccaaaccagtcctgcctactctgaccacttcagtcggcctgccgttgcccccaaccctcccaagcctcatacccttcatcaagacggaagagccagcccccatccccatcagccattctgccaccagccccccaggctcagtcaaaagtgactccgggggccctgagtcagccacaagaaacctaggtgggctcccagaggaagccgaagggtccactctgccaccctctggtggcaaaagcgaagagagtggcatggtcaccaactcagtcccgacggcgagcagtagcgtcctgagctccccagcggcagactgcggccccgcgggcagtgccaccaccttcaccaaccctttgttgccgctcatgtccgagcagttcaaggccaagtttccttttgggggactcctggactcagctcaggcatcagagacgtccaagcttcagcaactggtagaaaacattgacaagaaggccactgaccccaatgagtgcatcatctgccaccgggttctcagctgccagagcgccttgaaaatgcactacaggacacacactggggagaggccctttaagtgtaagatctgtggccgggctttcaccacgaaagggaatcttaaaacccactacagtgtccatcgtgctatgcccccgctcagagtccagcattcctgccccatctgccagaagaagttcacgaacgctgtggtcctgcagcagcacatccgaatgcatatgggaggccagatccccaacaccccagtccccgacagctactctgagtccatggagtctgacacaggttcctttgatgagaaaaattttgatgacctagacaacttctctgatgaaaacatggaagactgtcctgagggcagcatccctgatacacctaagtctgcagacgcctcccaagacagcttatcctcttcgcctttgcccctcgagatgtcgagcatcgctgctttggaaaatcagatgaagatgatcaatgctggcctggcagagcagctacaggccagcctgaagtcagtggagaatgggtccatcgagggggatgtcctgaccaatgattcatcctcagtgggtggtgacatggaaagccaaagtgctggcagcccagccatctcagagtctacctcttccatgcaggctctgtccccgtccaacagcacgcaggagttccacaagtcacccagcattgaggagaaaccacagagagcggtcccaagcgagtttgccaatggtttgtctcccaccccagtgaatggtggggctttggatttgacatctagtcacgcagagaaaatcatcaaagaagattctttggggatcctcttcccttttagagaccggggtaaatttaaaaacactgcttgtgacatttgtggcaaaacatttgcttgtcagagtgccttggacattcactatagaagtcataccaaagagagaccatttatttgcacagtttgcaatcgtggcttttccacaaagggtaatttgaagcagcacatgttgacacatcagatgcgagatctgccatcccagctctttgagcccagttccaaccttggccccaatcagaactcagcggtgattcccgccaactcgttgtcatctctcatcaagacagaggtcaacggcttcgtgcatgtttctcctcaggacagtaaggacacccccaccagtcacgtcccgtctgggcctctgtcttcctctgccacatccccagttctgctccctgctctgcccaggagaactcccaagcagcactactgcaacacatgtggcaaaaccttctcctcatcgagtgccctgcagattcacgagagaactcacactggagagaaaccctttgcttgcactatttgtggaagagctttcacgactaaaggcaatcttaaggtacacatgggcactcacatgtggaatagcacccctgcacgacggggtcggcggctctctgtggatggccccatgacatttctaggaggcaatcccgtcaagttcccagaaatgttccagaaggatttggcggcaagatcaggaagtggggatccttccagcttctggaatcagtatgcagcagcgctctccaacgggctggcgatgaaggccaacgagatctccgtcattcagaacggtggcatccctccaattcctggaagcctcggcagtgggaacagctcacctgttagtgggctgacgggaaacctggagaggctccagaactcagagcccaatgctcccctggccggcctggagaaaatggcaagcagtgagaacggaaccaacttccgcttcacccgcttcgtggaggacagcaaggagatcgtcacgagttagtaatgaactagtccgtaacttgaaagtatttcgatttcttggctttatatatcttgtggaaaggacgagcttctgcattgatcgtccagcca

SEQ ID NO: 1374 - DNA, 4076 bp, Homo sapiens
  source 1..4076: mol_type = genomic DNA
accgccaccatgtcgcggaggaagcaagcgaagcctcaacatttccaatccgaccccgaagtggcctcgctcccccggcgagatggagacacagaaaagggtcaaccgagtcgccctactaagagcaaggatgcccacgtctgtggccggtgctgtgccgagttctttgaattatcagatcttctgctccacaagaagaactgtactaaaaatcaattagttttaatcgtaaatgaaaatccagcctccccacccgaaaccttctcccccagcccccctcctgataatcctgatgaacaaatgaatgacacagttaacaaaacagatcaagtggactgcagcgacctttcagaacacaacggacttgacagggaagagtccatggaggtggaggccccggttgctaacaaaagcggcagcggcacttccagcggcagccacagcagtaccgccccaagcagcagcagcagcagcagcagcagcagcggcggcggcggcagctcctccacaggtacctcagcgatcacaacctctctacctcaactcggggacctgacaacactgggcaacttctccgtaatcaacagcaacgtcatcatcgagaacctccagagcaccaaggtggcggtggcccagttctcccaggaagcgaggtgcggcggggcctctgggggcaagctggccgtcccagccctcatggaacaactcctagctctgcagcagcagcagatccaccagctgcaattgatcgaacagattcgtcaccaaatattgctgttggcttctcagaatgcagacttgccaacatcttctagtccttctcaaggtactttacgaacatctgccaaccccttgtccacgctaagttcccatttatctcagcagctggcagcagcagctggattggcacagagcctcgccagccaatctgccagcattagtggtgtgaaacagctacccccaatccagctacctcagagcagttctggcaacaccatcattccatccaacagcggctcttctcccaatatgaacatattggcagcggcagttaccaccccgtcctctgaaaaagtggcttcaagtgctggggcctcccatgtcagcaacccagcggtctcatcatcgtcctcaccagcttttgcaataagcagtttattaagtcctgcgtctaatccacttctacctcagcaagcctccgctaactcggttttccccagccctttgcccaacatcggaacaactgcagaggatttaaactccttgtctgccttggcccagcaaagaaaaagcaagccaccaaatgtcactgcctttgaagcgaaaagtacttccgatgaggcattcttcaaacacaagtgcaggttctgcgcgaaggtctttgggagtgacagtgccttgcagatccacttgcgttcccataccggagagaggccattcaagtgcaacatctgcgggaacaggttctccaccaaggggaatctgaaagtccactttcagcgccacaaagagaaataccctcatatccagatgaacccctatcctgtgcctgagcatttggacaatatccccacgagtactggcatcccatatggcatgtccatccctccagagaagccagtcaccagctggctagacaccaaaccagtcctgcctactctgaccacttcagtcggcctgccgttgcccccaaccctcccaagcctcatacccttcatcaagacggaagagccagcccccatccccatcagccattctgccaccagccccccaggctcagtcaaaagtgactccgggggccctgagtcagccacaagaaacctaggtgggctcccagaggaagccgaagggtccactctgccaccctctggtggcaaaagcgaagagagtggcatggtcaccaactcagtcccgacggcgagcagtagcgtcctgagctccccagcggcagactgcggccccgcgggcagtgccaccaccttcaccaaccctttgttgccgctcatgtccgagcagttcaaggccaagtttccttttgggggactcctggactcagctcaggcatcagagacgtccaagcttcagcaactggtagaaaacattgacaagaaggccactgaccccaatgagtgcatcatctgccaccgggttctcagctgccagagcgccttgaaaatgcactacaggacacacactggggagaggccctttaagtgtaagatctgtggccgggctttcaccacgaaagggaatcttaaaacccactacagtgtccatcgtgctatgcccccgctcagagtccagcattcctgccccatctgccagaagaagttcacgaacgctgtggtcctgcagcagcacatccgaatgcatatgggaggccagatccccaacaccccagtccccgacagctactctgagtccatggagtctgacacaggttcctttgatgagaaaaattttgatgacctagacaacttctctgatgaaaacatggaagactgtcctgagggcagcatccctgatacacctaagtctgcagacgcctcccaagacagcttatcctcttcgcctttgcccctcgagatgtcgagcatcgctgctttggaaaatcagatgaagatgatcaatgctggcctggcagagcagctacaggccagcctgaagtcagtggagaatgggtccatcgagggggatgtcctgaccaatgattcatcctcagtgggtggtgacatggaaagccaaagtgctggcagcccagccatctcagagtctacctcttccatgcaggctctgtccccgtccaacagcacgcaggagttccacaagtcacccagcattgaggagaaaccacagagagcggtcccaagcgagtttgccaatggtttgtctcccaccccagtgaatggtggggctttggatttgacatctagtcacgcagagaaaatcatcaaagaagattctttggggatcctcttcccttttagagaccggggtaaatttaaaaacactgcttgtgacatttgtggcaaaacatttgcttgtcagagtgccttggacattcactatagaagtcataccaaagagagaccatttatttgcacagtttgcaatcgtggcttttccacaaagggtaatttgaagcagcacatgttgacacatcagatgcgagatctgccatcccagctctttgagcccagttccaaccttggccccaatcagaactcagcggtgattcccgccaactcgttgtcatctctcatcaagacagaggtcaacggcttcgtgcatgtttctcctcaggacagtaaggacacccccaccagtcacgtcccgtctgggcctctgtcttcctctgccacatccccagttctgctccctgctctgcccaggagaactcccaagcagcactactgcaacacatgtggcaaaaccttctcctcatcgagtgccctgcagattcacgagagaactcacactggagagaaaccctttgcttgcactatttgtggaagagctttcacgactaaaggcaatcttaaggtacacatgggcactcacatgtggaatagcacccctgcacgacggggtcggcggctctctgtggatggccccatgacatttctaggaggcaatcccgtcaagttcccagaaatgttccagaaggatttggcggcaagatcaggaagtggggatccttccagcttctggaatcagtatgcagcagcgctctccaacgggctggcgatgaaggccaacgagatctccgtcattcagaacggtggcatccctccaattcctggaagcctcggcagtgggaacagctcacctgttagtgggctgacgggaaacctggagaggctccagaactcagagcccaatgctcccctggccggcctggagaaaatggcaagcagtgagaacggaaccaacttccgcttcacccgcttcgtggaggacagcaaggagatcgtcacgagttagtaatgaactagtccgtaacttgaaagtatttcgatttcttggctttatatatcttgtggaaaggacgaaagagtcccggaggcgtgcccgat

SEQ ID NO: 1375 - DNA, 1793 bp, Homo sapiens
  source 1..1793: mol_type = genomic DNA
accgccaccatgggaccactgacaattagggatgtgactgtagaattctctctggaggagtggcattgcctggacactgcacagcagaatttatatagggatgtgatgttagagaactacagaaacctggtcttcctgggtattgctgtctctaagccagacctgatcacctgtctggagcaaggaaaagagccctgtaatatgaagagacatgagatggtagccaaacccccagttatgtgttctcatattgctgaagacctttgcccagagcgagacataaaatattttttccaaaaagtcatactgaggagatatgataaatgtgaacatgagaatttacaattaagaaagggctgtaaaagtgtggatgagtgtaaggtgtgcaaaggaggttataatggacttaaccaatgtctgataactacccagagcaaaatgtatcaatgtgataaatatgtaaaagtcttctataagttttcaaattcagatagacataagataagacatactgaaaagaaaacttgcaaatgtaaagaatgtggcaaatcattttgcatgctttcacaactaactcgacataagagaattcatattagagagaattcccacaaatgtgaagaatgtggcaaagcctttaaccagtcctcagctcttactcgacataagatgactcatactggagagaaaccctacaaatgtgaagagtgtggaaaagcttttaaccggtcttcacaccttactcaacataaggtaattcatactagagagaaaccctacaaatgtgaagagtgtggcaaagcctttaaccggtcttcacacattactcaacataagagaattcataatagagagaagcccttcaaatatgatgaatgttgcaaagcctttaagtggtcctcagctcttactacccttactcaacataagagaattcatactggagagaaaccctacaaatgtgaagagtgtggcaaagcctttaaccagtcctcagcccttactcgacataagatgattcatactggagagaaacccttccaatgtgaagagtgtggcaaagcttttaaccggtcttcacaccttactcaacataagataattcatactaaagagaaaccctacaaatgtgaagagtgtggaaaagcctttaaccggtcttcacaccttactaaacataagagaattcatactagagagaaggcctacaaatgtgatgaatattgcaaagcttttaactggtcctcagctcttactacccttactcagcataagataattcatactggagagaaaccctacaaatgtgaagagtgtggcaaagcctttaaccggtcttcataccttattcgacataagataattcatactggagagaaaccctacaaatgtgaagagtgtggcaaagcctttaaccagtcttcacaccttactcaacataaaataattcatactggggagaagccctacaaatgtgaagaatgtggcaaagcctttaaccggtcttcacacctttctcaacataagataattcatactggagagaaaccctacaaatgtgaagaatgtggcaagccttttaatcgtttctcataccttaccgtacataagagaattcatgctggagagaaccccaacaaatatgaagaatgtggcaaagcttgtaaccattcctcaaaccttactaaacataattcatagtaatgaactagtccgtaacttgaaagtatttcgatttcttggctttatatatcttgtggaaaggacgaggtcgatcgtcgcccatgcatcaa

SEQ ID NO: 1376 - DNA, 4004 bp, Homo sapiens
  source 1..4004: mol_type = genomic DNA
accgccaccatgtctcggcgcaagcaggccaagccccagcacctcaagtcggacgaggagctgctgccgcctgacggggctcccgagcacgccgccccgggggaaggtgcggaggacgcagacagcgggcccgagagccgcagcgggggcgaggagaccagcgtgtgcgagaaatgctgcgccgagttcttcaagtgggcggacttcctggagcaccagcggagctgcaccaagctcccgcccgtgctgatcgtgcacgaggacgcgcccgcgccgccccccgaggacttccccgagccttcgcccgccagctcccccagcgagcgcgccgaaagcgaggcggccgaggaggcgggtgcggagggcgcggagggcgaggccaggccggtggagaaggaggccgagcccatggacgcggaacccgcgggggacacgcgcgcgccccggcccccgcctgcggcccctgcacccccaacgcccgcctacggcgcgcccagcaccaacgtgaccctggaggcgctgctgagcaccaaggtggcggtggcgcagttctcgcagggcgcgcgcgcggcaggcggctcgggagcaggtggaggcgtggcagctgcagccgtgcccctgatcctggaacagctcatggccctgcagcagcagcagatccaccagctgcagctcatcgagcagatccgcagccaggtggccctcatgcagcgcccgccgccgcggccctcactcagccccgcggccgccccgagcgcaccgggcccggcccccagccagctgcccgggctggccgcgctcccgctgtcggccggggcccctgccgccgccatcgcgggctcgggccccgccgccccggccgccttcgagggcgcgcagccgctgtcccggcccgagtctggcgccagcacccccggcggccctgcggagcccagcgcgcccgccgcccccagcgccgcccctgcccccgctgcccccgccccggcgccagcgccgcagagcgcagcctcgtcgcagccgcagagcgcatccacgccgcctgccctggccccggggtccctgctgggtgcggcgcccggcctgccaagtccgcttctacctcagacttccgccagcggcgtcatcttccccaacccgctggtcagcatcgcggccacggccaacgctctggacccgctgtccgcgctcatgaagcaccgcaagggcaagccgcccaatgtgtcggtgttcgagcccaaagccagcgccgaggacccgttcttcaagcacaaatgccgcttctgcgccaaggtcttcggcagcgacagcgcgctccagatccacctgcgctcgcacacaggcgagcggcccttcaagtgcaacatctgcgggaaccgcttctccaccaaaggcaacctgaaggtgcacttccagaggcacaaggagaagtacccccacatccagatgaacccttacccggtccccgagtacctggacaacgtgcccacctgctcgggcatcccctacggcatgtcgctgccccccgagaagcccgtgaccacctggctggacagcaagcccgtgctgcccaccgtgcccacgtccgtggggctgcaactgccgcccactgtccctggcgcgcacggctacgccgactctcccagcgccaccccagccagccgctccccgcagaggccctcgcccgcctccagcgagtgcgcctccttgtccccaggcctcaaccacgtggagtccggcgtgtcggccaccgccgagtccccacagtcgctcctcggcgggccgcccctcactaaagccgagcccgtcagcctgccctgcaccaacgccagggccggggacgctcccgtgggcgcgcaggctagcgctgcacccacatcggtggacggcgcacccacgagcctcggcagccccgggctgcccgccgtctccgagcagttcaaggcccagtttccgttcggggggctgctagactcgatgcaaacgtcggaaacctcgaagctgcagcagctggtggagaacatcgacaagaagatgacggacccgaaccagtgcgtcatctgccaccgggtgctgagctgccagagcgcgctgaagatgcactaccggacgcacacgggggagcggccgttcaagtgcaagatctgcggccgcgccttcaccaccaagggcaacctcaagacgcacttcggcgtgcaccgtgcaaagccgcccctgcgcgtgcagcactcctgccccatctgccagaagaagttcaccaacgccgtggtcctgcagcagcacatccgcatgcacatgggcggccagatccccaacacgccgctgccggagggcttccaggatgccatggactccgagctggcctacgacgacaagaacgcggagaccctgagcagctacgatgacgacatggacgagaactccatggaggacgacgctgagctgaaggacgcggccaccgacccggccaagccactcctgtcctacgcggggtcctgcccgccctccccgccctcggtcatctccagcattgccgccctggagaaccagatgaagatgatcgactcggtcatgagctgccagcagctgaccggcctcaagtccgtggagaacgggtccggggagagtgaccgcctgagcaacgactcctcgtcggccgtgggcgacctggagagccgcagcgcgggcagccccgccctgtccgagtcctcgtcctcgcaggccctgtcgccggcccccagcaatggtgagagcttccgctccaagtccccgggcctgggcgccccggaggagccccaggaaatcccgctcaagaccgagaggccggacagcccagccgccgccccgggcagcggaggcgcccctggccgcgcgggcatcaaggaggaggcgcccttcagcctgctgttcctgagcagggagcggggtaagtgtcccagcactgtgtgtggtgtctgtggcaagccttttgcttgcaagagcgcgttggaaatccactaccgcagccatactaaggagcggccattcgtctgcgcgctctgcaggcgagggtgctccactatgggtaatttaaaacagcacttactgacacacagattgaaagagctgccttctcagttatttgaccccaactttgctctaggtcccagccaaagcactcctagcctgatctccagcgccgcacccaccatgatcaaaatggaagtgaacggtcacggcaaggccatggcgctgggcgagggtcccccgctgcccgcgggcgtccaggtccccgccgggcctcagacagtgatgggcccgggcctggcgcccatgctggcccccccaccgcgccggacgcccaagcagcacaactgccagtcgtgcgggaagaccttctcctcggccagcgccctgcagatccatgagcgcacgcacaccggcgagaagccgttcggctgcaccatctgcggccgggccttcaccactaagggcaacctcaaggtgcacatggggacacacatgtggaataacgcccccgcgagacgcggccgccgcctgtctgtggagaaccccatggctctcctagggggtgatgccctgaagttctctgaaatgttccagaaggacctggcagctcgggcaatgaacgtcgaccccagtttttggaaccagtatgctgcagccatcactaacgggctcgccatgaagaacaacgagatctccgtcatccagaacggcggcatcccccagctccccgtgagtcttgggggcagcgccctcccccctctgggcagcatggccagtgggatggacaaagcacgcactggcagtagcccacccatcgtcagcttggacaaagcgagctcagaaacagcagccagccgcccattcacgcggtttatcgaggataacaaggagattggtatcaactagtaatgaactagtccgtaacttgaaagtatttcgatttcttggctttatatatcttgtggaaaggacgagttcttaaacgccatctggttcta

SEQ ID NO: 1377 - DNA, 3125 bp, Homo sapiens
  source 1..3125: mol_type = genomic DNA
accgccaccatgtctcggcgaaagcagcggaaaccccaacagttaatctcggactgcgaaggtcccagcgcgtctgagaacggtgatgctagcgaggaggatcacccccaagtctgtgccaagtgctgcgcacaattcactgacccaactgaattcctcgcccaccagaacgcatgttctactgaccctcctgtaatggtgataattgggggccaggagaaccccaacaactcttcggcctcctctgaaccccggcctgagggtcacaataatcctcaggtcatggacacagagcatagcaaccccccagattctgggtcctccgtgcccacggatcccacctggggcccagagaggagaggagaggagtcttcagggcatttcctggtcgctgccacaggtacagcggctgggggaggcgggggcctgatcttggccagtcccaagctgggagcaaccccattacctccagaatcgacccctgcaccccctcctcctccaccaccccctccgcccccaggggtaggcagtggccacttgaatatccccctgatcttggaagagctacgggtgctgcagcagcggcagatccatcagatgcagatgactgagcaaatctgcaggcaggtgctgttgcttggctccttaggccagacggtgggtgcccctgccagtccctcagagctacctgggacagggactgcctcttccaccaagcccctactacccctcttcagccccatcaagcctgtccaaaccagcaagacactggcatcttcctcctcctcctcctcttcctcttcaggggcagaaacgcccaagcaggccttcttccacctttaccacccactggggtcacagcatcctttctctgctggaggggttgggcgaagccacaaacccacccctgccccttccccagccttgccaggcagcacagatcagctgattgcctcgcctcatctggcattcccaagcaccacgggactactggcagcacagtgtcttggggcagcccgaggccttgaggccactgcctccccagggctcctgaagccaaagaatggaagtggtgagctgagctacggagaagtgatgggtcccttggagaagcctggtggaaggcacaaatgccgcttctgtgccaaagtatttggcagtgacagtgccctgcagatccaccttcgttcccacacgggtgagaggccctataagtgcaatgtctgtggaaaccgttttaccacccgtggcaacctcaaagtgcatttccaccggcatcgtgagaagtacccacatgtgcagatgaacccacacccagtaccagagcacctagactatgtcattaccagcagtggcttgccttatggtatgtccgtgccaccagagaaggccgaggaggaggcagccactccaggtggaggggttgagcgcaagcctctggtggcctccacaacagcactcagtgccacagagagcctgactctgctctccaccagtgcaggcacagccacggctccaggactccctgctttcaataagtttgtgctcatgaaagcagtggaacccaagaataaagctgatgaaaacacccccccagggagtgagggctcagccatcagtggagtggcagaaagtagcacggcaactcgcatgcaactaagtaagttggtgacttcactaccaagctgggcactgcttaccaaccacttcaagtccactggcagcttccccttcccctatgtgctagagcccttgggggcctcaccctctgagacatcaaagctgcagcaactggtagaaaagattgaccggcaaggagctgtggcggtgacctcagctgcctcaggagcccccaccacctctgcccctgcaccttcatcctcagcctcttctggacctaaccagtgtgtcatctgtctccgagtgcttagctgtcctcgggccctacgccttcattatggccaacatggaggtgagaggcccttcaaatgcaaagtgtgtggcagagccttctccaccaggggtaatctgcgtgcacatttcgtgggccacaaggccagtccagctgcccgggcacagaattcctgccccatctgccagaagaagttcaccaatgctgtcactctgcagcagcatgtccggatgcacctggggggccagatccccaacggtggtactgcactccctgaaggtggaggagctgctcaggagaatggctccgagcaatctacagtctccggggcacggagtttcccccagcagcagtcccagcagccatcaccggaagaggagttgtctgaggaggaggaagaggaggatgaggaagaagaggaagatgtgactgatgaagattccctggcagggagaggctcagagagtggaggtgagaaggcaatatcagtgagaggtgattcagaagaggcatctggggcagaggaggaggtggggacagtggcggcagcagccacagctgggaaggagatggacagtaatgagaaaactactcaacagtcttctttgccaccaccaccaccacctgacagcctggatcagcctcagccaatggagcagggaagcagtggtgttttaggaggcaaggaagaggggggcaaaccggagagaagctcaagtccggcatcagcactcaccccagaaggggaagccaccagcgtgaccttggtagaggagctgagcctgcaggaggcaatgagaaaggagccaggagagagcagcagcagaaaggcctgcgaagtgtgtggccaggcctttccctcccaggcagctctggaggagcatcagaagacccaccccaaggaggggccgctcttcacttgtgttttctgcaggcagggctttcttgagcgggctaccctcaagaagcatatgctcctggcacaccaccaggtacagccctttgccccccatggccctcagaatattgctgctctttctctagtccctggctgttcgccttccatcacctccacagggctctccccctttccccgaaaagatgaccccacgatcccatagtaatgaactagtccgtaacttgaaagtatttcgatttcttggctttatatatcttgtggaaaggacgagacaccggaatgactcgcacgtta

SEQ ID NO: 1378 - DNA, 2822 bp, Homo sapiens
  source 1..2822: mol_type = genomic DNA
accgccaccatggcgcacgaatccgagaggagctctcgtctcggggtgccctgcggggagccggcagagctcggaggtgatgctagcgaggaggatcacccccaagtctgtgccaagtgctgcgcacaattcactgacccaactgaattcctcgcccaccagaacgcatgttctactgaccctcctgtaatggtgataattgggggccaggagaaccccaacaactcttcggcctcctctgaaccccggcctgagggtcacaataatcctcaggtcatggacacagagcatagcaaccccccagattctgggtcctccgtgcccacggatcccacctggggcccagagaggagaggagaggagtcttcagggcatttcctggtcgctgccacaggggcagaaacgcccaagcaggccttcttccacctttaccacccactggggtcacagcatcctttctctgctggaggggttgggcgaagccacaaacccacccctgccccttccccagccttgccaggcagcacagatcagctgattgcctcgcctcatctggcattcccaagcaccacgggactactggcagcacagtgtcttggggcagcccgaggccttgaggccactgcctccccagggctcctgaagccaaagaatggaagtggtgagctgagctacggagaagtgatgggtcccttggagaagcctggtggaaggcacaaatgccgcttctgtgccaaagtatttggcagtgacagtgccctgcagatccaccttcgttcccacacgggtgagaggccctataagtgcaatgtctgtggaaaccgttttaccacccgtggcaacctcaaagtgcatttccaccggcatcgtgagaagtacccacatgtgcagatgaacccacacccagtaccagagcacctagactatgtcattaccagcagtggcttgccttatggtatgtccgtgccaccagagaaggccgaggaggaggcagccactccaggtggaggggttgagcgcaagcctctggtggcctccacaacagcactcagtgccacagagagcctgactctgctctccaccagtgcaggcacagccacggctccaggactccctgctttcaataagtttgtgctcatgaaagcagtggaacccaagaataaagctgatgaaaacacccccccagggagtgagggctcagccatcagtggagtggcagaaagtagcacggcaactcgcatgcaactaagtaagttggtgacttcactaccaagctgggcactgcttaccaaccacttcaagtccactggcagcttccccttcccctatgtgctagagcccttgggggcctcaccctctgagacatcaaagctgcagcaactggtagaaaagattgaccggcaaggagctgtggcggtgacctcagctgcctcaggagcccccaccacctctgcccctgcaccttcatcctcagcctcttctggacctaaccagtgtgtcatctgtctccgagtgcttagctgtcctcgggccctacgccttcattatggccaacatggaggtgagaggcccttcaaatgcaaagtgtgtggcagagccttctccaccaggggtaatctgcgtgcacatttcgtgggccacaaggccagtccagctgcccgggcacagaattcctgccccatctgccagaagaagttcaccaatgctgtcactctgcagcagcatgtccggatgcacctggggggccagatccccaacggtggtactgcactccctgaaggtggaggagctgctcaggagaatggctccgagcaatctacagtctccggggcacggagtttcccccagcagcagtcccagcagccatcaccggaagaggagttgtctgaggaggaggaagaggaggatgaggaagaagaggaagatgtgactgatgaagattccctggcagggagaggctcagagagtggaggtgagaaggcaatatcagtgagaggtgattcagaagaggcatctggggcagaggaggaggtggggacagtggcggcagcagccacagctgggaaggagatggacagtaatgagaaaactactcaacagtcttctttgccaccaccaccaccacctgacagcctggatcagcctcagccaatggagcagggaagcagtggtgttttaggaggcaaggaagaggggggcaaaccggagagaagctcaagtccggcatcagcactcaccccagaaggggaagccaccagcgtgaccttggtagaggagctgagcctgcaggaggcaatgagaaaggagccaggagagagcagcagcagaaaggcctgcgaagtgtgtggccaggcctttccctcccaggcagctctggaggagcatcagaagacccaccccaaggaggggccgctcttcacttgtgttttctgcaggcagggctttcttgagcgggctaccctcaagaagcatatgctcctggcacaccaccagaaccagtatgtggcattcctgtcaaatggcctgcccatgaagccctggaattccagctccacctccactaccactccaagcctggccccaccagtgctgtttggcctaggaactgtggctgggaaggtgcctccaacaatgggatccagggaagccaaggagaagacagcccccctcctatttcagcctcctgcacccaaggcagtgcctgagaagcccatcatagacaagaagtagtaatgaactagtccgtaacttgaaagtatttcgatttcttggctttatatatcttgtggaaaggacgattatgctgaacaataatgtctgcc

SEQ ID NO: 1379 - DNA, 1694 bp, Homo sapiens
  source 1..1694: mol_type = genomic DNA
accgccaccatggcgactcccgacgtgagtgtgcacatggaggaggtggtggttgtgacaactccggacactgcagtggacggcagtggtgtggagggggtgaagaccgtgttggtgacgaccaacttggcccctcacgggggcgacctgacggaagataacatggagacagaaaatgcagcggcagcagctgccgcggccttcacagcctcctcccagctcaaggaagccgtgttagtgaagatggctgaagagggggagaacctggaagctgagattgtgtaccccatcacctgtggagacagcagagccaacctcatctggaggaagtttgtgtgtcccggcatcaatgtgaaatgtgttcagtacgacgagcatgtaatcagcccaaaggaatttgtgcacctggccgggaagtccaccctgaaggactggaagagagccatccgcatgaacggcatcatgctcaggaagatcatggactccggggaactggacttctaccagcatgacaaggtctgctccaacacctgccgcagcacaaagattgacctctcaggagcccgtgtgtccctgagcagccccacgtcggccgagtacattcccctcacgcccgccgcagccgacgtgaatgggtctcctgcgaccatcaccatagagacctgtgaagaccctggcgactggaccgcggccattggagatgacacatttaccttctggcgggggctgaaggacgccggcctgctggacgaggtcatccaggagttccaccaggagctggtggagaccatgagaggcctgcagcagcgggtccaggaccctcccctgcagcttcgagatgctgtacttctcaacaacatcgtgcagaacttcggcatgctggacctggtgaagaaggtgctggccagccacaagtgccagatggaccgctcgcgggagcagtacgcccgggacctggcagccctggagcagcagtgtgatgagcatcgtcgccgagccaaggagctgaagcacaagtcccagcacctcagcaacgtgctcatgacgctgacgccggtctccctgccaccgcctgtgaagcggccccggcttgcacgtgccacatcaggaccggccgccatggcctcgcaggtgctcacccagtctgcccagctggcgcttggcccgggcgtgcccgtcccccagctgaccagcgtgccccttggtaaagtggtgtccaccctgccgtccaccgtcctgggcaagggttcccttcaggcgccccccgccagctccccggcctccccgctgctcgggggatacacagtcttggcctcttccggctccacctaccccagcacagtggagatccacccggacgcgtccagcctcacggtcctgagcacggccgccgtgcaggacggtagcacggtgttcaaggtggtcagcccgctacagctgctcacgttgcctggcctgggccccaccctgcagaacgtggcccaggcctcgcctggctccagcacaattgtgacagtgcccgcaggggctgcccccgggcctgaggagcacacggccaccattgaggtggctgccatggcagaggaccacgagcggaagtagtaatgaactagtccgtaacttgaaagtatttcgatttcttggctttatatatcttgtggaaaggacgagctatcgattgagttcgggaggcc

SEQ ID NO: 1380 - DNA, 1823 bp, Homo sapiens
  source 1..1823: mol_type = genomic DNA
accgccaccatggctaatgcagaagtgagtgtcccagtgggggatgtggttgtggtacctactgaaggaaatgaaggggagaatcctgaagacactaaaacccaagtgattttgcagttacagcctgtgcaacaaggtttgtttatcgatggacacttttacaacaggatttatgaagctgggtcggagaacaacacggcagttgtagcagtagaaactcacacgatacacaaaattgaagaagggattgatacaggcactatagaagcaaatgaggatatggaaattgcttaccccataacttgtggggagagcaaagccatcctcctctggaagaagtttgtatgtccaggaataaacgtgaagtgtgtcaagttcaatgatcagttgatcagccccaagcactttgttcatctggctggcaagtccactctgaaggactggaagagagctattcgtctgggtgggatcatgctcaggaaaatgatggactccggacagattgatttttaccaacatgacaaagtttgctccaatacctgcagaagcaccaaatttgatcttctgatcagcagtgcaagagctccagtgccaggacagcagacaagtgtggtgcagacacccacttcggctgatggtagcatcacgcagattgccatctcagaagagagcatggaagaggcagggctggaatggaactcagctctcaccgctgctgtcaccatggccacggaggagggtgtaaagaaagactcagaggaaatttcagaggacactttgatgttctggaaaggaatagctgatgtagggctgatggaagaggttgtctgcaatatacagaaggaaatagaggagctactcaggggagttcagcagcggctcatccaggctcccttccaagtcacagatgctgctgttctcaacaatgtagcacacacatttggcctaatggacacagtcaagaaggttttagacaacagaaggaaccaagtagagcagggagaagaacagtttctctatactctgacagacttggaacgccagttggaggagcagaagaagcaaggccaggatcacaggctgaaatctcagacagttcaaaatgtggtactgatgcctgtgagcactcctaagcctccaaaaaggccccggctccagcggccagcctccaccactgtcttgagcccttctcctcctgtccagcagcctcagttcacagtcatctcacccatcaccatcaccccagtgggtcagtcattttccatgggcaatattccagtggccaccctcagccagggctccagtcctgtgactgtccacacactgccttctggccctcagctcttccgctatgccacagtggtctcctctgccaagagcagctcaccagacacagtgaccatccacccttcatctagcttggcgctgctgagctctactgccatgcaggatgggagtacactgggcaacatgaccaccatggttagccctgtggaattggtggccatggagtccggcctaacctcggcaattcaggctgttgaaagcacctcagaggatgggcagaccatcattgagattgatccagccccggacccagaagctgaagatactgagggcaaagcagtcatcttggagacagagctgaggactgaggagaaagttgtggctgagatggaagaacaccagcatcaagttcacaatgtggagattgtggtcttagaggattagtaatgaactagtccgtaacttgaaagtatttcgatttcttggctttatatatcttgtggaaaggacgacttagtcatgagctgttgcttgta

SEQ ID NO: 1381 - DNA, 1664 bp, Homo sapiens
  source 1..1664: mol_type = genomic DNA
accgccaccatggcaggtgggggcagcgacctgagcaccaggctgttcacggaagaccaggatgtagatgagggacttgtctatgacactgtattcaagcacttcaaaagacataagctggagatatcaaatgcaataaaaaagacatttccattccttgagggcctccgcgatcgggaactcatcacaaataaaatgtttgaagattctgaagattcttgtagaaacctggtccctgtacaaagagtggtgtacaatgttctcagtgaactggagaagacatttaacctgtcagttttggaagcactgttcagcgaggtcaacatgcaggaataccccgatttaattcacatttataaaagcttcaaaaatgcaatccaagacaaattgtctttccaagaaagtgatcgaaaagaaagggaagagaggcctgacatcaaactaagtcttaaacaaggagaagtgccagaaagcccggaagcaaggaaggaaagtgaccaagcatgtggcaaaatggatactgtggatattgcaaacaactctactttgggaaaacccaagaggaaaagaagaaaaaagaaggggcatggctggagcagaatgggaacgagaacgcagaaaaacaaccaacaaaatgataacagcaaagccgatggccagctggtctcgagtgaaaagaaggcgaacatgaatctgaaagacctttccaagattagggggagaaagagaggcaaacctggaacccactttactcagagtgacagagctccacagaaaagagtccgatcaagaggaaccttggcaaagtgtatacagactgaggatggaaaatggttcacccccatggaatttgaaatcaaaggaggctacgcaagatcaaagaactggaggctgagtgtgcgctgtggcgggtggcccctacgacggctgatggaggaaggatctctacctaatcctccaagaatatattacaggaacaaaaagagaatactgaagtctcaaaacaatagctcagttgacccttgtatgagaaacttggatgagtgtgaggtgtgccgggacggaggggagctgttctgttgcgacacttgttcaagagtcttccatgaggactgccacatcccacctgtggaaagtgagaagaccccgtggaattgcatcttctgcaggatgaaggagtctccgggaagccaacagtgttgtcaggaatctgaggtcctggagaggcagatgtgtcctgaggaacagttgaaatgtgagttcctcctcttgaaagtctattgctgttctgagagctccttttttgccaagattccatactattattatattagagaggcgtgtcaaggcctgaaggagcccatgtggttggataaaatcaagaaaaggctgaatgagcacggttacccccaagtggaggggtttgtacaagacatgcgcctcatcttccagaaccacagggcctcttacaagtataaggattttggccaaatgggacttagactggaggctgaatttgagaaggatttcaaggaagtgtttgctattcaggaaacaaatgggaacagttagtaatgaactagtccgtaacttgaaagtatttcgatttcttggctttatatatcttgtggaaaggacgattctagacacggatgacctgaaca

SEQ ID NO: 1382 - DNA, 1844 bp, Homo sapiens
  source 1..1844: mol_type = genomic DNA
accgccaccatggcaggtgggggcagcgacctgagcaccagggggctgaacggaggtgtttcacaagtagcaaatgagatgaaccatcttcctgcacacagccaaagtctgcaaaggctgttcacggaagaccaggatgtagatgagggacttgtctatgacactgtattcaagcacttcaaaagacataagctggagatatcaaatgcaataaaaaagacatttccattccttgagggcctccgcgatcgggaactcatcacaaataaaatgtttgaagattctgaagattcttgtagaaacctggtccctgtacaaagagtggtgtacaatgttctcagtgaactggagaagacatttaacctgtcagttttggaagcactgttcagcgaggtcaacatgcaggaataccccgatttaattcacatttataaaagcttcaaaaatgcaatccaagacaaattgtctttccaagaaagtgatcgaaaagaaagggaagagaggcctgacatcaaactaagtcttaaacaaggagaagtgccagaaagcccggaagcaaggaaggaaagtgaccaagcatgtggcaaaatggatactgtggatattgcaaacaactctactttgggaaaacccaagaggaaaagaagaaaaaagaaggggcatggctggagcagaatgggaacgagaacgcagaaaaacaaccaacaaaatgataacagcaaagccgatggccagctggtctcgagtgaaaagaaggcgaacatgaatctgaaagacctttccaagattagggggagaaagagaggcaaacctggaacccactttactcagagtgacagagctccacagaaaagagtccgatcaagagcttcaagaaagcacaaagatgaaactgtggattttcaggctcctttacttccagtgacctgtggtggggtgaagggaattttacataaggagaaattggaacaaggaaccttggcaaagtgtatacagactgaggatggaaaatggttcacccccatggaatttgaaatcaaaggaggctacgcaagatcaaagaactggaggctgagtgtgcgctgtggcgggtggcccctacgacggctgatggaggaaggatctctacctaatcctccaagaatatattacaggaacaaaaagagaatactgaagtctcaaaacaatagctcagttgacccttgtatgagaaacttggatgagtgtgaggtgtgccgggacggaggggagctgttctgttgcgacacttgttcaagagtcttccatgaggactgccacatcccacctgtggaaagtgagaagaccccgtggaattgcatcttctgcaggatgaaggagtctccgggaagccaacagtgttgtcaggaatctgaggtcctggagaggcagatgtgtcctgaggaacagttgaaatgtgagttcctcctcttgaaagtctattgctgttctgagagctccttttttgccaagattccatactattattatattagagaggcgtgtcaaggcctgaaggagcccatgtggttggataaaatcaagaaaaggctgaatgagcacggttacccccaagtggaggggtttgtacaagacatgcgcctcatcttccagaaccacagggcctcttacaagtataaggattttggccaaatgggacttagactggaggctgaatttgagaaggatttcaaggaagtgtttgctattcaggaaacaaatgggaacagttagtaatgaactagtccgtaacttgaaagtatttcgatttcttggctttatatatcttgtggaaaggacgagagtgtgggccgcctggtgcgctg

SEQ ID NO: 1383 - DNA, 1769 bp, Homo sapiens
  source 1..1769: mol_type = genomic DNA
accgccaccatggcaggtgggggcagcgacctgagcaccaggctgttcacggaagaccaggatgtagatgagggacttgtctatgacactgtattcaagcacttcaaaagacataagctggagatatcaaatgcaataaaaaagacatttccattccttgagggcctccgcgatcgggaactcatcacaaataaaatgtttgaagattctgaagattcttgtagaaacctggtccctgtacaaagagtggtgtacaatgttctcagtgaactggagaagacatttaacctgtcagttttggaagcactgttcagcgaggtcaacatgcaggaataccccgatttaattcacatttataaaagcttcaaaaatgcaatccaagacaaattgtctttccaagaaagtgatcgaaaagaaagggaagagaggcctgacatcaaactaagtcttaaacaaggagaagtgccagaaagcccggaagcaaggaaggaaagtgaccaagcatgtggcaaaatggatactgtggatattgcaaacaactctactttgggaaaacccaagaggaaaagaagaaaaaagaaggggcatggctggagcagaatgggaacgagaacgcagaaaaacaaccaacaaaatgataacagcaaagccgatggccagctggtctcgagtgaaaagaaggcgaacatgaatctgaaagacctttccaagattagggggagaaagagaggcaaacctggaacccactttactcagagtgacagagctccacagaaaagagtccgatcaagagcttcaagaaagcacaaagatgaaactgtggattttcaggctcctttacttccagtgacctgtggtggggtgaagggaattttacataaggagaaattggaacaaggaaccttggcaaagtgtatacagactgaggatggaaaatggttcacccccatggaatttgaaatcaaaggaggctacgcaagatcaaagaactggaggctgagtgtgcgctgtggcgggtggcccctacgacggctgatggaggaaggatctctacctaatcctccaagaatatattacaggaacaaaaagagaatactgaagtctcaaaacaatagctcagttgacccttgtatgagaaacttggatgagtgtgaggtgtgccgggacggaggggagctgttctgttgcgacacttgttcaagagtcttccatgaggactgccacatcccacctgtggaaagtgagaagaccccgtggaattgcatcttctgcaggatgaaggagtctccgggaagccaacagtgttgtcaggaatctgaggtcctggagaggcagatgtgtcctgaggaacagttgaaatgtgagttcctcctcttgaaagtctattgctgttctgagagctccttttttgccaagattccatactattattatattagagaggcgtgtcaaggcctgaaggagcccatgtggttggataaaatcaagaaaaggctgaatgagcacggttacccccaagtggaggggtttgtacaagacatgcgcctcatcttccagaaccacagggcctcttacaagtataaggattttggccaaatgggacttagactggaggctgaatttgagaaggatttcaaggaagtgtttgctattcaggaaacaaatgggaacagttagtaatgaactagtccgtaacttgaaagtatttcgatttcttggctttatatatcttgtggaaaggacgaccttcaagactttaagtggcgtcg

SEQ ID NO: 1384 - DNA, 1985 bp, Homo sapiens
  source 1..1985: mol_type = genomic DNA
accgccaccatgaacgcgagcagcgagggcgagagcttcgcgggctcggtgcaaattccaggtggcacaacggtgctggtggagctgactcccgacatccatatctgcggcatctgcaagcagcagtttaacaacctggatgcctttgtagctcacaagcaaagtggctgccagctgacaggcacatccgcagcagcccccagcacggtccagtttgtatcggaggaaacagtgcctgccacccagactcagaccaccaccagaaccatcacctcggagacccagacaatcacaggttgccaattcaagactgcttatggcatgaaggacatggagcggcatttaaaaattcacacgggagacaaaccccataagtgtgaagtctgtggcaagtgctttagccggaaagacaagctgaaaactcacatgcggtgccacacgggcgtgaagccctacaagtgtaagacgtgtgactacgccgctgccgacagcagcagcctcaacaagcacctgaggatccactcggacgagcggcccttcaaatgccagatctgcccctacgccagccgcaactccagccagctcactgtccacctgcgatcccacacgggggacgcccccttccagtgctggctctgtagcgccaagttcaaaatcagctcggacttgaaaaggcacatgcgggtgcactcgggggagaagcctttcaagtgcgagttctgcaatgtccgctgcaccatgaaggggaacctcaagtcgcacatccgtatcaagcacagcgggaataacttcaagtgtcctcattgcgacttcctgggtgacagcaaagccaccctccggaagcacagccgcgtgcaccagtcggagcatcctgagaagtgctcggaatgcagctactcctgctccagcaaggccgccctgcgcatccacgagcgtatccactgcaccgaccgccctttcaagtgcaactactgcagcttcgacaccaaacagcccagcaacctgagcaagcacatgaagaagttccatggggacatggttaagactgaggctctagagaggaaggacaccggcaggcagagcagccggcaggtggccaagctggatgccaagaagagtttccactgcgatatatgcgatgcctccttcatgcgggaggactcgctccgcagccacaagagacagcacagtgagtacagtgagagtaagaactcggacgtgaccgttctccagtttcagatcgaccccagcaagcagcccgccacgcccctcactgtgggacacctccaggtgcccctccagcccagccaagtgccccagttcagcgagggaagagtcaaaatcatcgttgggcatcaggtgccccaggcgaacaccatcgtccaggctgccgccgctgcagtgaacatcgtcccgcctgccttggtggcccagaacccagaggaactcccagggaacagccggctgcagatcctgcgccaggtcagtctgatcgccccccctcagtcctcgcggtgtccgagcgaggcgggcgcaatgacccagccggctgtcctgctgaccacccacgagcagacggacggagccactctgcaccagactctcatccccacggcctcaggtggcccccaggaaggctctggcaatcaaactttcattaccagttcgggtattacttgcactgactttgaaggcctaaacgccttgattcaggaggggacagcagaagtgacagtggtgagcgatggaggccagaacatcgcagtggccaccacagcgccaccggtcttctcctcctcttcccagcaagaactacccaagcagacctactccatcattcaaggggcagcccatccagctttgctctgtcccgccgactccattccagattagtaatgaactagtccgtaacttgaaagtatttcgatttcttggctttatatatcttgtggaaaggacgatccgtaatctgcggtgacttcttg

SEQ ID NO: 1385 - DNA, 1382 bp, Homo sapiens
  source 1..1382: mol_type = genomic DNA
accgccaccatgtcgcggcgcaagcaggccaagccccagcacctcaactccgaggagccgcggcctgcgcgccgggagtgtgcggaggtggccccgcaggtggcgggggagccggcttcagaacttgatgatgatgttccaaaagcaaactgcctctccactgaaagcactgacactccgaaggcccctgtcatcactcttccctcagaggcaagggaacaaatggccacccttggagagaggacgttcaactgttgctacccaggttgccacttcaaaactgtccatggcatgaaagacttggaccgccatctcagaatccacacgggagacaaaccgcacaagtgtgagttctgtgacaagtgcttcagccggaaggacaacctgaccatgcacatgcggtgccacaccagtgtgaagccacacaagtgtcacctgtgtgactacgctgccgtggacagcagtagcctcaagaagcacctgcggatccactctgatgagcggccgtacaaatgccagctctgcccctatgccagccgcaactccagccagctcaccgtccacctgcgatctcacacgggggatacccccttccagtgctggctctgtagcgccaagttcaaaatcagctcggacttgaaaaggcacatgatcgtgcactcgggggagaagcctttcaagtgcgagttctgcgacgtccgctgcaccatgaaggcgaatctcaaatcgcacatccgcatcaagcacaccttcaaatgtctgcactgtgccttccagggccgggaccgggctgacctcctggagcacagccggctgcaccaggccgaccacccggagaagtgtccagagtgcagctactcctgctccagcgcggccgccctgcgcgtgcacagcagagtccactgtaaggaccgtcccttcaagtgtgacttctgcagcttcgacacgaagcggcccagcagcctggccaagcacgtcgacaaggtgcacagggacgaggccaagacggagaaccgggcccctctgggcaaggaagggctcagagagggcagctcccagcacgtggccaagatcgtgacgcagagggccttccgctgtgagacctgcggcgcctccttcgtcagggatgactctctgagatgccacaagaagcagcacagtgatcagagtgagaacaagaactcagacttggtcaccttcccaccggaaagcggtgcctcgggacagctcagcaccctggtctccgtggggcagctcgaggctcccctagagcccagccaagacctctagtaatgaactagtccgtaacttgaaagtatttcgatttcttggctttatatatcttgtggaaaggacgataatcatcgtgcagacaacgcttg

SEQ ID NO: 1386 - DNA, 2039 bp, Homo sapiens
  source 1..2039: mol_type = genomic DNA
accgccaccatgaacgcgagcagcgagggcgagagcttcgcgggctcggtgcaaattccaggtggcacaacggtgctggtggagctgactcccgacatccatatctgcggcatctgcaagcagcagtttaacaacctggatgcctttgtagctcacaagcaaagtggctgccagctgacaggcacatccgcagcagcccccagcacggtccagtttgtatcggaggaaacagtgcctgccacccagactcagaccaccaccagaaccatcacctcggagacccagacaatcacagtttcagctccagaatttgtttttgaacatggctatcaaacttacctgcccacggaaagtaatgaaaaccagacagccactgtcatctctctccctgccaagtcacgcaccaaaaagcccacaacaccacctgctcagaaaaggcttaactgttgctatccaggttgccaattcaagactgcttatggcatgaaggacatggagcggcatttaaaaattcacacgggagacaaaccccataagtgtgaagtctgtggcaagtgctttagccggaaagacaagctgaaaactcacatgcggtgccacacgggcgtgaagccctacaagtgtaagacgtgtgactacgccgctgccgacagcagcagcctcaacaagcacctgaggatccactcggacgagcggcccttcaaatgccagatctgcccctacgccagccgcaactccagccagctcactgtccacctgcgatcccacacggcttcagaacttgatgatgatgttccaaaagcaaactgcctctccactgaaagcactgacactccgaaggcccctgtcatcactcttccctcagaggcaagggaacaaatggccacccttggagagaggacgttcaactgttgctacccaggttgccacttcaaaactgtccatggcatgaaagacttggaccgccatctcagaatccacacgggagacaaaccgcacaagtgtgagttctgtgacaagtgcttcagccggaaggacaacctgaccatgcacatgcggtgccacaccagtgtgaagccacacaagtgtcacctgtgtgactacgctgccgtggacagcagtagcctcaagaagcacctgcggatccactctgatgagcggccgtacaaatgccagctctgcccctatgccagccgcaactccagccagctcaccgtccacctgcgatctcacacgggggatacccccttccagtgctggctctgtagcgccaagttcaaaatcagctcggacttgaaaaggcacatgatcgtgcactcgggggagaagcctttcaagtgcgagttctgcgacgtccgctgcaccatgaaggcgaatctcaaatcgcacatccgcatcaagcacaccttcaaatgtctgcactgtgccttccagggccgggaccgggctgacctcctggagcacagccggctgcaccaggccgaccacccggagaagtgtccagagtgcagctactcctgctccagcgcggccgccctgcgcgtgcacagcagagtccactgtaaggaccgtcccttcaagtgtgacttctgcagcttcgacacgaagcggcccagcagcctggccaagcacgtcgacaaggtgcacagggacgaggccaagacggagaaccgggcccctctgggcaaggaagggctcagagagggcagctcccagcacgtggccaagatcgtgacgcagagggccttccgctgtgagacctgcggcgcctccttcgtcagggatgactctctgagatgccacaagaagcagcacagtgatcagagtgagaacaagaactcagacttggtcaccttcccaccggaaagcggtgcctcgggacagctcagcaccctggtctccgtggggcagctcgaggctcccctagagcccagccaagacctctagtaatgaactagtccgtaacttgaaagtatttcgatttcttggctttatatatcttgtggaaaggacgatgtaatctgggaaaccggtacgcc

SEQ ID NO: 1387 - DNA, 2141 bp, Homo sapiens
  source 1..2141: mol_type = genomic DNA
accgccaccatgaacgcgagcagcgagggcgagagcttcgcgggctcggtgcaaagtggcacaacggtgctggtggagctgactcccgacatccatatctgcggcatctgcaagcagcagtttaacaacctggatgcctttgtagctcacaagcaaagtggctgccagctgacaggcacatccgcagcagcccccagcacggtccagtttgtatcggaggaaacagtgcctgccacccagactcagaccaccaccagaaccatcacctcggagacccagacaatcacagtttcagctccagaatttgtttttgaacatggctatcaaacttacctgcccacggaaagtaatgaaaaccagacagccactgtcatctctctccctgccaagtcacgcaccaaaaagcccacaacaccacctgctcagaaaaggcttaactgttgctatccaggttgccaattcaagactgcttatggcatgaaggacatggagcggcatttaaaaattcacacgggagacaaaccccataagtgtgaagtctgtggcaagtgctttagccggaaagacaagctgaaaactcacatgcggtgccacacgggcgtgaagccctacaagtgtaagacgtgtgactacgccgctgccgacagcagcagcctcaacaagcacctgaggatccactcggacgagcggcccttcaaatgccagatctgcccctacgccagccgcaactccagccagctcactgtccacctgcgatcccacacgggggacgcccccttccagtgctggctctgtagcgccaagttcaaaatcagctcggacttgaaaaggcacatgcgggtgcactcgggggagaagcctttcaagtgcgagttctgcaatgtccgctgcaccatgaaggggaacctcaagtcgcacatccgtatcaagcacagcgggaataacttcaagtgtcctcattgcgacttcctgggtgacagcaaagccaccctccggaagcacagccgcgtgcaccagtcggagcatcctgagaagtgctcggaatgcagctactcctgctccagcaaggccgccctgcgcatccacgagcgtatccactgcaccgaccgccctttcaagtgcaactactgcagcttcgacaccaaacagcccagcaacctgagcaagcacatgaagaagttccatggggacatggttaagactgaggctctagagaggaaggacaccggcaggcagagcagccggcaggtggccaagctggatgccaagaagagtttccactgcgatatatgcgatgcctccttcatgcgggaggactcgctccgcagccacaagagacagcacagtgagtacagtgagagtaagaactcggacgtgaccgttctccagtttcagatcgaccccagcaagcagcccgccacgcccctcactgtgggacacctccaggtgcccctccagcccagccaagtgccccagttcagcgagggaagagtcaaaatcatcgttgggcatcaggtgccccaggcgaacaccatcgtccaggctgccgccgctgcagtgaacatcgtcccgcctgccttggtggcccagaacccagaggaactcccagggaacagccggctgcagatcctgcgccaggtcagtctgatcgccccccctcagtcctcgcggtgtccgagcgaggcgggcgcaatgacccagccggctgtcctgctgaccacccacgagcagacggacggagccactctgcaccagactctcatccccacggcctcaggtggcccccaggaaggctctggcaatcaaactttcattaccagttcgggtattacttgcactgactttgaaggcctaaacgccttgattcaggaggggacagcagaagtgacagtggtgagcgatggaggccagaacatcgcagtggccaccacagcgccaccggtcttctcctcctcttcccagcaagaactacccaagcagacctactccatcattcaaggggcagcccatccagctttgctctgtcccgccgactccattccagattagtaatgaactagtccgtaacttgaaagtatttcgatttcttggctttatatatcttgtggaaaggacgaccgattagtgacaccgttgccgat

SEQ ID NO: 1388 - DNA, 2147 bp, Homo sapiens
  source 1..2147: mol_type = genomic DNA
accgccaccatgaacgcgagcagcgagggcgagagcttcgcgggctcggtgcaaattccaggtggcacaacggtgctggtggagctgactcccgacatccatatctgcggcatctgcaagcagcagtttaacaacctggatgcctttgtagctcacaagcaaagtggctgccagctgacaggcacatccgcagcagcccccagcacggtccagtttgtatcggaggaaacagtgcctgccacccagactcagaccaccaccagaaccatcacctcggagacccagacaatcacagtttcagctccagaatttgtttttgaacatggctatcaaacttacctgcccacggaaagtaatgaaaaccagacagccactgtcatctctctccctgccaagtcacgcaccaaaaagcccacaacaccacctgctcagaaaaggcttaactgttgctatccaggttgccaattcaagactgcttatggcatgaaggacatggagcggcatttaaaaattcacacgggagacaaaccccataagtgtgaagtctgtggcaagtgctttagccggaaagacaagctgaaaactcacatgcggtgccacacgggcgtgaagccctacaagtgtaagacgtgtgactacgccgctgccgacagcagcagcctcaacaagcacctgaggatccactcggacgagcggcccttcaaatgccagatctgcccctacgccagccgcaactccagccagctcactgtccacctgcgatcccacacgggggacgcccccttccagtgctggctctgtagcgccaagttcaaaatcagctcggacttgaaaaggcacatgcgggtgcactcgggggagaagcctttcaagtgcgagttctgcaatgtccgctgcaccatgaaggggaacctcaagtcgcacatccgtatcaagcacagcgggaataacttcaagtgtcctcattgcgacttcctgggtgacagcaaagccaccctccggaagcacagccgcgtgcaccagtcggagcatcctgagaagtgctcggaatgcagctactcctgctccagcaaggccgccctgcgcatccacgagcgtatccactgcaccgaccgccctttcaagtgcaactactgcagcttcgacaccaaacagcccagcaacctgagcaagcacatgaagaagttccatggggacatggttaagactgaggctctagagaggaaggacaccggcaggcagagcagccggcaggtggccaagctggatgccaagaagagtttccactgcgatatatgcgatgcctccttcatgcgggaggactcgctccgcagccacaagagacagcacagtgagtacagtgagagtaagaactcggacgtgaccgttctccagtttcagatcgaccccagcaagcagcccgccacgcccctcactgtgggacacctccaggtgcccctccagcccagccaagtgccccagttcagcgagggaagagtcaaaatcatcgttgggcatcaggtgccccaggcgaacaccatcgtccaggctgccgccgctgcagtgaacatcgtcccgcctgccttggtggcccagaacccagaggaactcccagggaacagccggctgcagatcctgcgccaggtcagtctgatcgccccccctcagtcctcgcggtgtccgagcgaggcgggcgcaatgacccagccggctgtcctgctgaccacccacgagcagacggacggagccactctgcaccagactctcatccccacggcctcaggtggcccccaggaaggctctggcaatcaaactttcattaccagttcgggtattacttgcactgactttgaaggcctaaacgccttgattcaggaggggacagcagaagtgacagtggtgagcgatggaggccagaacatcgcagtggccaccacagcgccaccggtcttctcctcctcttcccagcaagaactacccaagcagacctactccatcattcaaggggcagcccatccagctttgctctgtcccgccgactccattccagattagtaatgaactagtccgtaacttgaaagtatttcgatttcttggctttatatatcttgtggaaaggacgactgcaaatactatgcggttccacc

SEQ ID NO: 1389 - DNA, 1238 bp, Homo sapiens
  source 1..1238: mol_type = genomic DNA
accgccaccatggctcgagaatggagggccgctcagggaaaggaccctgggccctcagagaagcagaaacctgttttcacaccactgaggaggccaggcatgcttgtaccaaagcagaatgtttcacctccagatatgtcagctttgtctttaaaaggtgatcaagctctccttggaggcattttttattttttgaacatttttagccatggcgagctacctcctcattgtgaacagcgcttcctcccttgtgaaattggctgtgttaagtattctctccaagaaggtattatggcagatttccacagttttataaatcctggtgaaattccacgaggatttcgatttcattgtcaggctgcaagtgattctagtcacaagattcctatttcaaattttgaacgtgggcataaccaagcaactgtgttacaaaacctttatagatttattcatcccaacccagggaactggccacctatctactgcaagtctgatgatagaaccagagtcaactggtgtttgaagcatatggcaaaggcatcagaaatcaggcaagatctacaacttctcactgtagaggaccttgtagtggggatctaccaacaaaaatttctcaaggagccctctaagacttggattcgaagcctcctagatgtggccatgtgggattattctagcaacacaaggtgcaagtggcatgaagaaaatgatattctcttctgtgctttagctgtttgcaagaagattgcgtactgcatcagtaattctctggccactctctttggaatccagctcacagaggctcatgtaccactacaagattatgaggccagcaatagtgtgacacccaaaatggttgtattggatgcagggcgttaccagaagctaagggttgggagttcaggattctctcatttcaactcttctaatgaggaacaaagatcaaacacacccattggtgactacccatctagggcaaaaatttctggccaaaacagcagcgttcggggaagaggaattacccgcttactagagagcatttccaattcttccagcaatatccacaaattctccaactgtgacacttcactctcaccttacatgtcccaaaaagatggatacaaatctttctcttccttatcttagtaatgaactagtccgtaacttgaaagtatttcgatttcttggctttatatatcttgtggaaaggacgaggtggagcatcatgagaggtagct

SEQ ID NO: 1390 - DNA, 1313 bp, Homo sapiens
  source 1..1313: mol_type = genomic DNA
accgccaccatgccgaaccgtaaggccagccggaatgcttactatttcttcgtgcaggagaagatccccgaactacggcgacgaggcctgcctgtggctcgcgttgctgatgccatcccttactgctcctcagactgggcgaaacctgttttcacaccactgaggaggccaggcatgcttgtaccaaagcagaatgtttcacctccagatatgtcagctttgtctttaaaaggtgatcaagctctccttggaggcattttttattttttgaacatttttagccatggcgagctacctcctcattgtgaacagcgcttcctcccttgtgaaattggctgtgttaagtattctctccaagaaggtattatggcagatttccacagttttataaatcctggtgaaattccacgaggatttcgatttcattgtcaggctgcaagtgattctagtcacaagattcctatttcaaattttgaacgtgggcataaccaagcaactgtgttacaaaacctttatagatttattcatcccaacccagggaactggccacctatctactgcaagtctgatgatagaaccagagtcaactggtgtttgaagcatatggcaaaggcatcagaaatcaggcaagatctacaacttctcactgtagaggaccttgtagtggggatctaccaacaaaaatttctcaaggagccctctaagacttggattcgaagcctcctagatgtggccatgtgggattattctagcaacacaaggtgcaagtggcatgaagaaaatgatattctcttctgtgctttagctgtttgcaagaagattgcgtactgcatcagtaattctctggccactctctttggaatccagctcacagaggctcatgtaccactacaagattatgaggccagcaatagtgtgacacccaaaatggttgtattggatgcagggcgttaccagaagctaagggttgggagttcaggattctctcatttcaactcttctaatgaggaacaaagatcaaacacacccattggtgactacccatctagggcaaaaatttctggccaaaacagcagcgttcggggaagaggaattacccgcttactagagagcatttccaattcttccagcaatatccacaaattctccaactgtgacacttcactctcaccttacatgtcccaaaaagatggatacaaatctttctcttccttatcttagtaatgaactagtccgtaacttgaaagtatttcgatttcttggctttatatatcttgtggaaaggacgaaatccgattctccgccgcccgacc

SEQ ID NO: 1391 - DNA, 1145 bp, Homo sapiens
  source 1..1145: mol_type = genomic DNA
accgccaccatggaaaacttgatgactagctccaccctaccgcccctttttgcagatgaagacggttccaaggagagtaatgatctggctaccactgggttaaatcacccagaggttccatacagtagtggcgccacatcatccaccaacaatccagaatttgtggaggatctctctcaaggtcagttgcttcagagtgagtcttcaaatgcagcagaaggcaatgaacagaggcatgaagatgagcaacgaagtaaacgaggaggttggtccaaaggaagaaagaggaagaaacctcttcgagacagcaatgcacccaaatccccccttacaggatatgttcggttcatgaatgagcgtcgagaacaacttcgagcaaagagaccagaagtcccatttccagaaatcacaaggatgttaggcaatgaatggagtaaactgcctcctgaggaaaaacagcgctaccttgatgaagcagacagagataaggagcgttacatgaaggaactggaacagtatcagaaaacagaggcctacaaggtcttcagtaggaaaacccaggaccgtcagaaaggcaaatctcataggcaagatgcagcccggcaggccactcatgatcatgagaaagaaacagaggtaaaggaacggtctgtttttgacatccctatatttacagaggaattcttgaaccatagcaaagctcgggaagcagagctccgccagcttcgcaaatccaacatggagtttgaggagaggaatgcagccctgcaaaagcacgtggagagcatgcgcacagcagtggagaagctggaggtggatgtgatccaggagcggagccgcaacacagtcttacagcagcacctggagaccctgcggcaggtgctgaccagcagctttgccagcatgcccttgcctggaagtggagagacacctacagtggacaccattgactcatatatgaacagactgcacagtattattttagctaatccccaagacaatgaaaacttcatagctacagttcgagaagttgtgaacagactcgatcgttagtaatgaactagtccgtaacttgaaagtatttcgatttcttggctttatatatcttgtggaaaggacgaatatgtataccgatcgccgtggaa

SEQ ID NO: 1392 - DNA, 2786 bp, Homo sapiens
  source 1..2786: mol_type = genomic DNA
accgccaccatgaactccatgaaccccatgaaacctgccctgccccctgcgccacacggtgatggttcattcgcatatgagtctgtgccttggcaacaaagcgccactcagccggctggatcgctgtctgtggtcactactgtgtggggagttggcaacgcgacacagagccaggttttggggaaccccatgggccctgcagggagtccctctggcagctccatgatgcctggtgtggcagggggcagctccgccttgacctccccacagtgcctgggacagcaggcgtttgctgaaggcggcgccaacaagggctacgtgcagcaaggcgtgtacagccgcgggggctaccctggggcccccggcttcaccaccgggtatgcaggcggcccggggggcctgggcctcccctcacatgctgcaagaccctccactgacttcacgcaagcggcagctgctgcagctgtggctgctgcggcagccactgccaccgccacagccacagccaccgtggctgctctccaggagaagcagagccaggagctgagccagtatggagcgatgggggccggacagtcttttaacagccagtttctgcagcatggaggtccccgggggcctagtgtccccgctggcatgaaccctactggcataggaggggtaatgggcccctctggcctctcccccttggctatgaaccccacccgggcagcaggaatgacacccttgtatgcagggcagcgtctgccccaacatgggtatcctgggcctccccaggcccagccactgccccgacagggggtcaagagaacctactctgaggtgtatccagggcagcagtatctgcaaggaggccagtatgcacccagcaccgcccagtttgcgcccagccctgggcagccccctgccccctccccttcctaccctgggcacaggctgcccctgcagcagggcatgacccagtccctgtccgtgcctggccccacgggactgcattataagcctacccgttccatcccgggctatcccagttccccactgccagggaaccccacgccacccatgaccccaagcagcagcgtcccttacatgtcaccaaaccaagaggtcaagtctcccttcttgcctgatctcaagcccaacctcaactccttgcactcatcgccctctggaagcgggccttgtgacgagttgcggctgaccttccctgtgcgcgatggggtggtcctggagcccttccgcctgcagcacaacctggctgtaagcaaccatgtcttccagctgcgagactcagtctacaagaccctgataatgaggcctgacctggagctgcaattcaagtgctaccaccacgaggaccggcagatgaacaccaactggccagcctcggtgcaggtcagcgtcaatgccacgccgctcaccatcgagcgtggcgacaacaagacctcgcacaagccactctacctgaagcatgtgtgccagccaggccgcaacaccatccagatcaccgtcaccgcctgctgctgctcccacctcttcgtgctgcagctagtgcaccgcccatccgtccgctcggtgctgcagggcctcctcaaaaagcgcctcctgcctgctgagcactgcatcaccaagataaagcggaacttcagcagcggcaccatccctggcacccctgggcccaacggagaggacggggtggagcagacagctatcaaggtgtccctgaagtgccccatcaccttccgcaggatccagctccctgcccgaggtcatgactgtcgccacatacagtgctttgacctggagtcgtacctgcagctcaactgtgagcgggggacttggaggtgtcctgtgtgcaacaagacagctttgctggagggcctggaggtggaccagtacatgctgggcatcctgatttacattcagaactctgactatgaggagatcaccatcgaccccacgtgcagctggaagccagtgcccgtgaagcctgacatgcacatcaaggaggagccggatgggccagcactgaagcgctgccgcaccgtgagccccgcccacgtgctcatgcccagcgtgatggagatgatcgccgccctgggccccggcgctgccccctttgcccccctgcagcccccctcagtccctgcccccagcgactaccctggccagggttccagcttcctggggcctggaactttccctgagtccttcccacccaccacgcccagcaccccaacccttgctgagttcaccccgggaccaccccccatctcctaccagtctgacattcccagcagcctcctgacttcagagaagtctaccgcctgcctcccaagccagatggcaccagcaggtcacctggaccccactcacaatcctgggacaccaggactacacacctccaaccttggggcccctccaggtccccagctgcaccattcaaaccctcccccagcgtcccggcagtccttgggccaagcgagcttaggacctacgggtgaactggccttcagtcctgccacaggcgtgatggggccccccagcatgtctggagccggggaggccccagaaccagctctggacctgctcccggaactgaccaaccctgatgagctactgtcctacttgggcccacccgacctccctacgaacaacaatgacgacctgctttctctgtttgagaacaactagtaatgaactagtccgtaacttgaaagtatttcgatttcttggctttatatatcttgtggaaaggacgaacgcgctggtcattcgccgggagc

SEQ ID NO: 1393 - DNA, 2768 bp, Homo sapiens
  source 1..2768: mol_type = genomic DNA
accgccaccatgaactccatgaaccccatgaaacctgccctgccccctgcgccacacggtgatggttcattcgcatatgagtctgtgccttggcaacaaagcgccactcagccggctggatcgctgtctgtggtcactactgtgtggggagttggcaacgcgacacagagccagtgcctgggacagcaggcgtttgctgaaggcggcgccaacaagggctacgtgcagcaaggcgtgtacagccgcgggggctaccctggggcccccggcttcaccaccgggtatgcaggcggcccggggggcctgggcctcccctcacatgctgcaagaccctccactgacttcacgcaagcggcagctgctgcagctgtggctgctgcggcagccactgccaccgccacagccacagccaccgtggctgctctccaggagaagcagagccaggagctgagccagtatggagcgatgggggccggacagtcttttaacagccagtttctgcagcatggaggtccccgggggcctagtgtccccgctggcatgaaccctactggcataggaggggtaatgggcccctctggcctctcccccttggctatgaaccccacccgggcagcaggaatgacacccttgtatgcagggcagcgtctgccccaacatgggtatcctgggcctccccaggcccagccactgccccgacagggggtcaagagaacctactctgaggtgtatccagggcagcagtatctgcaaggaggccagtatgcacccagcaccgcccagtttgcgcccagccctgggcagccccctgccccctccccttcctaccctgggcacaggctgcccctgcagcagggcatgacccagtccctgtccgtgcctggccccacgggactgcattataagcccacagagcagttcaacgggcagggcgccagcttcaacgggggcagcgtcagctacagccaacctggcctgagtgggcctacccgttccatcccgggctatcccagttccccactgccagggaaccccacgccacccatgaccccaagcagcagcgtcccttacatgtcaccaaaccaagaggtcaagtctcccttcttgcctgatctcaagcccaacctcaactccttgcactcatcgccctctggaagcgggccttgtgacgagttgcggctgaccttccctgtgcgcgatggggtggtcctggagcccttccgcctgcagcacaacctggctgtaagcaaccatgtcttccagctgcgagactcagtctacaagaccctgataatgaggcctgacctggagctgcaattcaagtgctaccaccacgaggaccggcagatgaacaccaactggccagcctcggtgcaggtcagcgtcaatgccacgccgctcaccatcgagcgtggcgacaacaagacctcgcacaagccactctacctgaagcatgtgtgccagccaggccgcaacaccatccagatcaccgtcaccgcctgctgctgctcccacctcttcgtgctgcagctagtgcaccgcccatccgtccgctcggtgctgcagggcctcctcaaaaagcgcctcctgcctgctgagcactgcatcaccaagataaagcggaacttcagcagcggcaccatccctggcacccctgggcccaacggagaggacggggtggagcagacagctatcaaggtgtccctgaagtgccccatcaccttccgcaggatccagctccctgcccgaggtcatgactgtcgccacatacagtgctttgacctggagtcgtacctgcagctcaactgtgagcgggggacttggaggtgtcctgtgtgcaacaagacagctttgctggagggcctggaggtggaccagtacatgctgggcatcctgatttacattcagaactctgactatgaggagatcaccatcgaccccacgtgcagctggaagccagtgcccgtgaagcctgacatgcacatcaaggaggagccggatgggccagcactgaagcgctgccgcaccgtgagccccgcccacgtgctcatgcccagcgtgatggagatgatcgccgccctgggccccggcgctgccccctttgcccccctgcagcccccctcagtccctgcccccagcgactaccctggccagggttccagcttcctggggcctggaactttccctgagtccttcccacccaccacgcccagcaccccaacccttgctgagttcaccccgggaccaccccccatctcctaccagtctgacattcccagcagcctcctgacttcagagaagtctaccgcctgcctcccaagccagatggcaccagcaggtcacctggaccccactcacaatcctgggacaccaggactacacacctccaaccttggggcccctccaggtccccagctgcaccattcaaaccctcccccagcgtcccggcagtccttgggccaagcgagcttaggacctacgggtgaactggccttcagtcctgccacaggcgtgatggggccccccagcatgtctggagccggggaggccccagaaccagctctggacctgctcccggaactgaccaaccctgatgagctactgtcctacttgggcccacccgacctccctacgaacaacaatgacgacctgctttctctgtttgagaacaactagtaatgaactagtccgtaacttgaaagtatttcgatttcttggctttatatatcttgtggaaaggacgaattataccgtaaggacatgaaacc

SEQ ID NO: 1394 - DNA, 2864 bp, Homo sapiens
  source 1..2864: mol_type = genomic DNA
accgccaccatgaactccatgaaccccatgaaacctgccctgccccctgcgccacacggtgatggttcattcgcatatgagtctgtgccttggcaacaaagcgccactcagccggctggatcgctgtctgtggtcactactgtgtggggagttggcaacgcgacacagagccaggttttggggaaccccatgggccctgcagggagtccctctggcagctccatgatgcctggtgtggcagggggcagctccgccttgacctccccacagtgcctgggacagcaggcgtttgctgaaggcggcgccaacaagggctacgtgcagcaaggcgtgtacagccgcgggggctaccctggggcccccggcttcaccaccgggtatgcaggcggcccggggggcctgggcctcccctcacatgctgcaagaccctccactgacttcacgcaagcggcagctgctgcagctgtggctgctgcggcagccactgccaccgccacagccacagccaccgtggctgctctccaggagaagcagagccaggagctgagccagtatggagcgatgggggccggacagtcttttaacagccagtttctgcagcatggaggtccccgggggcctagtgtccccgctggcatgaaccctactggcataggaggggtaatgggcccctctggcctctcccccttggctatgaaccccacccgggcagcaggaatgacacccttgtatgcagggcagcgtctgccccaacatgggtatcctgggcctccccaggcccagccactgccccgacagggggtcaagagaacctactctgaggtgtatccagggcagcagtatctgcaaggaggccagtatgcacccagcaccgcccagtttgcgcccagccctgggcagccccctgccccctccccttcctaccctgggcacaggctgcccctgcagcagggcatgacccagtccctgtccgtgcctggccccacgggactgcattataagcccacagagcagttcaacgggcagggcgccagcttcaacgggggcagcgtcagctacagccaacctggcctgagtgggcctacccgttccatcccgggctatcccagttccccactgccagggaaccccacgccacccatgaccccaagcagcagcgtcccttacatgtcaccaaaccaagaggtcaagtctcccttcttgcctgatctcaagcccaacctcaactccttgcactcatcgccctctggaagcgggccttgtgacgagttgcggctgaccttccctgtgcgcgatggggtggtcctggagcccttccgcctgcagcacaacctggctgtaagcaaccatgtcttccagctgcgagactcagtctacaagaccctgataatgaggcctgacctggagctgcaattcaagtgctaccaccacgaggaccggcagatgaacaccaactggccagcctcggtgcaggtcagcgtcaatgccacgccgctcaccatcgagcgtggcgacaacaagacctcgcacaagccactctacctgaagcatgtgtgccagccaggccgcaacaccatccagatcaccgtcaccgcctgctgctgctcccacctcttcgtgctgcagctagtgcaccgcccatccgtccgctcggtgctgcagggcctcctcaaaaagcgcctcctgcctgctgagcactgcatcaccaagataaagcggaacttcagcagcggcaccatccctggcacccctgggcccaacggagaggacggggtggagcagacagctatcaaggtgtccctgaagtgccccatcaccttccgcaggatccagctccctgcccgaggtcatgactgtcgccacatacagtgctttgacctggagtcgtacctgcagctcaactgtgagcgggggacttggaggtgtcctgtgtgcaacaagacagctttgctggagggcctggaggtggaccagtacatgctgggcatcctgatttacattcagaactctgactatgaggagatcaccatcgaccccacgtgcagctggaagccagtgcccgtgaagcctgacatgcacatcaaggaggagccggatgggccagcactgaagcgctgccgcaccgtgagccccgcccacgtgctcatgcccagcgtgatggagatgatcgccgccctgggccccggcgctgccccctttgcccccctgcagcccccctcagtccctgcccccagcgactaccctggccagggttccagcttcctggggcctggaactttccctgagtccttcccacccaccacgcccagcaccccaacccttgctgagttcaccccgggaccaccccccatctcctaccagtctgacattcccagcagcctcctgacttcagagaagtctaccgcctgcctcccaagccagatggcaccagcaggtcacctggaccccactcacaatcctgggacaccaggactacacacctccaaccttggggcccctccaggtccccagctgcaccattcaaaccctcccccagcgtcccggcagtccttgggccaagcgagcttaggacctacgggtgaactggccttcagtcctgccacaggcgtgatggggccccccagcatgtctggagccggggaggccccagaaccagctctggacctgctcccggaactgaccaaccctgatgagctactgtcctacttgggcccacccgacctccctacgaacaacaatgacgacctgctttctctgtttgagaacaactagtaatgaactagtccgtaacttgaaagtatttcgatttcttggctttatatatcttgtggaaaggacgagagaagaggtatatttggctcaca

SEQ ID NO: 1395 - DNA, 3305 bp, Homo sapiens
  source 1..3305: mol_type = genomic DNA
accgccaccatgaattctatggacaggcacatccagcagaccaatgaccgactgcagtgcatcaagcagcacttacagaatcctgccaacttccacaatgccgccacggagctgctggactggtgcggagacccacgggccttccagcggcccttcgagcagagcctgatgggctgtttgacggtggtcagtcgggtggcagcccagcaaggctttgacctggacctcggctacagactgctggctgtgtgtgctgcaaaccgagacaagttcaccccgaagtctgccgccttgttgtcctcctggtgcgaagagctcggccgcctgctgctgctccgacatcagaagagccgccagagcgatccccctgggaaactccccatgcagccccctctcagctccatgagctccatgaaacccactctgtcgcacagtgatgggtcgttcccctatgactctgtcccttggcagcagaacaccaaccagcctcccggctccctttccgtggtcaccacggtttggggagtaaccaacacatcccagagccaggtccttgggaaccctatggccaatgccaacaaccccatgaatccaggcggcaaccccatggcgtcgggcatgaccaccagcaacccaggcctcaactccccacagtttgcggggcagcagcagcagttctcagccaaggctggccccgctcagccctacatccagcagagcatgtatggccggcccaactaccccggcagcgggggctttggggccagttaccctgggggtcctaacgcccccgcaggcatgggcatccctccgcacaccaggccgcctgctgacttcactcagcccgcggcagccgctgcagcagcggcagtggcagcagcagcagccacagctacagccacagccacggccactgtggcagccctgcaggagacacagaacaaggatataaaccagtatggaccgatgggtcccacccaggcgtataacagccaattcatgaaccagcccgggccgcgggggcctgcctccatggggggcagcatgaaccccgcgagcatggcggctggcatgacgccctcggggatgagcggccctcccatgggcatgaaccagccccggccgcccggcatcagcccctttggcacacacgggcagcggatgccccagcagacctacccgggcccccggccccagtcccttcctattcagaacataaagaggccataccctggagagcccaactatggaaaccagcaatatggaccaaacagccagttccccacccagccaggccagtacccagcccccaaccccccgaggccactcacctcccccaactacccaggacagaggatgcccagccagccgagctccgggcagtacccgccccccacggtcaacatggggcagtattacaagccagaacagtttaatggacaaaataacacgttctcgggaagcagctacagtaactacagccaagggaatgtcaacaggcctcccaggccggttcctgtggcaaattacccccactcacctgttccagggaaccccacaccccccatgacccctgggagcagcatccctccatacctgtcccccagccaagacgtcaaaccacccttcccgcctgacatcaagccaaatatgagcgctctgccaccacccccagccaaccacaatgacgagctgcggctcacattccctgtgcgggatggcgtggtgctggagcccttccgcctggagcacaacctggcggtcagcaaccatgtgttccacctgcggcccacggtccaccagacgctgatgtggaggtctgacctggagctgcagttcaagtgctaccaccacgaggaccggcagatgaacaccaactggcccgcctcggtgcaggtcagcgtgaacgccacgcccctcaccattgagcgcggcgacaacaagacctcccacaagcccctgcacctgaagcacgtgtgccagccgggccgcaacaccatccagatcaccgtcacggcctgctgctgctcccacctcttcgtgctgcagctggtacaccggccctccgtccgctctgtgctgcaaggactcctcaagaagcgcctcctgcccgcagagcactgtatcacgaaaatcaagcggaatttcagcagcgtggctgcctcctcgggcaacacgaccctcaacggggaggatggggtggagcagacggccatcaaggtgtctctgaagtgccccatcacattccggcgcatccagctgcctgctcgaggacacgattgcaagcatgtgcagtgctttgatctggagtcatacctgcagctgaattgcgagagagggacctggaggtgtcctgtgtgcaataaaaccgctctgctggagggcctggaggtggatcagtacatgtggggaatcctgaatgccatccaacactccgagtttgaagaggtcaccatcgatcccacgtgcagctggcggccggtgcccatcaagtcggacttacacatcaaggacgaccctgatggcatcccctccaagcggttcaagaccatgagtcccagccagatgatcatgcccaatgtcatggagatgatcgcagccctgggccccggcccgtccccctatcccctcccgcctcccccagggggcaccaactccaacgactacagcagccaaggcaacaactaccaaggccatggcaactttgacttcccccacgggaaccctggagggacatccatgaatgacttcatgcacgggcccccccagctctcccaccccccggacatgcccaacaacatggccgccctcgagaaacccctcagccaccccatgcaggaaactatgccacacgctggcagctctgaccagccccacccctccatacaacaaggtttgcacgtaccacaccccagcagccagtcagggcctccattacatcacagtggggctcctcctcctcctccttcccagcctccccggcagccgccacaggccgctcccagcagccatccacacagcgacctgacctttaacccctcctcagccttagagggtcaggccggagcgcagggagcgtccgacatgccggagccttcgctggatctccttcccgaactcacaaatcctgacgagctcctgtcttatctggacccccccgacctgccgagcaatagtaacgatgacctcctgtctctatttgagaacaactagtaatgaactagtccgtaacttgaaagtatttcgatttcttggctttatatatcttgtggaaaggacgatcagttggagcctgagtgttagtt

SEQ ID NO: 1396 - DNA, 1439 bp, Homo sapiens
  source 1..1439: mol_type = genomic DNA
accgccaccatgaatacaaactcaaaggaggttttatccctgggtgttcaagttcccgaggcatgggaagaacttctgacaatgaaagtggaagcaaaaagtcaccttcaatggcaggaatccagactgaaacgcagtaatccactggcaagggaaatcttccgaaggcactttcgacagctgtgctaccaagagacccctggaccaagggaggctcttactcgactccaggaactttgctaccagtggttgaggccacatgtgagcacaaaggagcagattttggatctgctggtgctggagcagtttctatccattctgcccaaggagctccagggctgggtgagggaacactgtccagagagtggagaagaggctgtgattttgctggaggatctggagagagagctcgatgaaccacaacatgagatggtggcccacagacacagacaagaagtcctctgtaaagagatggtgcctctagcagagcagacaccactgacccttcagtcccagcctaaggagccacagctcacatgtgactctgctcagaagtgccattctattggagagacagatttaatacgaagtttgaggagaagggcagtactgatcccacttggggcccatctgttctctacagacacatttttattttccaaacctgttgtgatcccccagctaaaaggaggaggagaaacatggcctaacaacagaggagtcctaagagatgaagtaaccaagactgaggacagagagttggtgctaaggaaagactgtcctaagatagtggaaccacatgggaaaatgtttaatgagcagacctgggaggtatcacagcaggatccctcacatggagaagttggtgaacataaggataggatagagaggcagtggggaaacctcttaggagaggggcaacacaaatgtgatgaatgtgggaagagctttactcagagctcaggtctcattcgacatcaaagaattcatactggagaaagaccttatgaatgtaatgaatgtgggaaagccttcagtcgaagttctggtctttttaatcaccgaggaatccacaatatacagaaacggtaccactgcaaggagtgtgggaaggtcttcagtcagagtgcgggtcttatccagcatcagagaatccacaaaggagaaaagccgtatcagtgcagccagtgcagtaagagctacagtcggcgttcatttctcattgaacatcagagaagccacacaggggagcgacctcaccagtgcattgaatgtgggaaaagctttaatcgacactgcaacctcattcgccatcagaagatccacacagtggctgagctggtctagtaatgaactagtccgtaacttgaaagtatttcgatttcttggctttatatatcttgtggaaaggacgagccgcagggcttcaactaagtgga

SEQ ID NO: 1397 - DNA, 3842 bp, Homo sapiens
  source 1..3842: mol_type = genomic DNA
accgccaccatgagcaaggaaagacccaagaggaatatcattcagaagaaatacgatgacagtgatgggattccgtggtcagaagaacgggtggtacgtaaagtcctttatttgtctctgaaggagttcaagaattcccagaagaggcagcatgcggaaggcattgctgggagcctgaaaactgtgaatgggctccttggtaatgaccagtctaagggattaggaccagcatcagaacagtcagagaatgaaaaggacgatgcatcccaagtgtcctccactagcaacgatgttagttcttcagattttgaagaagggccgtcgaggaaaaggcccaggctgcaagcacaaaggaagtttgctcagtctcagccgaatagtcccagcacaactccagtaaagatagtggagccattgctaccccctccagctactcagatatcagacctctctaaaaggaagcctaagacagaagattttcttacctttctctgccttcgaggttctcctgcgctgcccaacagcatggtgtattttggaagctctcaggatgaggaggaagtcgaggaggaagatgatgagacagaagacgtcaaaacagccaccaacaatgcttcatcttcatgccagtcgacccccaggaaaggaaaaacccacaaacatgttcacaacgggcatgttttcaatggttccagcaggtcaacacgggagaaggaacctgttcaaaaacacaaaagcaaagaggccactcccgcaaaggagaagcacagcgatcaccgggctgacagccgccgggagcaggcttcagctaaccaccccgcagcggccccctccacgggttcctcggccaaggggcttgctgccacccatcaccacccccctctgcatcggtcggctcaggacttacggaaacaggtttctaaggtaaacggagtcactcgaatgtcatctctgggtgcaggtgtaaccagtgccaaaaagatgcgcgaggtcagaccttcaccatccaaaactgtgaagtacactgccacggtgacgaagggggctgtcacatacaccaaagccaagagagaactggtcaaggacaccaaacccaatcaccacaagcccagttccgctgtcaaccacacaatctcagggaaaactgaaagtagcaatgcaaaaacccgcaaacaggtgctatccctcgggggggcgtccaagtccactgggcccgccgtcaatggcctcaaggtcagtggcaggttgaacccaaagtcatgcactaaggaggtgggggggcggcagctgcgggagggcctgcagctgcgggaggggctgcggaactccaagaggagactggaagaggcacaccaggcggagaagccgcagtcgccccccaagaagatgaaaggggcggctggccccgccgaaggccctggcaagaaggccccggccgagagaggtctgctgaacggacacgtgaagaaggaagtgccggagcgcagtctggagaggaatcggccgaagcgggccacggccgggaagagcacgccaggcagacaagcacatggcaaggcggacagcgcctcctgtgaaaatcgttctacctcgcaaccggagtccgtgcacaagccgcaggactcgggcaaggccgagaagggcggcggcaaggccgggtgggcggccatggacgagatccccgtcctcaggccctccgccaaggagttccacgatccgctcatctacatcgagtcggtccgcgctcaggtggagaagttcgggatgtgcagggtgatcccccctccggactggcggcccgagtgcaagctcaacgatgagatgcggtttgtcacgcagattcagcacatccacaagctgggccggcgctggggccccaacgtgcagcggctggcctgcatcaagaagcacctcaaatctcagggcatcaccatggacgagctcccgctcatagggggctgtgagctcgacctggcctgctttttccggctgattaatgagatgggcggcatgcagcaagtgactgacctcaaaaaatggaacaaactagcagacatgctgcgcatccccagaactgcccaggaccggctggccaagctgcaggaggcctactgccagtacctactctcctacgactccctgtccccagaggagcaccggcggctggagaaggaggtgctgatggagaaggagatcctggagaagcgcaaggggccgctggaaggccacacagagaacgaccaccacaagttccaccctctgccccgcttcgagcccaagaatgggctcatccacggcgtggcccccaggaacggcttccgcagcaagctcaaggaggtgggccaggcccagttgaagactggccggcggcgactcttcgctcaggaaaaagaagtggtcaaggaagaggaggaggacaaaggcgtcctcaatgacttccacaagtgcatctataagggaaggtctgtttctctaacaactttttatcgaacagcgaggaatatcatgagcatgtgtttcagcaaggagcctgccccagccgaaatcgagcaagagtactggaggctagtggaagagaaggactgccacgtggcagtgcactgcggcaaggtggacaccaacactcacggcagtggattcccagtaggaaaatcagaacccttttcgaggcatggatggaacctcaccgtcctccccaataacacagggtccatcctgcgtcacctcggtgctgtgcctggagtgactattccctggctaaatattggcatggtcttttctacctcatgctggtctcgagaccaaaatcaccttccatacattgactacttacacactggtgctgactgcatttggtattgcattcctgctgaggaggagaacaagctggaagatgtggtccacaccctgctgcaagccaatggcaccccagggctgcagatgctggaaagcaacgtcatgatctccccggaggtgctgtgcaaagaggggatcaaggtgcacaggaccgtgcagcagagtggccagtttgtcgtctgcttcccgggatcctttgtgtccaaagtgtgctgtgggtacagcgtgtctgaaaccgtgcactttgctaccacccagtggacaagtatgggctttgagaccgccaaggaaatgaagcgtcgccatatagctaagccattctccatggagaagttactctaccagattgcacaagcagaagcaaaaaaagaaaacggtcccactctcagtaccatctcagccctcctggatgagctcagggatacagagctgcggcagcgcaggcagctgttcgaggctggcctccactcctccgcacgctatggcagccacgatggcagcagcacggtggcggacgggaagaaaaagcctcgaaagtggctgcagttggagacgtcagagaggaggtgtcagatctgccagcacctgtgctacctgtccatggtggtacaagagaacgaaaacgtcgtgttctgtctggagtgtgctctgcgccacgtggagaaacagaagtcctgccgagggctgaagttgatgtaccgctacgatgaggaacagattatcagtctggtcaatcagatctgcggcaaagtgtctggtaaaaacggcagcattgagaactgtctcagtaaacccacaccaaaaagaggtccccgcaagagagcgacagtggacgtgcccccctcccgtctgtcagcctccagttcatccaaaagtgcttcgagctcatcatagtaatgaactagtccgtaacttgaaagtatttcgatttcttggctttatatatcttgtggaaaggacgagtcgctaccctcgtaacggcttgt

SEQ ID NO: 1398 - DNA, 3326 bp, Homo sapiens
  source 1..3326: mol_type = genomic DNA
accgccaccatggtgtattttggaagctctcaggatgaggaggaagtcgaggaggaagatgatgagacagaagacgtcaaaacagccaccaacaatgcttcatcttcatgccagtcgacccccaggaaaggaaaaacccacaaacatgttcacaacgggcatgttttcaatggttccagcaggtcaacacgggagaaggaacctgttcaaaaacacaaaagcaaagaggccactcccgcaaaggagaagcacagcgatcaccgggctgacagccgccgggagcaggcttcagctaaccaccccgcagcggccccctccacgggttcctcggccaaggggcttgctgccacccatcaccacccccctctgcatcggtcggctcaggacttacggaaacaggtttctaaggtaaacggagtcactcgaatgtcatctctgggtgcaggtgtaaccagtgccaaaaagatgcgcgaggtcagaccttcaccatccaaaactgtgaagtacactgccacggtgacgaagggggctgtcacatacaccaaagccaagagagaactggtcaaggacaccaaacccaatcaccacaagcccagttccgctgtcaaccacacaatctcagggaaaactgaaagtagcaatgcaaaaacccgcaaacaggtgctatccctcgggggggcgtccaagtccactgggcccgccgtcaatggcctcaaggtcagtggcaggttgaacccaaagtcatgcactaaggaggtgggggggcggcagctgcgggagggcctgcagctgcgggaggggctgcggaactccaagaggagactggaagaggcacaccaggcggagaagccgcagtcgccccccaagaagatgaaaggggcggctggccccgccgaaggccctggcaagaaggccccggccgagagaggtctgctgaacggacacgtgaagaaggaagtgccggagcgcagtctggagaggaatcggccgaagcgggccacggccgggaagagcacgccaggcagacaagcacatggcaaggcggacagcgcctcctgtgaaaatcgttctacctcgcaaccggagtccgtgcacaagccgcaggactcgggcaaggccgagaagggcggcggcaaggccgggtgggcggccatggacgagatccccgtcctcaggccctccgccaaggagttccacgatccgctcatctacatcgagtcggtccgcgctcaggtggagaagttcgggatgtgcagggtgatcccccctccggactggcggcccgagtgcaagctcaacgatgagatgcggtttgtcacgcagattcagcacatccacaagctgggccggcgctggggccccaacgtgcagcggctggcctgcatcaagaagcacctcaaatctcagggcatcaccatggacgagctcccgctcatagggggctgtgagctcgacctggcctgctttttccggctgattaatgagatgggcggcatgcagcaagtgactgacctcaaaaaatggaacaaactagcagacatgctgcgcatccccagaactgcccaggaccggctggccaagctgcaggaggcctactgccagtacctactctcctacgactccctgtccccagaggagcaccggcggctggagaaggaggtgctgatggagaaggagatcctggagaagcgcaaggggccgctggaaggccacacagagaacgaccaccacaagttccaccctctgccccgcttcgagcccaagaatgggctcatccacggcgtggcccccaggaacggcttccgcagcaagctcaaggaggtgggccaggcccagttgaagactggccggcggcgactcttcgctcaggaaaaagaagtggtcaaggaagaggaggaggacaaaggcgtcctcaatgacttccacaagtgcatctataagggaaggtctgtttctctaacaactttttatcgaacagcgaggaatatcatgagcatgtgtttcagcaaggagcctgccccagccgaaatcgagcaagagtactggaggctagtggaagagaaggactgccacgtggcagtgcactgcggcaaggtggacaccaacactcacggcagtggattcccagtaggaaaatcagaacccttttcgaggcatggatggaacctcaccgtcctccccaataacacagggtccatcctgcgtcacctcggtgctgtgcctggagtgactattccctggctaaatattggcatggtcttttctacctcatgctggtctcgagaccaaaatcaccttccatacattgactacttacacactggtgctgactgcatttggtattgcattcctgctgaggaggagaacaagctggaagatgtggtccacaccctgctgcaagccaatggcaccccagggctgcagatgctggaaagcaacgtcatgatctccccggaggtgctgtgcaaagaggggatcaaggtgcacaggaccgtgcagcagagtggccagtttgtcgtctgcttcccgggatcctttgtgtccaaagtgtgctgtgggtacagcgtgtctgaaaccgtgcactttgctaccacccagtggacaagtatgggctttgagaccgccaaggaaatgaagcgtcgccatatagctaagccattctccatggagaagttactctaccagattgcacaagcagaagcaaaaaaagaaaacggtcccactctcagtaccatctcagccctcctggatgagctcagggatacagagctgcggcagcgcaggcagctgttcgaggctggcctccactcctccgcacgctatggcagccacgatggcagcagcacggtggcggacgggaagaaaaagcctcgaaagtggctgcagttggagacgtcagagaggaggtgtcagatctgccagcacctgtgctacctgtccatggtggtacaagagaacgaaaacgtcgtgttctgtctggagtgtgctctgcgccacgtggagaaacagaagtcctgccgagggctgaagttgatgtaccgctacgatgaggaacagattatcagtctggtcaatcagatctgcggcaaagtgtctggtaaaaacggcagcattgagaactgtctcagtaaacccacaccaaaaagaggtccccgcaagagagcgacagtggacgtgcccccctcccgtctgtcagcctccagttcatccaaaagtgcttcgagctcatcatagtaatgaactagtccgtaacttgaaagtatttcgatttcttggctttatatatcttgtggaaaggacgaagggccgcttccacacgggttaaa

SEQ ID NO: 1399 - DNA, 2819 bp, Homo sapiens
  source 1..2819: mol_type = genomic DNA
accgccaccatggaaggagaatcaagcagatttgaaatccacactccagtttctgacaagaaaaagaaaaagtgttctatacataaggaaagacctcagaaacattcccacgaaattttcagagactcctccctggtgaatgaacagtctcaaataactaggaggaaaaagaggaaaaaagatttccagcatctcatttcttctcctttgaaaaaatccagaatctgtgatgagactgcaaatgccacttccacactcaaaaagagaaaaaagagaagatatagtgctttggaggtggacgaggaagcaggtgttacagttgtccttgtggataaagaaaatattaacaacacaccaaagcattttagaaaggatgttgatgttgtttgtgttgatatgagcatagaacagaagttaccaagaaagcctaaaacagacaaatttcaggtacttgctaagtcacatgcacataaatcagaagccctgcacagtaaagttagggagaaaaagaataaaaagcatcagaggaaagctgcatcctgggagagccagcgggcaagggacaccctgcctcagtcagaatcccaccaggaggagtcctggctttctgtgggtccagggggtgaaattacagaactaccagcatctgctcataaaaacaagtctaagaaaaaaaagaaaaagtccagtaaccgggaatatgagacactggccatgcctgaaggatcgcaagcaggcagagaggccgggactgatatgcaggaatcccagcctactgtgggcttggatgatgaaactccacaactactaggacctactcacaaaaaaaagtctaagaaaaaaaagaagaaaaagtccaatcaccaggaatttgaggcattggccatgcctgaaggatcacaagtgggcagtgaggttggggctgatatgcaggaatcccggcctgctgtgggcctgcatggtgaaactgcaggaataccagcacctgcttataaaaacaagtctaagaaaaaaaagaaaaagtccaatcaccaggaatttgaggcagtggccatgcctgagagcctcgagagtgcataccctgaaggatcacaggtgggcagtgaggttgggactgtggaaggcagtacagctcttaaagggttcaaggaatccaacagtacaaagaagaagtctaagaaaaggaagcttacgtctgtcaaaagggcacgagtgtctggtgatgatttttcagtgcccagtaagaactctgagagcacactctttgattcagtagaaggtgatggcgccatgatggaagaaggtgtgaaatctaggccccgacaaaagaaaacccaggcctgtttggcaagcaagcacgtgcaagaggcgccaaggttagaacctgcaaatgaagaacacaatgtggaaacagctgaagattccgaaataagatacttatctgcagattcaggagatgccgatgattcagatgcggatttgggttctgccgtgaaacagcttcaggagttcattcctaacatcaaggacagggccaccagcacaatcaagcggatgtaccgggacgacttggaacggtttaaggaatttaaagcacaaggtgtcgctattaaatttggcaagttttctgtaaaggaaaataagcagttagagaaaaatgtggaagactttctagccctgacaggcattgagagtgcagacaagctgctgtacacggacagatatcctgaggaaaaatctgtgatcaccaacttaaaaaggagatactcgtttagattacacattggtaggaacattgcccggccctggaaacttatatactatcgagcaaagaagatgttcgatgtcaacaattacaaaggcaggtatagcgaaggagatactgagaagttaaagatgtaccattctctccttgggaatgactggaagacgattggtgagatggtggcccgaagtagcctctccgtggccctcaagttctcacagatcagcagtcaaagaaatcgtggtgcttggagtaagtctgaaacccggaaactaatcaaggctgtcgaagaagtgattctgaagaagatgtctccccaggagttaaaagaggtggattccaaactccaagaaaatcctgaaagttgcctatcaattgttcgggaaaaactctacaagggcatatcttgggtagaagtagaagctaaagtgcaaaccagaaattggatgcagtgtaaaagtaagtggacagaaattctaaccaagaggatgactaatggtcggcgtatctactatggcatgaatgccctgcgggccaaggtcagccttattgaaaggttgtatgaaataaatgtggaagatactaatgaaatagactgggaagatcttgctagtgccataggtgatgttcctccatcttacgttcaaactaaattttctaggctgaaagctgtctatgttccattttggcagaaaaagacttttccagagatcatcgactacctttatgagacgactctacctttgctgaaggaaaagttagaaaaaatgatggagaaaaaaggcactaaaatccagactcctgcagcacccaagcaagttttcccatttcgagacatcttttattatgaagacgatagtgaaggagaggacatagaaaaagaaagcgaaggccaggcgccatgcatggctcacgcctgtaattccagtactttgggaggccaaggccggtggatcatctagtaatgaactagtccgtaacttgaaagtatttcgatttcttggctttatatatcttgtggaaaggacgaggtgatacttacacacatcgggtt

SEQ ID NO: 1400 - DNA, 1274 bp, Homo sapiens
  source 1..1274: mol_type = genomic DNA
accgccaccatgtaccgggacgacttggaacggtttaaggaatttaaagcacaaggtgtcgctattaaatttggcaagttttctgtaaaggaaaataagcagttagagaaaaatgtggaagactttctagccctgacaggcattgagagtgcagacaagctgctgtacacggacagatatcctgaggaaaaatctgtgatcaccaacttaaaaaggagatactcgtttagattacacattggtaggaacattgcccggccctggaaacttatatactatcgagcaaagaagatgttcgatgtcaacaattacaaaggcaggtatagcgaaggagatactgagaagttaaagatgtaccattctctccttgggaatgactggaagacgattggtgagatggtggcccgaagtagcctctccgtggccctcaagttctcacagatcagcagtcaaagaaatcgtggtgcttggagtaagtctgaaacccggaaactaatcaaggctgtcgaagaagtgattctgaagaagatgtctccccaggagttaaaagaggtggattccaaactccaagaaaatcctgaaagttgcctatcaattgttcgggaaaaactctacaagggcatatcttgggtagaagtagaagctaaagtgcaaaccagaaattggatgcagtgtaaaagtaagtggacagaaattctaaccaagaggatgactaatggtcggcgtatctactatggcatgaatgccctgcgggccaaggtcagccttattgaaaggttgtatgaaataaatgtggaagatactaatgaaatagactgggaagatcttgctagtgccataggtgatgttcctccatcttacgttcaaactaaattttctaggctgaaagctgtctatgttccattttggcagaaaaagacttttccagagatcatcgactacctttatgagacgactctacctttgctgaaggaaaagttagaaaaaatgatggagaaaaaaggcactaaaatccagactcctgcagcacccaagcaagttttcccatttcgagacatcttttattatgaagacgatagtgaaggagaggacatagaaaaagaaagcgaaggccaggcgccatgcatggctcacgcctgtaattccagtactttgggaggccaaggccggtggatcatctagtaatgaactagtccgtaacttgaaagtatttcgatttcttggctttatatatcttgtggaaaggacgaatgatcagatcttcccttccgggt

SEQ ID NO: 1401 - DNA, 1322 bp, Homo sapiens
  source 1..1322: mol_type = genomic DNA
accgccaccatgggcaaagtgtggaaacagcagatgtaccctcagtacgccacctactattacccccagtatctgcaagccaagcagtctctggtcccagcccaccccatggcccctcccagtcccagcaccaccagcagtaataacaacagtagcagcagtagcaactcaggatgggatcagctcagcaaaacgaacctctatatccgaggactgcctccccacaccaccgaccaggacctggtgaagctctgtcaaccatatgggaaaatagtctccacaaaggcaattttggataagacaacgaacaaatgcaaaggttatggttttgtcgactttgacagccctgcagcagctcaaaaagctgtgtctgccctgaaggccagtggggttcaagctcaaatggcaaagcaacaggaacaagatcctaccaacctctacatttctaatttgccactctccatggatgagcaagaactagaaaatatgctcaaaccatttggacaagttatttctacaaggatactacgtgattccagtggtacaagtcgtggtgttggctttgctaggatggaatcaacagaaaaatgtgaagctgttattggtcattttaatggaaaatttattaagacaccaccaggagtttctgcccccacagaacctttattgtgtaagtttgctgatggaggacagaaaaagagacagaacccaaacaaatacatccctaatggaagaccatggcatagagaaggagaggtgagacttgctggaatgacacttacttacgacccaactacagctgctatacagaacggattttatccttcaccatacagtattgctacaaaccgaatgatcactcaaacttctattacaccctatattgcatctcctgtatctgcctaccaggtgcaaagtccttcgtggatgcaacctcaaccatatattctacagcaccctggtgccgtgttaactccctcaatggagcacaccatgtcactacagcccgcatcaatgatcagccctctggcccagcagatgagtcatctgtcactaggcagcaccggaacatacatgcctgcaacgtcagctatgcaaggagcctacttgccacagtatgcacatatgcagacgacagcggttcctgttgaggaggcaagtggtcaacagcaggtggctgtcgagacgtctaatgaccattctccatatacctttcaacctaataagtagtaatgaactagtccgtaacttgaaagtatttcgatttcttggctttatatatcttgtggaaaggacgactccacgctgttgcgatgttggac

SEQ ID NO: 1402 - DNA, 1007 bp, Homo sapiens
  source 1..1007: mol_type = genomic DNA
accgccaccatgtacacacgtcggtactcaagcataagcagtactataatggatgtagacagcacaatttccagtgggcgttcaactccagcaatgatgaatggacaaggaagcactacttcttcaagcaaaaatattgcctataattgttgttgggaccagtgccaggcttgcttcaactctagcccagatctggcagatcacatccgttccatacatgtagatggtcagcgaggaggggtatttgtttgcttatggaaaggttgtaaagtatataacactccatctaccagtcaaagttggttacaaaggcatatgctgacacacagtggagacaaacctttcaagtgtgttgttggtggctgcaatgccagctttgcttctcagggagggctagctcgtcatgtacccacacacttcagtcagcagaactcctcaaaagtttctagccagccaaaggccaaagaagaatctccttctaaagctggaatgaacaaaaggaggaaattaaagaacaaaagacgacgctcattaccacggccacatgatttcttcgatgcacaaacactggatgcgataagacatcgagccatatgctttaacctctcagctcatatagaaagtttagggaagggacacagtgttgtttttcatagtactgtaatagctaagagaaaagaagattctgggaagatcaaacttttgcttcattggatgcctgaagacattctgcctgatgtgtgggtgaatgaaagtgaacgacatcagttaaaaactaaagtagttcatttatcaaagctacccaaagatactgccttgcttttggacccaaacatatacagaacaatgccgcagaagaggttgaagagaactctgataagaaaagtgttcaatttgtatttaagcaaacagtagtaatgaactagtccgtaacttgaaagtatttcgatttcttggctttatatatcttgtggaaaggacgaggccagccctgaacgaccacatac

SEQ ID NO: 1403 - DNA, 1613 bp, Homo sapiens
  source 1..1613: mol_type = genomic DNA
accgccaccatggccgccgctatcaccgacatggccgacctggaggagctctcccgcctgagccctctgccccccggcagcccgggttcggcggcgcggggccgggctgagccccccgaggaggaggaggaagaggaggaggaggaagaggaggcggaggccgaggcggtggcggcgctgctgctgaacggcggcagcggtgggggcggcggaggcggcggcggaggagtggggggcggcgaggcagagacgatgtcggagccgagccccgagagcgccagccaggccggggaggacgaagacgaggaggaggacgacgaggaggaggaagatgagagcagcagcagcggcgggggtgaggaggagagtagcgccgagagcctggtgggcagcagcggcgggagcagcagcgacgagacccgctcgttgagccccggcgccgccagcagcagcagcggggatggggacggcaaggagggcctggaggagcccaagggaccgcggggcagccagggcggcggcgggggcggcagcagtagcagcagcgtagtctccagcggcggcgacgagggctacgggactgggggaggcggaagcagcgcgacctccgggggccggcggggcagcttggagatgtcgtcggatggggaacccctgagccgcatggactcggaggacagcataagcagtactataatggatgtagacagcacaatttccagtgggcgttcaactccagcaatgatgaatggacaaggaagcactacttcttcaagcaaaaatattgcctataattgttgttgggaccagtgccaggcttgcttcaactctagcccagatctggcagatcacatccgttccatacatgtagatggtcagcgaggaggggtatttgtttgcttatggaaaggttgtaaagtatataacactccatctaccagtcaaagttggttacaaaggcatatgctgacacacagtggagacaaacctttcaagtgtgttgttggtggctgcaatgccagctttgcttctcagggagggctagctcgtcatgtacccacacacttcagtcagcagaactcctcaaaagtttctagccagccaaaggccaaagaagaatctccttctaaagctggaatgaacaaaaggaggaaattaaagaacaaaagacgacgctcattaccacggccacatgatttcttcgatgcacaaacactggatgcgataagacatcgagccatatgctttaacctctcagctcatatagaaagtttagggaagggacacagtgttgtttttcatagtactgtaatagctaagagaaaagaagattctgggaagatcaaacttttgcttcattggatgcctgaagacattctgcctgatgtgtgggtgaatgaaagtgaacgacatcagttaaaaactaaagtagttcatttatcaaagctacccaaagatactgccttgcttttggacccaaacatatacagaacaatgccgcagaagaggttgaagaggtagtaatgaactagtccgtaacttgaaagtatttcgatttcttggctttatatatcttgtggaaaggacgaaaatcggtgaactgcagagcgttg

SEQ ID NO: 1404 - DNA, 1655 bp, Homo sapiens
  source 1..1655: mol_type = genomic DNA
accgccaccatggccgccgctatcaccgacatggccgacctggaggagctctcccgcctgagccctctgccccccggcagcccgggttcggcggcgcggggccgggctgagccccccgaggaggaggaggaagaggaggaggaggaagaggaggcggaggccgaggcggtggcggcgctgctgctgaacggcggcagcggtgggggcggcggaggcggcggcggaggagtggggggcggcgaggcagagacgatgtcggagccgagccccgagagcgccagccaggccggggaggacgaagacgaggaggaggacgacgaggaggaggaagatgagagcagcagcagcggcgggggtgaggaggagagtagcgccgagagcctggtgggcagcagcggcgggagcagcagcgacgagacccgctcgttgagccccggcgccgccagcagcagcagcggggatggggacggcaaggagggcctggaggagcccaagggaccgcggggcagccagggcggcggcgggggcggcagcagtagcagcagcgtagtctccagcggcggcgacgagggctacgggactgggggaggcggaagcagcgcgacctccgggggccggcggggcagcttggagatgtcgtcggatggggaacccctgagccgcatggactcggaggacagcataagcagtactataatggatgtagacagcacaatttccagtgggcgttcaactccagcaatgatgaatggacaaggaagcactacttcttcaagcaaaaatattgcctataattgttgttgggaccagtgccaggcttgcttcaactctagcccagatctggcagatcacatccgttccatacatgtagatggtcagcgaggaggggtatttgtttgcttatggaaaggttgtaaagtatataacactccatctaccagtcaaagttggttacaaaggcatatgctgacacacagtggagacaaacctttcaagtgtgttgttggtggctgcaatgccagctttgcttctcagggagggctagctcgtcatgtacccacacacttcagtcagcagaactcctcaaaagtttctagccagccaaaggccaaagaagaatctccttctaaagctggaatgaacaaaaggaggaaattaaagaacaaaagacgacgctcattaccacggccacatgatttcttcgatgcacaaacactggatgcgataagacatcgagccatatgctttaacctctcagctcatatagaaagtttagggaagggacacagtgttgtttttcatagtactgtaatagctaagagaaaagaagattctgggaagatcaaacttttgcttcattggatgcctgaagacattctgcctgatgtgtgggtgaatgaaagtgaacgacatcagttaaaaactaaagtagttcatttatcaaagctacccaaagatactgccttgcttttggacccaaacatatacagaacaatgccgcagaagaggttgaagagaactctgataagaaaagtgttcaatttgtatttaagcaaacagtagtaatgaactagtccgtaacttgaaagtatttcgatttcttggctttatatatcttgtggaaaggacgacgtttccgatccgaatggcggcta

SEQ ID NO: 1405 - DNA, 1955 bp, Homo sapiens
  source 1..1955: mol_type = genomic DNA
accgccaccatggctcttcctcagggtctattgacattcagggatgtggccatagaattctctcaggaggagtggaaatgcctggaccctgctcagaggactctatacagggacgtgatgctggagaattataggaacctggtctccctggatatctcttccaaatgcatgatgaaggagttctcatcaacagcacaaggcaatagagaagtgatccacacagggacattgcaaagacatgaaagtcatcacactggagactttcgctttcaggaaattgataaagatattcataacttagagtttcagtggcaagaagatgaaagaaatagccatgaagcacccatgacagaaatcaaaaagttgactggtagtgcagaccgatatgatcaaaggcatgctggaaacaagcctattaaagatcagcttggatcaagctttcattcgcatctgcctgaactccacatgtttcagacccaagggaaaattggtaatcaagtggagaagtctatcaacgatgcttcctcaatttcaacatcccaaagaatttcttgtaggcccaaaacccatatttctaataactatgggaataatttccggaattcttcgttactcacacaaaaacaggaggtacacatgagagaaaagtctttccaatgtaatgagagtggcaaagcctttaattatagctcactcttaaggaaacatcaaataatccatttaggagagaaacaatataaatgtgatgtatgtggcaaggtctttaatcggaagcgaaacctagtgtgccatcgtagatgtcacactggggagaaaccttacaggtgtaatgagtgtggcaagactttcagtcagacgtattcccttacatgccatcgtagacttcatactggagagaaaccttacaaatgtgaagaatgtgacaaagctttcagtttcaaatcaaaccttaaaagacataggagaattcatgctggagaaaaaccatacaagtgtaatgaatgtggcaagacctttagtcagacgtcatcccttacatgccatcgtagacttcatactggagagaaacctttcaagtgtaatgagtgtggcaagacctttagtcggaagtcatcccttacatgccatcatagacttcatacgggagagaaaccttataagtgtaatgaatgtggcaagaccttcagtcaggagttaacccttaaatgccatcgtagacttcataccggagagaagccttacaagtgtaatgaatgtggcaaggtttttaataaaaaggcaaaccttgcacgtcatcatagacttcatagtggagagaaaccctacaagtgtactgagtgtgtcaagacgttcagtcgaaattcagcccttgtaattcataaggctattcatattggagagaaacgttacaagtgtaatgagtgtggcaagacgttcagtcgaatttcagccctcgtaattcatacggcaattcatactggagagaaaccttacaagtgtaatgaatgtggcaagggttttaatcggaaaacacaccttgcatgtcatcatagacttcatactggagagaaaccttacaagtgtaatgaatgtggcaaggtttttaatcgaaaaacacaccttgcacatcatcatagacttcatactggagataaaccttacaagtgtaatgaatgtggcaaggtttttaatcaaaaagcacaccttgcacgtcaccatagacttcatactggagagaaaccttacaagtgtaatgaatgtggcaaggtttttaatcaaaaagcaaaccttgcacgtcatcatagacttcatactggagagaaaccttacaagtttaatgagtgtggcaaagcttttaattagtaatgaactagtccgtaacttgaaagtatttcgatttcttggctttatatatcttgtggaaaggacgatttcatattactaggatcatgact

SEQ ID NO: 1406 - DNA, 4877 bp, Homo sapiens
  source 1..4877: mol_type = genomic DNA
accgccaccatgaagttatatgtatttctggttaacactggaactactctaacatttgacactgaacttacagtgcaaactgtggcagaccttaagcatgccattcaaagcaaatacaagattgctattcaacaccaggtgctggtggtcaatggaggagaatgcatggctgcagatcgaagagtgtgtacctacagtgctgggacggatacaaatccaatttttctttttaacaaagaaatgatcttatgtgatcgtccacctgctattcctaaaactaccttttcgacagaaaatgacatggaaataaaagttgaagaatctcttatgatgcctgcagtttttcatactgttgcttcaaggacacagcttgcattggaaatgtatgaagttgccaagaaactttgttctttttgtgaaggtcttgtacatgatgaacatcttcaacaccaaggctgggctgcaatcatggccaacctggaggactgttcaaattcataccaaaagctacttttcaagtttgaaagtatttattcaaattatctgcagtccatagaagacatcaagttaaaacttactcatttaggaactgcagtttcagtaatggccaagattccactgttggagtgcctaaccagacatagttacagagaatgtttgggaagactggattctttacctgaacatgaagactcagaaaaagctgagatgaaaagatccactgaactggtgctctctcctgatatgcctagaacaactaacgaatctttgttaacctcatttcccaagtcagtggaacatgtgtccccagataccgcagatgctgaaagtggcaaagaaattagggaatcttgtcaaagtactgttcatcagcaagatgaaactacgattgacactaaagatggtgatctgcccttttttaatgtctctttgttagactggataaatgttcaagatagacctaatgatgtggaatctttggtcaggaagtgctttgattctatgagcaggcttgatccaaggattattcgaccatttatagcagaatgccgtcaaactattgccaaacttgataatcagaatatgaaagccattaaaggacttgaagatcggctctacgccctggaccagatgattgctagctgtggccgactggtgaatgaacagaaagagcttgctcagggatttttagctaatcagaagagagctgaaaacttaaaggatgcatctgtattacctgatttatgcctgagtcacgcaaatcagttgatgattatgttgcaaaatcatagaaaactgttagatattaagcagaagtgtaccactgccaaacaagaactagcaaataacctacatgtcagactgaagtggtgttgctttgtaatgcttcatgctgatcaagatggagagaagttacaagctttgctccgcctcgtaatagagctgttagaaagagtcaaaattgttgaagctcttagtacagttcctcagatgtactgcttagctgttgttgaggttgtaagaagaaaaatgttcataaaacactacagggagtgggctggtgctttagtcaaagatggaaagagattatatgaagcagaaaaatcaaaaagggaatcctttgggaaattatttaggaagtcttttttaagaaatcgtctgtttaggggactggactcctggcccccttccttttgtactcaaaagcctcgaaagtttgactgtgaacttccagatatttcattaaaagatttacagtttctgcaatcattttgtccttcggaagttcagccattcctcagggttcccttactttgtgactttgaacctctacaccagcatgtacttgctctacataatttggtaaaagcagcacaaagtttggatgaaatgtcacagaccattacagatctactgagtgaacaaaaggcatctgtgagtcagacatccccacagtctgcttcttcaccaaggatggaaagtacagcaggaattacaactactacctcaccgagaactcctccaccactgactgttcaggatcccttatgtcctgcagtttgtcccttagaagaattatctccagatagtattgatgcacatacgtttgattttgaaactattccccatccaaacatagaacagactattcaccaagtttctttagacttggattcattagcagaaagtcctgaatcagattttatgtctgctgtgaatgagtttgtaatagaagaaaatttgtcgtctcctaatcctataagtgatccacaaagcccagaaatgatggtggaatcactttattcatcagttatcaatgcgatagacagtagacgaatgcaggatacaaatgtatgtggtaaggaggattttggagatcatacttctctgaatgtccagttggaaagatgtagagttgttgcccaagactctcacttcagtatacaaaccattaaggaagacctttgccactttagaacatttgtacaaaaagaacagtgtgacttctcaaattcattaaaatgtacagcagtagaaataagaaacattattgaaaaagtaaaatgttctctggaaataacactaaaagaaaaacatcaaaaagaactactgtctttaaaaaatgaatatgaaggtaaacttgacggactaataaaggaaactgaagagaatgaaaacaaaattaaaaaattgaagggagagttagtatgccttgaggaggttttacaaaataaagataatgaatttgctttggttaaacatgaaaaagaagctgtaatctgcctgcagaatgaaaaggatcagaagttgttagagatggaaaatataatgcactctcaaaattgtgaaattaaagaactgaagcagtcacgagaaatagtgttagaagacttaaaaaagctccatgttgaaaatgatgagaagttacagttattgagggcagaacttcagtccttggagcaaagtcatctaaaggaattagaggacacacttcaggttaggcacatacaagagtttgagaaggttatgacagaccacagagtttctttggaggaattaaaaaaggaaaaccaacaaataattaatcaaatacaagaatctcatgctgaaattatccaggaaaaagaaaaacagttacaggaattaaaactcaaggtttctgatttgtcagacacgagatgcaagttagaggttgaacttgcgttgaaggaagcagaaactgatgaaataaaaattttgctggaagaaagcagagcccagcagaaggagaccttgaaatctcttcttgaacaagagacagaaaatttgagaacagaaattagtaaactcaaccaaaagattcaggataataatgaaaattatcaggtgggcttagcagagctaagaactttaatgacaattgaaaaagatcagtgtatttccgagttaattagtagacatgaagaagaatctaatatacttaaagctgaattaaacaaagtaacatctttgcataaccaagcatttgaaatagaaaaaaacctaaaagaacaaataattgaactgcagagtaaattggattcagaattgagtgctcttgaaagacaaaaagatgaaaaaattacccaacaagaagagaaatacgaagctattatccagaaccttgagaaagacagacaaaaattggtcagcagccaggagcaagacagagaacagttaattcagaagcttaattgtgaaaaagatgaagctattcagactgccctaaaagaatttaaattggagagagaagttgttgagaaagagttattagaaaaagttaaacatcttgagaatcaaatagcaaaaagtcctgccattgactctaccagaggagattcttcaagcttagttgctgaacttcaagaaaagcttcaggaagaaaaagctaagtttctagaacaacttgaagagcaagaaaaaagaaagaatgaagaaatgcaaaatgttcgaacatctttgattgcggaacaacagaccaattttaacactgttttaacaagagagaaaatgagaaaagaaaacataataaatgatcttagtgataagttgaaaagtacaatgcagcaacaagaacgggataaagatttgatagagtcactttctgaagatcgagctcgtttgcttgaggaaaagaaaaagcttgaagaagaagtcagtaagttgcgtagtagcagttttgttccttcaccatatgtagctacagccccagaactttatggagcttgtgcacctgaactcccaggtgaatcagatagatccgctgtggaaacagcagatgaaggaagagtggattcagcaatggagacaagcatgatgtctgtacaagaaaatattcatatgttgtctgaagaaaaacagcggataatgctgttagaacgaacattgcaattgaaagaagaagaaaataaacggttaaatcaaagactgatgtctcagagcatgtcttcagtatcttcaaggcattctgaaaagatagctattagagattttcaggtgggagatttggtactcatcatcctagacgaacgccatgacaattatgtgttatttactgttagtcctactttatattttctacattcagagtctctacctgccctggatctcaaaccagcttcaggtgcatctagaagaccctgggtacttggaaaagtaatggaaaaagaatactgtcaagccaaaaaggcacaaaacagatttaaagttcctttggggacaaagttttacagagtgaaagccgtatcatggaataagaaagtatagtaatgaactagtccgtaacttgaaagtatttcgatttcttggctttatatatcttgtggaaaggacgaatacttcgagaggaaattcttggg

SEQ ID NO: 1407 - DNA, 4886 bp, Homo sapiens
  source 1..4886: mol_type = genomic DNA
accgccaccatgaagttatatgtatttctggttaacactggaactactctaacatttgacactgaacttacagtgcaaactgtggcagaccttaagcatgccattcaaagcaaatacaagattgctattcaacaccaggtgctggtggtcaatggaggagaatgcatggctgcagatcgaagagtgtgtacctacagtgctgggacggatacaaatccaatttttctttttaacaaagaaatgatcttatgtgatcgtccacctgctattcctaaaactaccttttcgacagaaaatgacatggaaataaaagttgaagaatctcttatgatgcctgcagtttttcatactgttgcttcaaggacacagcttgcattggaaatgtatgaagttgccaagaaactttgttctttttgtgaaggtcttgtacatgatgaacatcttcaacaccaaggctgggctgcaatcatggccaacctggaggactgttcaaattcataccaaaagctacttttcaagtttgaaagtatttattcaaattatctgcagtccatagaagacatcaagttaaaacttactcatttaggaactgcagtttcagtaatggccaagattccactgttggagtgcctaaccagacatagttacagagaatgtttgggaagactggattctttacctgaacatgaagactcagaaaaagctgagatgaaaagatccactgaactggtgctctctcctgatatgcctagaacaactaacgaatctttgttaacctcatttcccaagtcagtggaacatgtgtccccagataccgcagatgctgaaagtggcaaagaaattagggaatcttgtcaaagtactgttcatcagcaagatgaaactacgattgacactaaagatggtgatctgcccttttttaatgtctctttgttagactggataaatgttcaagatagacctaatgatgtggaatctttggtcaggaagtgctttgattctatgagcaggcttgatccaaggattattcgaccatttatagcagaatgccgtcaaactattgccaaacttgataatcagaatatgaaagccattaaaggacttgaagatcggctctacgccctggaccagatgattgctagctgtggccgactggtgaatgaacagaaagagcttgctcagggatttttagctaatcagaagagagctgaaaacttaaaggatgcatctgtattacctgatttatgcctgagtcacgcaaatcagttgatgattatgttgcaaaatcatagaaaactgttagatattaagcagaagtgtaccactgccaaacaagaactagcaaataacctacatgtcagactgaagtggtgttgctttgtaatgcttcatgctgatcaagatggagagaagttacaagctttgctccgcctcgtaatagagctgttagaaagagtcaaaattgttgaagctcttagtacagttcctcagatgtactgcttagctgttgttgaggttgtaagaagaaaaatgttcataaaacactacagggagtgggctggtgctttagtcaaagatggaaagagattatatgaagcagaaaaatcaaaaagggaatcctttgggaaattatttaggaagtcttttttaagaaatcgtctgtttaggggactggactcctggcccccttccttttgtactcaaaagcctcgaaagtttgactgtgaacttccagatatttcattaaaagatttacagtttctgcaatcattttgtccttcggaagttcagccattcctcagggttcccttactttgtgactttgaacctctacaccagcatgtacttgctctacataatttggtaaaagcagcacaaagtttggatgaaatgtcacagaccattacagatctactgagtgaacaaaaggcatctgtgagtcagacatccccacagtctgcttcttcaccaaggatggaaagtacagcaggaattacaactactacctcaccgagaactcctccaccactgactgttcaggatcccttatgtcctgcagtttgtcccttagaagaattatctccagatagtattgatgcacatacgtttgattttgaaactattccccatccaaacatagaacagactattcaccaagtttctttagacttggattcattagcagaaagtcctgaatcagattttatgtctgctgtgaatgagtttgtaatagaagaaaatttgtcgtctcctaatcctataagtgatccacaaagcccagaaatgatggtggaatcactttattcatcagttatcaatgcgatagacagtagacgaatgcaggatacaaatgtatgtggtaaggaggattttggagatcatacttctctgaatgtccagttggaaagatgtagagttgttgcccaagactctcacttcagtatacaaaccattaaggaagacctttgccactttagaacatttgtacaaaaagaacagtgtgacttctcaaattcattaaaatgtacagcagtagaaataagaaacattattgaaaaagtaaaatgttctctggaaataacactaaaagaaaaacatcaaaaagaactactgtctttaaaaaatgaatatgaaggtaaacttgacggactaataaaggaaactgaagagaatgaaaacaaaattaaaaaattgaagggagagttagtatgccttgaggaggttttacaaaataaagataatgaatttgctttggttaaacatgaaaaagaagctgtaatctgcctgcagaatgaaaaggatcagaagttgttagagatggaaaatataatgcactctcaaaattgtgaaattaaagaactgaagcagtcacgagaaatagtgttagaagacttaaaaaagctccatgttgaaaatgatgagaagttacagttattgagggcagaacttcagtccttggagcaaagtcatctaaaggaattagaggacacacttcaggttaggcacatacaagagtttgagaaggttatgacagaccacagagtttctttggaggaattaaaaaaggaaaaccaacaaataattaatcaaatacaagaatctcatgctgaaattatccaggaaaaagaaaaacagttacaggaattaaaactcaaggtttctgatttgtcagacacgagatgcaagttagaggttgaacttgcgttgaaggaagcagaaactgatgaaataaaaattttgctggaagaaagcagagcccagcagaaggagaccttgaaatctcttcttgaacaagagacagaaaatttgagaacagaaattagtaaactcaaccaaaagattcaggataataatgaaaattatcaggtgggcttagcagagctaagaactttaatgacaattgaaaaagatcagtgtatttccgagttaattagtagacatgaagaagaatctaatatacttaaagctgaattaaacaaagtaacatctttgcataaccaagcatttgaaatagaaaaaaacctaaaagaacaaataattgaactgcagagtaaattggattcagaattgagtgctcttgaaagacaaaaagatgaaaaaattacccaacaagaagagaaatacgaagctattatccagaaccttgagaaagacagacaaaaattggtcagcagccaggagcaagacagagaacagttaattcagaagcttaattgtgaaaaagatgaagctattcagactgccctaaaagaatttaaattggagagagaagttgttgagaaagagttattagaaaaagttaaacatcttgagaatcaaatagcaaaaagtcctgccattgactctaccagaggagattcttcaagcttagttgctgaacttcaagaaaagcttcaggaagaaaaagctaagtttctagaacaacttgaagagcaagaaaaaagaaagaatgaagaaatgcaaaatgttcgaacatctttgattgcggaacaacagaccaattttaacactgttttaacaagagagaaaatgagaaaagaaaacataataaatgatcttagtgataagttgaaaagtacaatgcagcaacaagaacgggataaagatttgatagagtcactttctgaagatcgagctcgtttgcttgaggaaaagaaaaagcttgaagaagaagtcagtaagttgcgtagtagcagttttgttccttcaccatatgtagctacagccccagaactttatggagcttgtgcacctgaactcccaggtgaatcagatagatccgctgtggaaacagcagatgaaggaagagtggattcagcaatggagacaagcatgatgtctgtacaagaaaatattcatatgttgtctgaagaaaaacagcggataatgctgttagaacgaacattgcaattgaaagaagaagaaaataaacggttaaatcaaagactgatgtctcagagcatgtcttcagtatcttcaaggcattctgaaaagatagctattagagattttcaggtgggagatttggtactcatcatcctagacgaacgccatgacaattatgtgttatttactgttagtcctactttatattttctacattcagagtctctacctgccctggatctcaaaccaggtgagggtgcttcaggtgcatctagaagaccctgggtacttggaaaagtaatggaaaaagaatactgtcaagccaaaaaggcacaaaacagatttaaagttcctttggggacaaagttttacagagtgaaagccgtatcatggaataagaaagtatagtaatgaactagtccgtaacttgaaagtatttcgatttcttggctttatatatcttgtggaaaggacgaaaagaagcggagggatggtaagtt

SEQ ID NO: 1408 - DNA, 1160 bp, Homo sapiens
  source 1..1160: mol_type = genomic DNA
accgccaccatgaacaccatcgtcttcaacaagctcagcggtgcggtgctgtttgaggacggaggcgcctcggagcgggagcggggtggccggccctacagcggtgtcctggacagtcctcacgcccgccccgaggtgggcattcccgacggcccgcccctcaaggacaacctcggcctgagacaccggaggaccggcgcccggcagaatggcgggaaggtgaggcacaagcggcaggccctgcaagacatggcgcgacccctcaagcagtggctttacaagcaccgtgacaacccgtaccccaccaagaccgagaagatactcttggccctcggctcgcagatgacgctagtgcaggtgtcaaattggtttgctaatgcaagacgtcggcttaagaataccgttcgacagccagatttaagctgggctttgagaataaagttatacaacaagtatgttcaaggcaatgctgaacggcttagcgtaagcagtgatgactcatgttctgaagatggagaaaatcctccaagaacccacatgaacgaagggggctataataccccagttcaccatcctgtgattaaaagtgagaattcggtcatcaaagcgggagtgaggccagagtcacgggccagtgaggactacgtggcaccccccaaatacaagagcagcttgttgaaccgttaccttaatgactctttgagacatgtcatggccacgaacactaccatgatgggaaaaacaaggcaaagaaaccactcgggatcttttagctccaatgaatttgaggaagaattagtgtctccatcgtcatcagaaactgaaggcaactttgtctatcgcacagacactctggaaaacggatccaataagggtgaaagcgcagctaacagaaaaggaccaagcaaggatgacacgtattggaaggagatcaacgcagctatggccttaacaaatcttgcacagggaaaggacaaactgcagggaactaccagctgcatcatccagaagtcgtcccatatagcagaagtaaagactgtcaaagtgccgctggtgcagcagttttagtaatgaactagtccgtaacttgaaagtatttcgatttcttggctttatatatcttgtggaaaggacgaggtatgactgaggtgaggctaccc

SEQ ID NO: 1409 - DNA, 968 bp, Homo sapiens
  source 1..968: mol_type = genomic DNA
accgccaccatggcagccgccgcctatgtggaccacttcgccgccgagtgcctcgtgtccatgtcgagccgcgcggtcgtgcacgggccgcgggaggggccggagtcccggcccgagggcgcggccgtggccgccacccccacgctgccccgcgtcgaggagcgccgcgacggtaaggacagcgcctcgctcttcgtggtggcgcggatcctagcggacctcaaccagcaagcgccggcgcccgccccggcggagcgcagggagggcgccgcggcccggaaggcgaggaccccctgccgcctgccgccgcccgcccccgagcccacctcccccggcgccgaaggcgcggcggccgcgccccccagcccggcgtggagcgagccggagcccgaggcggggctggagcccgagcgggagccggggcccgcggggagcggcgagcccggcctcagacaaagggtccggcggggccgaagtcgcgccgacctcgagtccccgcagaggaagcacaagtgccactacgcgggctgcgagaaagtttacgggaaatcttcgcacctcaaggcgcacctgagaactcacacaggtgagaggcccttcgcctgcagctggcaggactgcaacaagaagttcgcgcgctccgacgagctggcgcggcactaccgcacacacacgggcgagaagaagttcagctgccccatctgcgagaagcgcttcatgcgcagcgaccacctgaccaagcacgcgcgccgccacgccaacttccacccgggaatgctgcagcggcgcggcgggggctcgcggaccggctccctcagcgactacagccgctccgacgccagcagccccaccatcagcccggccagctcgccctagtaatgaactagtccgtaacttgaaagtatttcgatttcttggctttatatatcttgtggaaaggacgaaacccgcgatgacctgcccgagcg

SEQ ID NO: 1410 - DNA, 1589 bp, Homo sapiens
  source 1..1589: mol_type = genomic DNA
accgccaccatggacatatgtgagtccatcctggagaggaagcggcatgacagcgaaaggtctacttgcagcatcttggagcagacagacatggaagctgtcgaggctcttgtttgtatgagctcctggggtcaaagatcccagaaaggtgacctgttgcggataagacccctcacgcctgtctctgactctggggatgtcaccaccactgtgcatatggatgcagccacacctgaactaccaaaagacttccattctttatcgactctgtgcataactcctcctcagagccctgatctcgtggagccatcgacaaggacacctgtttctccccaagtaacagattccaaagcatgtacagccacggatgttctccagtcctctgccgtagtggccagagctctgagcgggggcgcggagaggggcttgctgggtttggagccagtgcccagctctccctgcagggccaaggggactagcgtgatccgacacactggggagagccctgctgcctgctttcccaccatccagactccagattgccggctttctgacagcagagaaggagaagagcagcttctgggacactttgaaactttgcaggacacacacctcacggacagtttactcagcactaacttggtgtcctgtcagccctgcttgcacaagtctggtggcctgctgctcactgacaaaggccagcaggcagggtggcctggtgcagttcagacttgctcaccaaagaattatgaaaatgacctgcccaggaaaaccacccctctgatttctgtctctgtccctgctccccctgtcctttgccagatgatccctgtgactggacaaagtagcatgttaccagcttttttgaagccccctccccagttgtctgtggggactgtgagacccatcctagctcaggctgctccagcgcctcaacctgtgttcgtgggacctgctgtgcctcagggagctgtgatgttggtcctgccccagggagccctccctccgcctgccccctgtgcagccaatgtcatggctgccgggaataccaagttgttgccccttgcccctgctccagtgttcatcacctctagccaaaactgtgtccctcaggtagacttttcccgaaggaggaactatgtatgcagcttcccaggttgccggaagacctacttcaaaagttcccaccttaaggcccatcttcgcactcacacaggggagaagcctttcaactgcagctgggatggctgtgataaaaagtttgctcgttcggatgagctgtcacgccaccgcagaactcacacaggggagaagaagtttgtgtgcccggtgtgtgaccgacgtttcatgcgcagtgaccacctgacgaagcatgcccggcgccacatgacgaccaagaagatcccaggctggcaggcagaggttggcaagctgaacagaatcgcctctgcagagagcccggggagcccactggtgagcatgccagcctctgcctagtaatgaactagtccgtaacttgaaagtatttcgatttcttggctttatatatcttgtggaaaggacgatggcggaactgccggatgtaccac

SEQ ID NO: 1411 - DNA, 1640 bp, Homo sapiens
  source 1..1640: mol_type = genomic DNA
accgccaccatgcacacgccggacttcgcaggcccagacgacgcgcgcgcagttgacatcatggacatatgtgagtccatcctggagaggaagcggcatgacagcgaaaggtctacttgcagcatcttggagcagacagacatggaagctgtcgaggctcttgtttgtatgagctcctggggtcaaagatcccagaaaggtgacctgttgcggataagacccctcacgcctgtctctgactctggggatgtcaccaccactgtgcatatggatgcagccacacctgaactaccaaaagacttccattctttatcgactctgtgcataactcctcctcagagccctgatctcgtggagccatcgacaaggacacctgtttctccccaagtaacagattccaaagcatgtacagccacggatgttctccagtcctctgccgtagtggccagagctctgagcgggggcgcggagaggggcttgctgggtttggagccagtgcccagctctccctgcagggccaaggggactagcgtgatccgacacactggggagagccctgctgcctgctttcccaccatccagactccagattgccggctttctgacagcagagaaggagaagagcagcttctgggacactttgaaactttgcaggacacacacctcacggacagtttactcagcactaacttggtgtcctgtcagccctgcttgcacaagtctggtggcctgctgctcactgacaaaggccagcaggcagggtggcctggtgcagttcagacttgctcaccaaagaattatgaaaatgacctgcccaggaaaaccacccctctgatttctgtctctgtccctgctccccctgtcctttgccagatgatccctgtgactggacaaagtagcatgttaccagcttttttgaagccccctccccagttgtctgtggggactgtgagacccatcctagctcaggctgctccagcgcctcaacctgtgttcgtgggacctgctgtgcctcagggagctgtgatgttggtcctgccccagggagccctccctccgcctgccccctgtgcagccaatgtcatggctgccgggaataccaagttgttgccccttgcccctgctccagtgttcatcacctctagccaaaactgtgtccctcaggtagacttttcccgaaggaggaactatgtatgcagcttcccaggttgccggaagacctacttcaaaagttcccaccttaaggcccatcttcgcactcacacaggggagaagcctttcaactgcagctgggatggctgtgataaaaagtttgctcgttcggatgagctgtcacgccaccgcagaactcacacaggggagaagaagtttgtgtgcccggtgtgtgaccgacgtttcatgcgcagtgaccacctgacgaagcatgcccggcgccacatgacgaccaagaagatcccaggctggcaggcagaggttggcaagctgaacagaatcgcctctgcagagagcccggggagcccactggtgagcatgccagcctctgcctagtaatgaactagtccgtaacttgaaagtatttcgatttcttggctttatatatcttgtggaaaggacgactctacatgcccggtcggcgttag

SEQ ID NO: 1412 - DNA, 1544 bp, Homo sapiens
  source 1..1544: mol_type = genomic DNA
accgccaccatgctcaacttcggtgcctctctccagcagactgcggaggaaagaatggaaatgatttctgaaaggccaaaagagagtatgtattcctggaacaaaactgcagagaaaagtgattttgaagctgtagaagcacttatgtcaatgagctgcagttggaagtctgattttaagaaatacgttgaaaacagacctgttacaccagtatctgatttgtcagaggaagagaatctgcttccgggaacacctgattttcatacaatcccagcattttgtttgactccaccttacagtccttctgactttgaaccctctcaagtgtcaaatctgatggcaccagcgccatctactgtacacttcaagtcactctcagatactgccaaacctcacattgccgcacctttcaaagaggaagaaaagagcccagtatctgcccccaaactccccaaagctcaggcaacaagtgtgattcgtcatacagctgatgcccagctatgtaaccaccagacctgcccaatgaaagcagccagcatcctcaactatcagaacaattcttttagaagaagaacccacctaaatgttgaggctgcaagaaagaacataccatgtgccgctgtgtcaccaaacagatccaaatgtgagagaaacacagtggcagatgttgatgagaaagcaagtgctgcactttatgacttttctgtgccttcctcagagacggtcatctgcaggtctcagccagcccctgtgtccccacaacagaagtcagtgttggtctctccacctgcagtatctgcagggggagtgccacctatgccggtcatctgccagatggttccccttcctgccaacaaccctgttgtgacaacagtcgttcccagcactcctcccagccagccaccagccgtttgcccccctgttgtgttcatgggcacacaagtccccaaaggcgctgtcatgtttgtggtaccccagcccgttgtgcagagttcaaagcctccggtggtgagcccgaatggcaccagactctctcccattgcccctgctcctgggttttccccttcagcagcaaaagtcactcctcagattgattcatcaaggataaggagtcacatctgtagccacccaggatgtggcaagacatactttaaaagttcccatctgaaggcccacacgaggacgcacacaggagaaaagcctttcagctgtagctggaaaggttgtgaaaggaggtttgcccgttctgatgaactgtccagacacaggcgaacccacacgggtgagaagaaatttgcgtgccccatgtgtgaccggcggttcatgaggagtgaccatttgaccaagcatgcccggcgccatctatcagccaagaagctaccaaactggcagatggaagtgagcaagctaaatgacattgctctacctccaacccctgctcccacacagtagtaatgaactagtccgtaacttgaaagtatttcgatttcttggctttatatatcttgtggaaaggacgaccatcggtttgctcactactctaa

SEQ ID NO: 1413 - DNA, 1511 bp, Homo sapiens
  source 1..1511: mol_type = genomic DNA
accgccaccatggaggaaagaatggaaatgatttctgaaaggccaaaagagagtatgtattcctggaacaaaactgcagagaaaagtgattttgaagctgtagaagcacttatgtcaatgagctgcagttggaagtctgattttaagaaatacgttgaaaacagacctgttacaccagtatctgatttgtcagaggaagagaatctgcttccgggaacacctgattttcatacaatcccagcattttgtttgactccaccttacagtccttctgactttgaaccctctcaagtgtcaaatctgatggcaccagcgccatctactgtacacttcaagtcactctcagatactgccaaacctcacattgccgcacctttcaaagaggaagaaaagagcccagtatctgcccccaaactccccaaagctcaggcaacaagtgtgattcgtcatacagctgatgcccagctatgtaaccaccagacctgcccaatgaaagcagccagcatcctcaactatcagaacaattcttttagaagaagaacccacctaaatgttgaggctgcaagaaagaacataccatgtgccgctgtgtcaccaaacagatccaaatgtgagagaaacacagtggcagatgttgatgagaaagcaagtgctgcactttatgacttttctgtgccttcctcagagacggtcatctgcaggtctcagccagcccctgtgtccccacaacagaagtcagtgttggtctctccacctgcagtatctgcagggggagtgccacctatgccggtcatctgccagatggttccccttcctgccaacaaccctgttgtgacaacagtcgttcccagcactcctcccagccagccaccagccgtttgcccccctgttgtgttcatgggcacacaagtccccaaaggcgctgtcatgtttgtggtaccccagcccgttgtgcagagttcaaagcctccggtggtgagcccgaatggcaccagactctctcccattgcccctgctcctgggttttccccttcagcagcaaaagtcactcctcagattgattcatcaaggataaggagtcacatctgtagccacccaggatgtggcaagacatactttaaaagttcccatctgaaggcccacacgaggacgcacacaggagaaaagcctttcagctgtagctggaaaggttgtgaaaggaggtttgcccgttctgatgaactgtccagacacaggcgaacccacacgggtgagaagaaatttgcgtgccccatgtgtgaccggcggttcatgaggagtgaccatttgaccaagcatgcccggcgccatctatcagccaagaagctaccaaactggcagatggaagtgagcaagctaaatgacattgctctacctccaacccctgctcccacacagtagtaatgaactagtccgtaacttgaaagtatttcgatttcttggctttatatatcttgtggaaaggacgaccacgtgataacgtcttctaaata

SEQ ID NO: 1414 - DNA, 1271 bp, Homo sapiens
  source 1..1271: mol_type = genomic DNA
accgccaccatgtacggccgaccgcaggctgagatggaacaggaggctggggagctgagccggtggcaggcggcgcaccaggctgcccaggataacgagaactcagcgcccatcttgaacatgtcttcatcttctggaagctctggagtgcacacctcttggaaccaaggcctaccaagcattcagcactttcctcacagcgcagagatgctggggtcccctttggtgtctgttgaggcgccggggcagaatgtgaatgaaggggggccacagttcagtatgccactgcctgagcgtggtatgagctactgcccccaagcgactctcactccttcccggatgatttactgtcagagaatgtctccccctcagcaagagatgacgattttcagtgggccccaactaatgcccgtaggagagcccaatattccaagggtagccaggcccttcggtgggaatctaaggatgccccccaatgggctgccagtctcggcttccactggaatcccaataatgtcccacactgggaaccctccagtgccttaccctggcctctcgacagtaccttctgacgaaacattgttgggcccgactgtgccttccactgaggcccaggcagtgctcccctccatggctcagatgttgcccccgcaagatgcccatgaccttgggatgcccccagctgagtcccagtcattgctggttttaggatctcaggactctcttgtcagtcagccagactctcaagaaggcccatttctaccagagcagcccggacctgctccacagacagtagagaagaactccaggcctcaggaagggactggtagaaggggctcctcagaggcaaggccttactgctgcaactacgagaactgcggaaaagcttataccaaacgctcccacctcgtgagccaccagcgcaagcacacaggtgagaggccatattcttgcaactgggaaagttgttcatggtctttcttccgttctgatgagcttagacgacatatgcgggtacacaccagatatcgaccatataaatgtgatcagtgcagccgggagttcatgaggtctgaccatctcaagcaacaccagaagactcatcggccgggaccctcagacccacaggccaacaacaacaatggagagcaggacagtcctcctgctgctggtccttagtaatgaactagtccgtaacttgaaagtatttcgatttcttggctttatatatcttgtggaaaggacgaaggcaactagcggaagccgcggac

SEQ ID NO: 1415 - DNA, 860 bp, Homo sapiens
  source 1..860: mol_type = genomic DNA
accgccaccatgtcggcggccgtggcgtgcgtggattacttcgccgccgacgtgctcatggccatctcttcgggcgccgtggtgcaccgcgggcggcccggccccgagggcgcgggccccgccgccggcctggatgtgcgcgcggcgcgccgcgaggccgcctcacccgggaccccggggccacccccgccgccccccgccgcttctggcccgggccccggcgccgccgcggcgccccacctgctggccgccagcatcctggccgacctgcgcggcggacccggagccgccccggggggcgcctcgcccgcctcctcctcctcagccgcctcgtccccgtcctcgggccgcgcccccggcgccgcgccctccgccgccgccaagagccaccgctgtcccttcccggactgcgccaaagcctactacaagtcctcgcacctaaagtcgcacctgcggacgcacacaggggaacgcccttttgcttgtgactggcagggctgcgacaagaagttcgcccgctccgacgagctggcccgccaccaccggacgcacacgggcgagaagcgcttctcctgccctctgtgctccaagcgcttcacccgcagtgaccacctggccaagcacgcccgccgccaccccggcttccacccggacctgctccggcgccctggtgcccgcagtacctcccccagcgactcgctgccctgcagcctggccgggagccctgcgcccagccccgcgcccagcccagcccccgcaggcctgtagtaatgaactagtccgtaacttgaaagtatttcgatttcttggctttatatatcttgtggaaaggacgagagcaatggagtcactgttcggca

SEQ ID NO: 1416 - DNA, 1352 bp, Homo sapiens
  source 1..1352: mol_type = genomic DNA
accgccaccatggtggaccacttacttccagtggacgagaacttctcgtcgccaaaatgcccagttgggtatctgggtgataggctggttggccggcgggcatatcacatgctgccctcacccgtctctgaagatgacagcgatgcctccagcccctgctcctgttccagtcccgactctcaagccctctgctcctgctatggtggaggcctgggcaccgagagccaggacagcatcttggacttcctattgtcccaggccacgctgggcagtggcgggggcagcggcagtagcattggggccagcagtggccccgtggcctgggggccctggcgaagggcagcggcccctgtgaagggggagcatttctgcttgcccgagtttcctttgggtgatcctgatgacgtcccacggcccttccagcctaccctggaggagattgaagagtttctggaggagaacatggagcctggagtcaaggaggtccctgagggcaacagcaaggacttggatgcctgcagccagctctcagctgggccacacaagagccacctccatcctgggtccagcgggagagagcgctgttcccctccaccaggtggtgccagtgcaggaggtgcccagggcccaggtgggggccccacgcctgatggccccatcccagtgttgctgcagatccagcccgtgcctgtgaagcaggaatcgggcacagggcctgcctcccctgggcaagccccagagaatgtcaaggttgcccagctcctggtcaacatccaggggcagaccttcgcactcgtgccccaggtggtaccctcctccaacttgaacctgccctccaagtttgtgcgcattgcccctgtgcccattgccgccaagcctgttggatcgggacccctggggcctggccctgccggtctcctcatgggccagaagttccccaagaacccagccgcagaactcatcaaaatgcacaaatgtactttccctggctgcagcaagatgtacaccaaaagcagccacctcaaggcccacctgcgccggcacacgggtgagaagcccttcgcctgcacctggccaggctgcggctggaggttctcgcgctctgacgagctgtcgcggcacaggcgctcgcactcaggtgtgaagccgtaccagtgtcctgtgtgcgagaagaagttcgcgcggagcgaccacctctccaagcacatcaaggtgcaccgcttcccgcggagcagccgctccgtgcgctccgtgaactagtaatgaactagtccgtaacttgaaagtatttcgatttcttggctttatatatcttgtggaaaggacgaccttcaacccgagatgacgtcccg

SEQ ID NO: 1417 - DNA, 1073 bp, Homo sapiens
  source 1..1073: mol_type = genomic DNA
accgccaccatgtcggccgccgtggcgtgcctggactacttcgccgccgagtgcctggtgtccatgtccgcgggcgccgtggttcaccgccgcccgccggaccccgagggcgcgggtggagccgctggctcggaggtgggtgcggcgccgccggagtccgctctgccgggtccggggccaccggggcccgcgtcggtcccccagctcccgcaggtccccgcccccagccccggcgcgggcggcgccgcgccccacctgctggctgcaagcgtctgggcggacttgcgcggcagctctggcgagggctcctgggagaactcgggggaagctccacgcgcctcgtccggcttctccgacccgatcccgtgctccgtccagaccccgtgctccgagctggctcccgcctccggcgccgcggcggtctgcgctcccgagagctcctccgatgcgcccgccgtcccaagcgcgcctgctgccccgggcgcaccagcagcctctggtgggttctctggaggggccctaggggcaggccccgcccccgccgcggatcaggcgccccggaggaggtctgtcacacctgctgccaagcgccaccaatgccccttcccgggctgcaccaaagcctattacaagtcgtcgcacctcaagtcccaccagcgcacccacacgggtgagcgccctttctcctgcgactggctcgactgcgacaagaagtttacgcgttccgacgagctggcccgccactacaggacgcacacgggcgagaagcgcttctcctgccccctctgccccaagcagttctcccggagcgaccacctgaccaagcatgctcgccgccacccaacctatcatccagatatgatcgagtaccggggacgtcgtcgaactccccgcatcgacccgccactcaccagcgaggtggaaagctccgcctccggctccggtcccggcccggcgcccagcttcaccacctgcctgtagtaatgaactagtccgtaacttgaaagtatttcgatttcttggctttatatatcttgtggaaaggacgaagcccgacagccaatggatagtcc

SEQ ID NO: 1418 - DNA, 1403 bp, Homo sapiens
  source 1..1403: mol_type = genomic DNA
accgccaccatgtccatacttgccaaaatgggggactggcaggaccgtcacgacggcaccagcaacgggacggcacggttgccccagctgggcactgtaggtcaatctccctacacgagcgccccgccgctgtcccacacccccaatgccgacttccagcccccatacttccccccaccctaccagcctatctacccccagtcgcaagatccttactcccacgtcaacgacccctacagcctgaaccccctgcacgcccagccgcagccgcagcacccaggctggcccggccagaggcagagccaggagtctgggctcctgcacacgcaccgggggctgcctcaccagctgtcgggcctggatcctcgcagggactacaggcggcacgaggacctcctgcacggcccacacgcgctcagctcaggactcggagacctctcgatccactccttacctcacgccatcgaggaggtcccgcatgtagaagacccgggtattaacatcccagatcaaactgtaattaagaaaggccccgtgtccctgtccaagtccaacagcaatgccgtctccgccatccctattaacaaggacaacctcttcggcggcgtggtgaaccccaacgaagtcttctgttcagttccgggtcgcctctcgctcctcagctccacctcgaagtacaaggtcacggtggcggaagtgcagcggcggctctcaccacccgagtgtctcaacgcgtcgctgctgggcggagtgctccggagggcgaagtctaaaaatggaggaagatctttaagagaaaaactggacaaaataggattaaatctgcctgcagggagacgtaaagctgccaacgttaccctgctcacatcactagtagagggagaagctgtccacctagccagggactttgggtacgtgtgcgaaaccgaatttcctgccaaagcagtagctgaatttctcaaccgacaacattccgatcccaatgagcaagtgacaagaaaaaacatgctcctggctacaaaacagatatgcaaagagttcaccgacctgctggctcaggaccgatctcccctggggaactcacggcccaaccccatcctggagcccggcatccagagctgcttgacccacttcaacctcatctcccacggcttcggcagccccgcggtgtgtgccgcggtcacggccctgcagaactatctcaccgaggccctcaaggccatggacaaaatgtacctcagcaacaaccccaacagccacacggacaacaacgccaaaagcagtgacaaagaggagaagcacagaaagtagtaatgaactagtccgtaacttgaaagtatttcgatttcttggctttatatatcttgtggaaaggacgaaagctgtccttgcggactcttcct

SEQ ID NO: 1419 - DNA, 1415 bp, Homo sapiens
  source 1..1415: mol_type = genomic DNA
accgccaccatgctttggaaattgacggataatatcaagtacgaggactgcgaggaccgtcacgacggcaccagcaacgggacggcacggttgccccagctgggcactgtaggtcaatctccctacacgagcgccccgccgctgtcccacacccccaatgccgacttccagcccccatacttccccccaccctaccagcctatctacccccagtcgcaagatccttactcccacgtcaacgacccctacagcctgaaccccctgcacgcccagccgcagccgcagcacccaggctggcccggccagaggcagagccaggagtctgggctcctgcacacgcaccgggggctgcctcaccagctgtcgggcctggatcctcgcagggactacaggcggcacgaggacctcctgcacggcccacacgcgctcagctcaggactcggagacctctcgatccactccttacctcacgccatcgaggaggtcccgcatgtagaagacccgggtattaacatcccagatcaaactgtaattaagaaaggccccgtgtccctgtccaagtccaacagcaatgccgtctccgccatccctattaacaaggacaacctcttcggcggcgtggtgaaccccaacgaagtcttctgttcagttccgggtcgcctctcgctcctcagctccacctcgaagtacaaggtcacggtggcggaagtgcagcggcggctctcaccacccgagtgtctcaacgcgtcgctgctgggcggagtgctccggagggcgaagtctaaaaatggaggaagatctttaagagaaaaactggacaaaataggattaaatctgcctgcagggagacgtaaagctgccaacgttaccctgctcacatcactagtagagggagaagctgtccacctagccagggactttgggtacgtgtgcgaaaccgaatttcctgccaaagcagtagctgaatttctcaaccgacaacattccgatcccaatgagcaagtgacaagaaaaaacatgctcctggctacaaaacagatatgcaaagagttcaccgacctgctggctcaggaccgatctcccctggggaactcacggcccaaccccatcctggagcccggcatccagagctgcttgacccacttcaacctcatctcccacggcttcggcagccccgcggtgtgtgccgcggtcacggccctgcagaactatctcaccgaggccctcaaggccatggacaaaatgtacctcagcaacaaccccaacagccacacggacaacaacgccaaaagcagtgacaaagaggagaagcacagaaagtagtaatgaactagtccgtaacttgaaagtatttcgatttcttggctttatatatcttgtggaaaggacgatcgatgccatgttgtctcggatac

SEQ ID NO: 1420 - DNA, 1454 bp, Homo sapiens
  source 1..1454: mol_type = genomic DNA
accgccaccatgttgtggaaaataaccgataatgtcaagtacgaagaggactgcgaggatcgccacgacgggagcagcaatgggaatccgcgggtcccccacctctcctccgccgggcagcacctctacagccccgcgccacccctctcccacactggagtcgccgaatatcagccgccaccctactttccccctccctaccagcagctggcctactcccagtcggccgacccctactcgcatctgggggaagcgtacgccgccgccatcaaccccctgcaccagccggcgcccacaggcagccagcagcaggcctggcccggccgccagagccaggagggagcggggctgccctcgcaccacgggcgcccggccggcctactgccccacctctccgggctggaggcgggcgcggtgagcgcccgcagggatgcctaccgccgctccgacctgctgctgccccacgcacacgccctggatgccgcgggcctggccgagaacctggggctccacgacatgcctcaccagatggacgaggtgcagaatgtcgacgaccagcacctgttgctgcacgatcagacagtcattcgcaaaggtcccatttccatgaccaagaaccctctgaacctcccctgtcagaaggagctggtgggggccgtaatgaaccccactgaggtcttctgctcagtccctggaagattgtcgctcctcagctctacgtctaaatacaaagtgacagtggctgaagtacagaggcgactgtccccacctgaatgcttaaatgcctcgttactgggaggtgttctcagaagagccaaatcgaaaaatggaggccggtccttgcgggagaagttggacaagattgggttgaatcttccggccgggaggcggaaagccgctcatgtgactctcctgacatccttagtagaaggtgaagctgttcatttggctagggactttgcctatgtctgtgaagccgaatttcctagtaaaccagtggcagaatatttaaccagacctcatcttggaggacgaaatgagatggcagctaggaagaacatgctattggcggcccagcaactgtgtaaagaattcacagaacttctcagccaagaccggacaccccatgggaccagcaggctcgccccagtcttggagacgaacatacagaactgcttgtctcatttcagcctgattacccacgggtttggcagccaggccatctgtgccgcggtgtctgccctgcagaactacatcaaagaagccctgattgtcatagacaaatcctacatgaaccctggagaccagagtccagctgattctaacaaaaccctggagaaaatggagaaacacaggaaatagtaatgaactagtccgtaacttgaaagtatttcgatttcttggctttatatatcttgtggaaaggacgaccatttgaccctaatggcttgata

SEQ ID NO: 1421 - DNA, 1484 bp, Homo sapiens
  source 1..1484: mol_type = genomic DNA
accgccaccatgcactcacctcctagagaccaggctgccatcatgctctggaagcttgtggagaatgtcaagtacgaagatatctatgaggaccggcacgatggtgtcccgagccacagctcgcggctctcccagctgggctcggtgtcccaaggaccctactcgagcgccccgccgctgtcccacaccccgtcgtcggacttccagccgccctacttcccacccccctaccagccgctcccctaccaccagagccaggacccctactcccacgtcaacgacccctactccctgaacccactgcaccagccccagcaacatccctgggggcaacggcagcggcaagaagtgggttcggaagccggctctctcctgccccagcctcgggccgccttgccccagctctcgggccttgacccccggagggactaccactcggtccgccggccggacgtgctgctgcattcggcgcaccacggcctggacgcgggcatgggtgacagcctctcgctgcacggcctcggccatcccggaatggaagacgtccagtcagttgaagatgccaataacagcggcatgaatctattggaccagtctgtcattaaaaaagttccagttcctcccaaatcggtgacttctctaatgatgaataaagacggcttcctgggaggcatgtctgtcaacaccggcgaggtgttttgctccgtcccaggccgtttgtctctgctcagttcaacttcgaagtacaaagtaactgtgggagaagttcagagacggctgtcgccccctgaatgcctcaatgcatctctcctcggcggagtcctcagaagagccaaatcgaaaaatggggggagatctttgcgagaaaggctagaaaaaatcggtttgaatttacccgcgggcaggcgcaaagcagcaaatgtcacgttactcacctccctggtggaaggagaagctgttcacttagctagggattttgggtacatttgcgaaacggagtttcccgccaaagccgtctctgagtatttgaaccggcagcacacagacccgagtgacctgcactcccgaaagaatatgctgttggccaccaagcaactttgtaaagaatttacggatctactggcgcaggaccggacaccgatagggaacagccgacccagccccatcctggagccggggatccagagctgcctcacgcacttcagcctcatcacgcacggcttcggcgccccggccatttgcgccgcgctcacggccctgcagaactatctcaccgaggcgctcaaaggcatggacaagatgttcttgaacaacaccaccactaacaggcacacgtctggggaaggcccaggtagtaaaactggcgacaaggaggagaaacacaggaaatagtaatgaactagtccgtaacttgaaagtatttcgatttcttggctttatatatcttgtggaaaggacgatcatacactagaggaatgtatcga

SEQ ID NO: 1422 - DNA, 1430 bp, Homo sapiens
  source 1..1430: mol_type = genomic DNA
accgccaccatgctggtgcacacctactccgccatggagcgccccgacgggctgggagcagctgccggcggggcccgcctgtcgtctctgccccaggcggcctacgggccggcgcccccgctctgccacacgccggccgccacagctgccgccgaattccagccgccctacttcccgccgccctacccgcagccaccgctgccctacggtcaggcgcccgacgccgccgcagcctttccccacctggcaggggacccatatggcggcctggcgcccctggcgcagccgcagcctcctcaggccgcctgggccgcgccccgcgcagccgcccgcgcccacgaggagcctcccggcctgctggcaccgcccgcccgcgccctgggccttgacccgcgccgtgactatgccactgccgtgccccggctcctgcacggcctggccgacggcgcgcacggcctggcagacgcacctctcggccttccggggctggcggcggcccccggtctggaggacctgcaggcaatggacgagccgggaatgagcctcctagaccagtccgtgatcaagaaagtgcccatcccctccaaagccagcagcctctcagccctctccttggccaaagacagcctggtgggcggcatcacaaatcctggtgaggtcttctgctccgtgcccggccggctttcactgctcagctcaacgtccaagtacaaggtgacggtgggggaggtgcagcggcgactctcgcctcccgagtgcctcaacgcctccctcctggggggtgtcctccgcagggccaagtccaaaaatgggggccggtgtttgcgggaacggttagagaagattgggctcaacctgccagctggccgtcgcaaggccgccaatgtgacgctgctgacttcgctagtggaaggagaggccgtgcacctggcccgagacttcggttacgtctgtgagacggagttcccagccaaggcagctgccgagtacctgtgccgacagcacgctgacccgggggagctgcacagccgcaagagcatgctgctggctgccaagcagatctgcaaggagtttgcagacttgatggctcaggaccgctcaccgctgggcaacagccgcccagcactcatcctggagcccggagtacagagctgcttgacacactttagcctcatcacccatggcttcggtgggcctgccatctgtgctgccctcactgccttccagaactatttgctggagtcactcaaggggctggacaagatgtttctaagcagtgtgggcagtgggcatggtgaaaccaaggcttcggagaaggatgccaagcatcggaaatagtaatgaactagtccgtaacttgaaagtatttcgatttcttggctttatatatcttgtggaaaggacgatgttgttactcctaagacgtatct

SEQ ID NO: 1423 - DNA, 1460 bp, Homo sapiens
  source 1..1460: mol_type = genomic DNA
accgccaccatgtcaactacctttccgggactagtccacgatgccgagatacgtcacgacggatcaaacagctaccgtttgatgcagcttggctgtctggagtcagtagccaattccactgtcgcctattcctcctcctctcctttaacttactccaccaccggcaccgagtttgcgtccccctacttctccactaaccaccagtacaccccgctccaccaccagtccttccattacgagtttcagcacagccacccggccgtcacccccgacgcctactctctgaactctctccaccactcgcaacagtactaccagcagatccaccacggggagcccaccgactttattaacctgcacaatgcgcgggcgctcaagtcgtcctgcctggacgagcagaggcgggagctgggctgcctcgatgcctaccgccgccatgacctgtccctcatgagccatggctctcagtatggaatgcacccagatcaaagactcctgccagggcccagcctggggctggccgccgcgggagcagacgacttgcagggctctgtggaggcccagtgtgggcttgttctcaatggccaaggtggagtgataagaagaggtggcacctgtgtggtcaaccccacagacttattttgctctgtccctggccgtttgtcccttcttagttctacttccaaatacaaggtgaccattgctgaggtaaagaggcgcctctccccacctgagtgcctcaatgcttcactcttgggaggcattttgagaagagcaaaatcaaagaatgggggccgctgcctgagagagaaattggataggcttggcttaaacttaccagcaggaagacggaaagcagctaatgtcaccctccttacttccttggttgaaggggaggctttgcacttggctcgggattttggctacacttgtgaaacagagtttccagccaaagcagtaggagaacatcttgccagacaacatatggaacagaaagaacagacagcaagaaaaaagatgatcctggcgaccaaacaaatctgtaaagaattccaagacctcttgagccaagatagatcaccactgggatcctccagacccactccaattctagaccttgacatccagagacatttaacacatttcagtttgatcactcatggctttgggactccggcaatatgtgcagctctaagcactttccaaacagttctcagtgaaatgctgaactacttggaaaaacacactactcacaagaacggcggagcggcggattctggccaaggacatgccaactcggagaaagctcccctgcggaaaacttcagaggctgccgtgaaagagggcaaaacagaaaagacagactagtaatgaactagtccgtaacttgaaagtatttcgatttcttggctttatatatcttgtggaaaggacgacacatttctcggcccttccgacta

SEQ ID NO: 1424 - DNA, 1604 bp, Homo sapiens
  source 1..1604: mol_type = genomic DNA
accgccaccatggccacggcggcttctaacccctacctgccggggaacagcctgctcgcggccggctctattgtgcactcggacgcggcaggggctggcggcggcgggggtggcggcggcggcggcggcgggggcggcgcagggggcgggggcggcggcatgcagccgggcagcgccgccgtgacctcgggcgcctaccggggggacccgtcctctgtcaagatggtccagagcgacttcatgcagggggccatggccgccagcaacggcggccatatgctgagccacgcgcaccagtgggtcacagccctgccccacgccgccgccgccgccgccgctgccgccgccgccgccgtggaggcgagctcgccgtggtcgggcagcgccgtgggcatggctggcagcccccagcagccaccgcagccgccgccgccaccgccgcagggccccgacgtgaagggcggcgccgggcgcgacgacctgcacgcgggcacagcgctgcaccaccgcgggccgccgcacctcggacccccgccgccgcccccacaccagggccaccctgggggctggggggcggccgccgctgccgcagccgcagccgccgccgccgccgccgccgcgcacctcccgtccatggccgggggccagcagccgccgccgcagagtctgctctactcgcagcccggaggcttcacggtgaacggcatgctgagcgcgccaccggggcccggcggcggcggcggcggcgcgggcggtggagcccagagcttggtgcacccggggctggtgcgcggggacacgccagagctggccgagcaccaccaccaccaccaccaccacgcgcatcctcacccgccgcacccgcaccacgcgcagggacccccgcaccacggcggcggcggcggcggcgcggggcctggactcaacagccacgacccgcactcggacgaggacacgccgacgtcggacgacctggagcagttcgccaagcagttcaagcagcggcgcatcaagctgggcttcacgcaggccgacgtggggttggcgctgggcacactctacggcaacgtgttctcgcagaccaccatctgccgcttcgaggccctgcagctgagcttcaagaacatgtgcaagctcaagccgctgctgaacaagtggctggaggaggcggactcaagcaccggcagccccacaagcatcgacaagatcgcggcgcagggccgcaagcgcaagaagcggacctctatcgaggtgagcgtcaagggcgcgctggagagccacttcctcaagtgccccaagccctccgcgcaggagatcaccaacctggccgacagcctgcagctcgagaaggaggtggtgcgggtctggttctgcaatcggcgccaaaaggagaagcgcatgacgccgcccgggatccaacagcagacgcccgacgacgtctactcgcaggtgggcaccgtgagcgccgacacgccgccgcctcaccacgggctgcagacgagcgttcagtagtaatgaactagtccgtaacttgaaagtatttcgatttcttggctttatatatcttgtggaaaggacgaactggcatacacccaagtctaaac

SEQ ID NO: 1425 - DNA, 1433 bp, Homo sapiens
  source 1..1433: mol_type = genomic DNA
accgccaccatggcgaccgcagcgtctaaccactacagcctgctcacctccagcgcctccatcgtgcacgccgagccgcccggcggcatgcagcagggcgcggggggctaccgcgaagcgcagagcctggtgcagggcgactacggcgctctgcagagcaacggacacccgctcagccacgctcaccagtggatcaccgcgctgtcccacggcggcggcggcgggggcggtggcggcggcggggggggcgggggcggcggcgggggcggcggcgacggctccccgtggtccaccagccccctgggccagccggacatcaagccctcggtggtggtgcagcagggcggccgcggagacgagctgcacgggccaggcgccctgcagcagcagcatcagcagcagcaacagcaacagcagcagcaacagcagcaacagcagcagcagcagcagcaacagcggccgccgcatctggtgcaccacgccgctaaccaccacccgggacccggggcatggcggagcgcggcggctgcagcgcacctcccaccctccatgggagcgtccaacggcggcttgctctactcgcagcccagcttcacggtgaacggcatgctgggcgccggcgggcagccggccggtctgcaccaccacggcctgcgggacgcgcacgacgagccacaccatgccgaccaccacccgcacccgcactcgcacccacaccagcagccgccgcccccgccgcccccgcagggtccgcctggccacccaggcgcgcaccacgacccgcactcggacgaggacacgccgacctcggacgacctggagcagttcgccaagcagttcaagcagcggcggatcaaactgggatttacccaagcggacgtggggctggctctgggcaccctgtatggcaacgtgttctcgcagaccaccatctgcaggtttgaggccctgcagctgagcttcaagaacatgtgcaagctgaagcctttgttgaacaagtggttggaggaggcggactcgtcctcgggcagccccacgagcatagacaagatcgcagcgcaagggcgcaagcggaaaaagcggacctccatcgaggtgagcgtcaagggggctctggagagccatttcctcaaatgccccaagccctcggcccaggagatcacctccctcgcggacagcttacagctggagaaggaggtggtgagagtttggttttgtaacaggagacagaaagagaaaaggatgacccctcccggagggactctgccgggcgccgaggatgtgtacggggggagtagggacactccaccacaccacggggtgcagacgcccgtccagtagtaatgaactagtccgtaacttgaaagtatttcgatttcttggctttatatatcttgtggaaaggacgaacgaattaatatgtgaacagattc

SEQ ID NO: 1426 - DNA, 1457 bp, Homo sapiens
  source 1..1457: mol_type = genomic DNA
accgccaccatggccaccaccgcgcagtacctgccgcggggccccggtggcggagccgggggcaccgggccgcttatgcacccggacgccgcggcggcggcggcggcggcggcggccgcggagcgattgcatgcaggggccgcgtaccgcgaagtgcagaagctgatgcaccacgagtggctgggcgcgggcgcgggccaccccgtgggcctagcgcacccccagtggctacccacgggaggaggcggcggcggcgattgggccggcggcccgcacctagaacacggcaaggcaggcggcggcggcaccggccgagccgacgacggcggcggcggcggaggtttccacgcgcgcctggtgcaccagggggcggcccacgcgggcgcggcatgggcgcagggcagcacagcgcaccacttgggcccggccatgtcgccctcgcccggggccagcgggggccaccagccccagccgctcgggctgtacgcgcaggcggcctacccggggggcggcggcggcggcctggccgggatgctggcggcgggcggtggcggcgcggggccgggcctgcaccacgcgctgcacgaggatggccacgaggcgcagctggagccgtcgccgccgccgcatctgggcgcccacggacacgcacacggacatgcacacgcgggcggcctgcacgcggcggcggcgcacctgcacccgggcgcgggcggcggcggctcatcggtgggcgagcactcggacgaggatgcgcccagctcggacgacctggagcagttcgccaagcagttcaagcagcggcgcatcaagctgggctttacgcaggccgacgtggggctggcgctgggcacgctctacggtaacgtgttctcgcagaccaccatctgccgcttcgaggccctgcagctgagcttcaagaacatgtgcaagctcaagccgctgctcaacaagtggctggaggagaccgactcgtccagcggcagccccaccaacctggacaagatcgcggcgcagggccgcaagcgcaagaagcgcacgtccatcgaggtgggggtcaaaggcgcgctcgagagccactttctcaagtgccccaagccctcggcgcacgagatcaccggcttggcagacagcctgcagctggagaaggaggtggtgcgcgtctggttctgcaaccggcggcagaaggagaagcgcatgacccctgcggccggcgcgggccacccgcccatggacgatgtatacgcgcctggggagctagggcctggcgggggcggcgcatcgccaccctccgcgcccccaccgcccccgccggcggcgctgcaccaccaccaccaccacacactgcccggctcagtgcagtagtaatgaactagtccgtaacttgaaagtatttcgatttcttggctttatatatcttgtggaaaggacgatccggtcgaattgaagaacaccat

SEQ ID NO: 1427 - DNA, 1856 bp, Homo sapiens
  source 1..1856: mol_type = genomic DNA
accgccaccatggccggcggcgtggacggccccatcgggatcccgttccccgaccacagcagcgacatcctgagtgggctgaacgagcagcggacgcagggcctgctgtgcgacgtggtgatcctggtggagggccgcgagttccccacgcaccgctcggtgctggccgcctgcagccagtacttcaagaagctgttcacgtcgggcgccgtggtggaccagcagaacgtgtacgagatcgacttcgtcagcgccgaggcgctcaccgcgctcatggacttcgcctacacggccacgctcaccgtcagcacagccaacgtgggtgacatcctcagcgccgcccgcctgctggagatccccgccgtgagccacgtgtgcgccgacctcctggaccggcagatcctggcggccgacgcgggcgccgacgccgggcagctggaccttgtagatcaaattgatcagcgcaacctcctccgcgccaaggagtacctcgagttcttccagagcaaccccatgaacagcctgccccccgcggccgccgccgccgctgccagcttcccgtggtccgcctttggggcgtccgatgatgacctggatgccaccaaggaggccgtggccgccgctgtggccgccgtggccgcgggcgactgcaacggcttagacttctatgggccgggccccccggccgagcggcccccgacgggggacggggacgagggcgacagcaacccgggtctgtggccagagcgggatgaggacgcccccaccgggggtctctttccgccgccggtggccccgccggccgccacgcagaacggccactacggccgcggcggagaggaggaggccgcctcgctgtcggaggcggcccccgagccgggcgactctccgggcttcctgtcgggagcggccgagggcgaggacggggacgggcccgacgtggacgggctggcggccagcacgctgctgcagcagatgatgtcatcggtgggccgggcgggggccgcggcgggggacagcgacgaggagtcgcgggccgacgacaagggcgtcatggactactacctgaagtacttcagcggcgcccacgacggcgacgtctacccggcctggtcgcagaaggtggagaagaagatccgagccaaggccttccagaagtgccccatctgcgagaaggtcatccagggcgccggcaagctgccgcgacacatccgcacccacacgggcgagaagccctacgagtgcaacatctgcaaggtccgcttcaccaggcaggacaagctgaaggtgcacatgcggaagcacacgggcgagaagccgtacctgtgccagcagtgcggcgccgcctttgcccacaactacgacctgaagaaccacatgcgcgtgcacacgggcctgcgcccctaccagtgcgacagctgctgcaagaccttcgtccgctccgaccacctgcacagacacctcaagaaagacggctgcaacggcgtcccctcgcgccgcggccgcaagccccgcgtccggggcggggcgcccgaccccagcccgggggccaccgcgacccccggcgcccccgcccagcccagctcccccgacgcccggcgcaacggccaggagaagcactttaaggacgaggacgaggacgaggacgtggccagccccgacggcttgggccggttgaatgtagcgggcgccggtggaggaggtgacagcggaggtggccccggggccgccaccgacggtaacttcacagccggactcgcctagtaatgaactagtccgtaacttgaaagtatttcgatttcttggctttatatatcttgtggaaaggacgatagcatcgtcaatattgcctcact

SEQ ID NO: 1428 - DNA, 1961 bp, Homo sapiens
  source 1..1961: mol_type = genomic DNA
accgccaccatggccaatgacattgatgagctcattggcattcccttccccaaccacagcagtgaggtcctgtgcagcctcaatgagcaacggcacgatggcctgctgtgtgacgtgctcctggtggtgcaggagcaggagtatcggacccaccgctccgtcctggctgcctgcagcaagtacttcaagaagcttttcacagccggcaccctagccagccagccctacgtctatgagatcgactttgtccagcctgaggctctggctgctatcctggagttcgcctacacctccacgctcaccatcaccgctggcaatgtcaagcacatcctcaacgcagccaggatgctggagatccagtgcatcgtgaacgtgtgcctggagatcatggagcctgggggggacgggggggaggaggatgacaaggaggacgatgacgacgacgaagatgatgatgatgaggaggacgaagaggaggaggaggaagaggaggaggatgacgatgatgacacggaggactttgctgaccaagaaaacttgcctgacccccaggacatcagctgccaccaaagcccttccaagacagaccatctcacagagaaggcctattcagacacccccagggacttccctgactccttccaggctggcagtcctggccatctgggggtgatccgggacttctccatcgaatctctgctaagggagaacctgtaccccaaggccaacatccccgacaggagaccctccttgtctccattcgccccggacttctttccacacctctggccaggggacttcggtgcctttgcccagctgcctgagcagcccatggacagtgggccactggatctggtcatcaagaatcggaagatcaaggaggaggagaaggaggagctgcccccacccccaccgccacccttccctaatgacttcttcaaggacatgttccctgacctgccgggggggcctctgggacccatcaaggcggagaacgactacggtgcctatctcaacttcctgagtgccacccacctgggaggcctcttcccaccctggcccctggtagaagagcgcaagctgaagcccaaggcctctcagcagtgccccatctgccacaaagtcatcatgggggccgggaagctgccgcggcacatgaggacccataccggggagaagccatacatgtgcaccatctgcgaggtccgcttcaccaggcaggacaagctgaaaatccacatgcggaagcacacaggggagcggccctacctgtgcatccactgcaacgccaagttcgtgcacaactacgacctcaagaaccacatgcgcatccacacgggcgtgcggccctaccagtgcgagttctgctacaagagcttcacgcgctctgaccacctgcaccgccacatcaagcgccagagctgccgcatggcacggccccgacgcggccgcaagcctgctgcgtggagggccgccagcctgctcttcgggcccggcggcccggcccccgacaaggcggccttcgtgatgccccctgcgctgggcgaggtgggcggccacctgggcggcgcagctgtgtgcctcccgggccccagccccgccaagcacttcctggcagcgcccaagggcgccctgagcctgcaagagctggagcggcagttcgaggagacacagatgaagctgttcgggcgcgcgcagctggaggctgagaggaacgcggggggcctcctggccttcgcgctggccgagaacgtggcggcggcgcggccctacttcccgctgcccgacccttgggccgccggcctggccggcctccctgggctcgccggcctcaaccacgtggcctccatgtccgaagccaacaactagtaatgaactagtccgtaacttgaaagtatttcgatttcttggctttatatatcttgtggaaaggacgaccggcgatttctacacttggttac

SEQ ID NO: 1429 - DNA, 1187 bp, Homo sapiens
  source 1..1187: mol_type = genomic DNA
accgccaccatggccacagctgcctcgaatccctacagcattctcagttccacctccctagtccatgcggactctgcgggcatgcagcaggggagtcctttccgcaaccctcagaaacttctccaaagtgattacttgcagggagttcccagcaatgggcatcccctcgggcatcactgggtgaccagtctgagcgacgggggcccatggtcctccacactggccaccagccccctggaccagcaggacgtgaagcccgggcgcgaagacctgcaactgggtgcgatcatccatcaccgctcgccacacgtagcccaccactcaccgcacactaaccaccccaacgcctggggggccagcccggcaccgaacccgtctatcacgtcaagcggccaacccctcaacgtgtactcgcagcctggcttcaccgtgagcggcatgctggaacacgggggactcaccccacctccagctgccgcctctgcacagagcctgcacccggtgctccgagagcccccggatcacggcgaactgggctcgcaccattgccaggatcactccgacgaggagacgccaacctctgatgagttggaacagttcgccaaacaattcaaacaaagaagaatcaagttgggcttcacgcaggccgacgtggggttggcgctgggcacactgtatggtaacgtgttctcgcagaccaccatctgcaggttcgaggccttgcagctgagcttcaaaaatatgtgcaagctgaagcccctgctgaacaagtggctggaggaggcggattcgtccacagggagcccgaccagcattgacaagatcgctgcacagggccgcaagcgcaagaagcggacctccatcgaggtgagtgtcaagggcgtactggagacgcatttcctcaagtgtcccaagcctgccgcgcaggagatctcctcgctggcagacagcctccagttggagaaggaagtggtgcgtgtctggttctgtaatcgaagacaaaaagagaaaagaatgactccgccaggggatcagcagccgcatgaggtttattcgcacaccgtgaaaacagacacatcttgccatgatctctagtaatgaactagtccgtaacttgaaagtatttcgatttcttggctttatatatcttgtggaaaggacgaaacgctttacttactggagattca

SEQ ID NO: 1430 - DNA, 596 bp, Homo sapiens
  source 1..596: mol_type = genomic DNA
accgccaccatgtgtaagctgcggcccttgctgcagaagtgggtggaggaagctgacaacaatgaaaatcttcaggagatatgcaaagcagaaaccctcgtgcaggcccgaaagagaaagcgaaccagtatcgagaaccgagtgagaggcaacctggagaatttgttcctgcagtgcccgaaacccacactgcagcagatcagccacatcgcccagcagcttgggctcgagaaggatgtggtccgagtgtggttctgtaaccggcgccagaagggcaagcgatcaagcagcgactatgcacaacgagaggattttgaggctgctgggtctcctttctcagggggaccagtgtcctttcctctggccccagggccccattttggtaccccaggctatgggagccctcacttcactgcactgtactcctcggtccctttccctgagggggaagcctttccccctgtctccgtcaccactctgggctctcccatgcattcaaactagtaatgaactagtccgtaacttgaaagtatttcgatttcttggctttatatatcttgtggaaaggacgacaacagctccacccagttatcttg

SEQ ID NO: 1431 - DNA, 674 bp, Homo sapiens
  source 1..674: mol_type = genomic DNA
accgccaccctgggggttctatttgggaaggtattcagccaaacgaccatctgccgctttgaggctctgcagcttagcttcaagaacatgtgtaagctgcggcccttgctgcagaagtgggtggaggaagctgacaacaatgaaaatcttcaggagatatgcaaagcagaaaccctcgtgcaggcccgaaagagaaagcgaaccagtatcgagaaccgagtgagaggcaacctggagaatttgttcctgcagtgcccgaaacccacactgcagcagatcagccacatcgcccagcagcttgggctcgagaaggatgtggtccgagtgtggttctgtaaccggcgccagaagggcaagcgatcaagcagcgactatgcacaacgagaggattttgaggctgctgggtctcctttctcagggggaccagtgtcctttcctctggccccagggccccattttggtaccccaggctatgggagccctcacttcactgcactgtactcctcggtccctttccctgagggggaagcctttccccctgtctccgtcaccactctgggctctcccatgcattcaaactagtaatgaactagtccgtaacttgaaagtatttcgatttcttggctttatatatcttgtggaaaggacgagaagagacggaccttgcgtgctac

SEQ ID NO: 1432 - DNA, 1088 bp, Homo sapiens
  source 1..1088: mol_type = genomic DNA
accgccaccatggccggacacaggccctcaaaccacttctgcccccttccaggcagtggtgggggcggccccagagggccgatgcccctgcgggttgacactctgacctggttgagcacccaggcggcccctggcagggtgatggtctggccggcagtcaggccagggatctgcccaggccctgacgtgtggaggattcccctgggtcccctgccacacgaattccggggctggatagcaccctgcaggccccgtcttggagctagtgaggcaggggactggttgcgacgcccctccgaaggcgccctcccggggccctacattgccctgcggagcattccgaagttgccgccgccagaggacatctcgggcatactgaaagagttgcagcaattggccaaggagttgaggcagaagaggttgagcctagggtactcgcaggccgatgtggggatcgctgtgggagctctgtttgggaaggtgcttagccagacgaccatctgccgcttcgaggcccagcagctaagcgtcgccaacatgtggaagctgcgaccactgctgaaaaagtggctgaaggaagtggaagcagagaaccttctgggcttatgcaaaatggagatgatcctgcaacagtctgggaagtggagacgggcaagcagagagcgacgaatcggaaacagcctggagaaattcttccagcggtgccctaagcccacaccccagcaaatcagccacattgctgggtgcctccagctgcagaaggatgtggttcgagtttggttctataaccgcagcaagatgggcagtcgaccaaccaatgatgcttccccacgggagattgtggggacagccgggcctccttgcccaggagcaccagtgtgctttcacctgggactggggctcccagtggatatcccccactatacacgtctctactctgcaggggtagcccactcctctgccccagccaccactctgggcctcctcagattttagtaatgaactagtccgtaacttgaaagtatttcgatttcttggctttatatatcttgtggaaaggacgacgtcgcattactcgcctgcataag

SEQ ID NO: 1433 - DNA, 1379 bp, Homo sapiens
  source 1..1379: mol_type = genomic DNA
accgccaccatggacagtagctgccacaacgcgactaccaaaatgttagcgactgctccagctcggggcaacatgatgagcacgtccaaacccttggctttctccattgaacgaatcatggcgcgcaccccagagcccaaggccctgccagtcccccacttcctgcagggagccttacccaagggggaacccaagcactctctgcatctcaactcgtcgatcccctgcatgatccccttcgtgcctgtggcctacgacacgagccccaaggcaggagtgacgggctccgagccgcggaaggccagtctggaggccccggcggcgcccgcggcggtgccctcggctcccgcattcagctgcagcgacctgctcaactgcgcactgagtctcaagggcgacctggcccgcgacgcgctgccgctgcagcagtacaagctgccaaaaacgtatttagccgaaaggaataaactggtggtcccggcggtggagaaatacccttctggagtagctttcaaagacctgtcccaggctcagctgcagcattacatgaaagaaagcgcccagcttctgtcggaaaaaatcgcgttcaaaacctcggatttcagccgaggctctcctaatgccaagcccaaagttttcacttgcgaagtgtgtggaaaggtctttaatgcgcactataacttaacccgtcacatgccagtgcacacaggagccagacccttcgtttgcaaagtgtgcggaaaaggtttcaggcaagcaagcaccctgtgcaggcacaagatcattcacacgcaggaaaaacctcacaaatgtaaccagtgtggcaaagcatttaatagaagttccactttaaacactcatacccgaatacacgcgggctacaaaccgtttgtgtgtgaattctgtggcaaagggtttcatcaaaaagggaattacaaaaaccacaagttgacccacagcggggagaagcagttcaagtgcaatatctgcaacaaggctttccaccaggtttacaacctcaccttccacatgcacacccacaacgacaagaagcctttcacctgccccacgtgcggcaagggtttctgcaggaactttgacctcaagaagcatgtccgcaagctgcacgacagcagcctggggctggcccgcacgccagctggcgaaccaggcactgaaccgccgcccccgctaccgcagcagccgccgatgacgctgcctcctctgcagccgccgctgccaaccccggggcccctgcagcccgggctccaccagggccaccagtagtaatgaactagtccgtaacttgaaagtatttcgatttcttggctttatatatcttgtggaaaggacgaactagcgtaaagcgattagagtgt

SEQ ID NO: 1434 - DNA, 1481 bp, Homo sapiens
  source 1..1481: mol_type = genomic DNA
accgccaccatggcaagctcggcttccctggagaccatggtgcccccggcctgcccgcgcgccggagcgtcgccggccacttccaagacactggccttttccatcgagcgcatcatggccaagacgtcggagccccgtgcgccctttgagccccggcctggagcgctagaggcggacggcagccagggcaagaaactgctcaacctctgctcgccgctgccctgtatgatccccctccagcccctaggctacgaggtgccgtcaaagacactgctcagttactcggagctctggaaaagcagcctccgggcgggcggcggcggaggcggcggcggcggtggcggcggcggcggcgggggggccccagtgtgcggcgccagcggcttgtgcaaaaccaactgtggcgtgtgctgcaaggccgagctgggcctggcgccgtccgcgctgcccgcgggcagggtcatcaagccgcaggtcatcaaccaggctgtggggctgccggccagcggctcgctctactacttcaactacctggactcgaccgcgtacccgccgtctgagctcctcagcggccacctcttcccgtctggcctcctcaatgcgcaggcccccgccgccctggctgctcaccccaagctctttctgctggagaacgccaagctggccggcctggctgcggacaagttcccccacccggctccctatccccataaggagcgcttgccggcgccgctggagcaggtactgaaggaaaactcggccctgactgccgagcgcggaggcgtcaagggccacagcaagctgccaggaggctccgcagatggcaagcccaaaaacttcacctgcgaggtgtgcggcaaggtgtttaacgctcactataatctcacccgccacatgccggtccacaccggagccagaccgttcgtgtgcaaagtctgcggcaaaggctttcgccaggccagcacgctctgcaggcacaaaattatccacacccaggaaaagccacataaatgcaaccagtgcggcaaagcgttcaaccgcagctccacgctcaacacgcatatccgcatccacgcgggctacaagcccttcgtctgcgaattttgcggcaaaggctttcaccaaaaagggaactacaagaaccacaagctgacccacagcggcgagaagcagtacaaatgtaccatctgcaacaaggccttccaccaggtctacaacctaaccttccatatgcacacccacaacgacaagaagcctttcacgtgcgccacttgcggcaaagggttttgcagaaactttgacttaaagaaacatgtgcgcaaactccacgacagcgtgggccctgctgccccctccgcaaaggacctgactaggacagtgcagagctagtaatgaactagtccgtaacttgaaagtatttcgatttcttggctttatatatcttgtggaaaggacgagaaccctttacgacgctacgcacc

SEQ ID NO: 1435 - DNA, 1952 bp, Homo sapiens
  source 1..1952: mol_type = genomic DNA
accgccaccatggtcggccaactgagcgagggggccattgcggccatcatgcagaagggggatacaaacataaagcccatcctccaagtcatcaacatccgtcccattactacggggaatagtccgccgcgttatcgactgctcatgagtgatggattgaacactctatcctctttcatgttggcgacacagttgaaccctctcgtggaggaagaacaattgtccagcaactgtgtatgccagattcacagatttattgtgaacactctgaaagacggaaggagagtagttatcttgatggaattagaagttttgaagtcagctgaagcagttggagtgaagattggcaatccagtgccctataatgaaggactcgggcagccgcaagtagctcctccagcgccagcagccagcccagcagcaagcagcaggccccagccgcagaatggaagctcgggaatgggttctactgtttctaaggcttatggtgcttcaaagacatttggaaaagctgcaggtcccagcctgtcacacacttctgggggaacacagtccaaagtggtgcccattgccagcctcactccttaccagtccaagtggaccatttgtgctcgtgttaccaacaaaagtcagatccgtacctggagcaactcccgaggggaagggaagcttttctccctagaactggttgacgaaagtggtgaaatccgagctacagctttcaatgagcaagtggacaagttctttcctcttattgaagtgaacaaggtgtattatttctcgaaaggcaccctgaagattgctaacaagcagttcacagctgttaaaaatgactacgagatgaccttcaataacgagacttccgtcatgccctgtgaggacgaccatcatttacctacggttcagtttgatttcacggggattgatgacctcgagaacaagtcgaaagactcacttgtagacatcatcgggatctgcaagagctatgaagacgccactaaaatcacagtgaggtctaacaacagagaagttgccaagaggaatatctacttgatggacacatccgggaaggtggtgactgctacactgtggggggaagatgctgataaatttgatggttctagacagcccgtgttggctatcaaaggagcccgagtctctgatttcggtggacggagcctctccgtgctgtcttcaagcactatcattgcgaatcctgacatcccagaggcctataagcttcgtggatggtttgacgcagaaggacaagccttagatggtgtttccatctctgatctaaagagcggcggagtcggagggagtaacaccaactggaaaaccttgtatgaggtcaaatccgagaacctgggccaaggcgacaagccggactactttagttctgtggccacagtggtgtatcttcgcaaagagaactgcatgtaccaagcctgcccgactcaggactgcaataagaaagtgattgatcaacagaatggattgtaccgctgtgagaagtgcgacaccgaatttcccaatttcaagtaccgcatgatcctgtcagtaaatattgcagattttcaagagaatcagtgggtgacttgtttccaggagtctgctgaagctatccttggacaaaatgctgcttatcttggggaattaaaagacaagaatgaacaggcatttgaagaagttttccagaatgccaacttccgatctttcatattcagagtcagggtcaaagtggagacctacaacgacgagtctcgaattaaggccactgtgatggacgtgaagcccgtggactacagagagtatggccgaaggctggtcatgagcatcaggagaagtgcattgatgtagtaatgaactagtccgtaacttgaaagtatttcgatttcttggctttatatatcttgtggaaaggacgagcgaatgaaccgattagtcattcg

SEQ ID NO: 1436 - DNA, 4142 bp, Homo sapiens
  source 1..4142: mol_type = genomic DNA
accgccaccatggaccagtacagccttggagacgagggtgccctcccatcagaaatgcacctcccttcattttcagagagccaagggctcaactgcagcgacaccctcaaccgggatttgggtcccaacacgcgaggctttctttatgctggcctgagtggtctggacccggaccccagcctcccaacgcctgacatgtccagcgaggtgctggaggacaacttagacaccttgtccctgtactccgggaaggacagtgattctgtgaagctgctggaggagtacgcagattcggagtctcaggcatccttacaagacctggggctaggtgtgcttaaggctaaagaggctgacgaaggaggaagggccacctcggggagtgccaggaaaggaaagcggcagcacagttcccctcaaaacccacttctggactgcagcctgtgcgggaaggtgttcagcagcgccagttctctgagcaagcactacctgacacacagccaggaaaggaagcacgtctgcaaaatctgcagcaaggcctttaagcgccaggaccacctgaccgggcacatgctcacccaccagaagacaaagcccttcgtgtgcatcgagcagggctgcagcaagagctactgcgactaccgctctctgcgccggcactacgaggtccatcacggcctgtgcatcctgaaggaagcccccccggaggaagaggcctgcggggactccccccacgcccacgagtcggccggccagccgccccccagcagcctgcggtccctggtgcccccagaggccaggtcccccggctccctcctgccccaccgggacctcctgcgccgcatcgtgagtagcatcgtccaccagaagaccccttctcctggcccagccccggcgggggcttcagacagcgaagggaggaacactgcctgtccctgccccgcctcatcggggtcctcgtcctgcaccccagccggcccccacgcggccccagcagcgctggacaccgagcttcccgaggagccttgcctcccacagaaagagccggccactgacgtgttcacagcccctaattccagggccgccgagaacggcgcccccgacccgccagagccggagccagataccgcgctgctccaggcccggtccaccgcggagtgctggcccgaaggcggctccgtgcctgcctgcctgcctctcttccgaggccagacggtccctgccagttcccagccatcgagccacagcttccagtggctccggaacctgccgggctgtcccaaaagcaaaggcaacaacgtgtttgttgtccacaagccctcggccgtgccctcgcgggagggctccgagtctggcccgggacccagcagcggaagcccctcggaggagtccccgcccggccccggcggtggcctggaggatgctctgcccttccctgccgcgctcctcagggtccccgcggaggccccgagcgaccccaggtcggccagcggggaagatgacccctgcgcccccaagaaggtcaaggtcgactgcgactccttcctgtgccagaaccccggggagcccggcctccaggaggcccagaaggcaggcgggctccctgcggatgcctcgccgctcttccgccagctcttcctcaagtcgcaggaacctcttgtgagccacgagcagatgcaggtgttccagatgatcaccaagtcccagcggatcttctcccatgcccaggtggcagcagtctcctcccagctccctgcgcccgagggcaaaccagccgccctgaggccgctgcaggggccgtggccgcagcagcccccaccactggctcctgctgtggactctctccacgccggccctggaaaccccgaggcagagggctccccagcccgcaggagaaaaaccacacccggggttcccagagaggcctcccccggcagcacgagacgagacgcaaaggggggactgaaagtggccgcggttccaacgccccttgcagcaccgtctctggacccttccaggaatccagacatctcttctctggccaagcagctgcgatcctctaaagggaccttggacctggaggacatcttcccctccacaggccaacggcagacccagttaggtggggaggagccaccaggagcctcgctgccagggaagcaggccccagccgagaatggcgcggcttcaaggatcacaaaaggtgaaaagggcccagcctgctcccggggtggaggctaccggctcttgggcaaccccagggccccgcgattctccggcttccggaaagagaaggcgaagatggatatgtgctgtgcggcttctccgagccaggtagccatggcctccttctcatcggccgggcccccggcagatccctccaagtccaagctgacaatattcagcagaatccagggtggaaacatctacaggctcccccatccggtgaaggaagagaatgtggcaggcagaggtaaccagcaaaacggcagtcccacagactggacgaagcccaggagcacttttgtctgcaagaactgcagccagatgttttatacggagaaagggctgagcagccacatgtgttttcacagcgaccagtggccgtcacctcgagggaagcaggaaccgcaggtgtttggcacagagttttgcaagccgctaagacaggtgctgaggccagaaggggacaggcatagtcccccaggaaccaagaagcccttggaccccacagctgcagcccctttggtggtcccccaatcgatccccgtggttccagtgacccgacacatagggagcatggccatgggacaagagaaagacggggaggagcgagacagcaaggagagcagccagcagagaaagcggaagaagcggcccccaccctccacggctggggagcctggccctgcaggatgccaccagagccgcctgcggtcacccatgttcctggtggactgcctcctgaagggcttattccagtgctccccctacacaccacccccaatgctcagccccatccgggagggctctggggtgtacttcaacaccctctgttccacgtccactcaggccagccctgaccagctcatcagctccatgctcgatcaagtggatgggtcctttggcatctgtgtggtgaaggatgacaccaaaatcagcattgagccacatatcaatataggaagccggtttcaggcagagatcccggaactccaggagagatccctggctggaactgacgagcatgtagcttctctggtctggaagccatggggagatatgatgatcagctcagagacacaggatagagtgaccgagctctgcaatgtggcatgctccagcgtgatgccaggagggggcaccaacctggagctcgctctgcactgcctgcacgaggctcagggcaacgttcaggtcgccctggagactcttctgctccgagggccccacaagccacggacacacctgctcgctgactatcgctacacaggttcagacgtctggacccctatagagaagaggctttttaagaaggcgttctatgcccacaagaaggacttctacttgatacacaagatgatccagacaaagacggtagctcagtgcgttgagtattattacatctggaaaaaaatgatcaagtttgactgtggccgagccccagggctagaaaagagggtcaagagagagccggaggaagtggaaaggacagaggaaaaggtcccatgcagccctcgggagagacccagccaccatccaactcccaagttaaagaccaagagttataggagggagtccatcctcagctccagcccaaatgcaggctccaagcggacccccgagctgttgggaagtgcagagagccagggcatttttccatgcagagagtgtgaaagggtgtttgacaagatcaagagtcgaaatgcccatatgaagcggcaccgccttcaggaccacgtggagcccatcatcagggtgaagtggccagtgaagcccttccagctaaaggaagaggagctgggagctgacatcggccccctgcagtggtagtaatgaactagtccgtaacttgaaagtatttcgatttcttggctttatatatcttgtggaaaggacgatgcttaatatgccgagcctcgtat

SEQ ID NO: 1437 - DNA, 467 bp, Homo sapiens
  source 1..467: mol_type = genomic DNA
accgccaccatggtggacatgatggacttgcccaggtcgcgcatcaacgccggcatgctagctcaattcatcgacaagcctgtctgcttcgtagggaggctggaaaagattcatcccaccggaaaaatgtttattctttcagatggagaaggaaaaaatggaaccatcgagttgatggaaccccttgatgaagaaatctctggaattgtggaagtggttggaagagtaaccgccaaggccaccatcttgtgtacatcttatgtccagtttaaagaagatagccatccttttgatcttggactttacaatgaagctgtgaaaattatccatgacttccctcagttttatcctttagggattgtgcaacatgattagtaatgaactagtccgtaacttgaaagtatttcgatttcttggctttatatatcttgtggaaaggacgaggcaagattataccacatcttcct

SEQ ID NO: 1438 - DNA, 938 bp, Homo sapiens
  source 1..938: mol_type = genomic DNA
accgccaccatgggcagaggagacaggaacaagcgtagcatccgtggattcgaaagctatggcagctcctcatacgggggagccggcggctacacgcagtccccggggggctttggatcgcccgcaccttctcaagccgaaaagaaatcaagagcccgagcccagcacattgtgccctgtactatatctcagctgctttctgccactttggttgatgaagtgttcagaattgggaatgttgagatttcacaggtcactattgtggggatcatcagacatgcagagaaggctccaaccaacattgtttacaaaatagatgacatgacagctgcacccatggacgttcgccagtgggttgacacagatgacaccagcagtgaaaacactgtggttcctccagaaacatatgtgaaagtggcaggccacctgagatcttttcagaacaaaaagagcctggtagcctttaagatcatgcccctggaggatatgaatgagttcaccacacatattctggaagtgatcaatgcacacatggtactaagcaaagccaacagccagccctcagcagggagagcacctatcagcaatccaggaatgagtgaagcagggaactttggtgggaatagcttcatgccagcaaatggcctcactgtggcccaaaaccaggtgttgaatttgattaaggcttgtccaagacctgaagggttgaactttcaggatctcaagaaccagctgaaacacatgtctgtatcctcaatcaagcaagctgtggattttctgagcaatgaggggcacatctattctactgtggatgatgaccattttaaatccacagatgcagaatagtaatgaactagtccgtaacttgaaagtatttcgatttcttggctttatatatcttgtggaaaggacgatttcgggacgacatccgtcccgag

SEQ ID NO: 1439 - DNA, 4175 bp, Homo sapiens
  source 1..4175: mol_type = genomic DNA
accgccaccatggcggacaccgacctgttcatggaatgtgaggaggaggagttggagccatggcagaaaatcagtgatgtcattgaggactctgtagttgaagattataattcagtggataaaactaccacagctggcaatcctttggtccagcaaggtggacagccactcatcctgacccagaatccagccccaggtctgggcacaatggttactcaaccagtattgaggcctgttcaggtcatgcagaatgccaatcatgtgactagttcccctgtggcctcacaaccaatatttatcactacgcagggatttcctgtaaggaatgtccggcctgtacaaaatgcaatgaatcaggttgggattgtgctgaacgtacagcaaggccaaacggttagaccaattacactagttccagccccaggtacccagtttgttaagccgacagttggagttccacaagtgttctcccagatgacccctgtgaggccaggctccacaatgcctgtgaggcccaccaccaacaccttcaccaccgtcatcccggccactcttaccattcgaagcaccgtcccacagtcccagtcccagcagaccaagtccactcccagcacttctaccactcccactgccacacagccaacctcactggggcaactagctgttcagtctccaggccagtcaaaccagaccacgaatcccaagctagctccctccttcccctctccacctgcagtgagcattgccagctttgtcactgtgaagcgacctggtgttacaggcgaaaatagcaatgaagtggccaaattggtgaatacccttaacaccatcccttccctgggccagagtcctgggccagtggtggtgtccaacaacagctctgctcatggctctcaaagaaccagcggacctgagtcttcaatgaaagtgacctcttccatcccagtatttgacctccaggatggtggacggaaaatatgtccacgatgtaatgctcaatttcgtgttactgaagctttgagaggtcacatgtgttactgttgcccagaaatggttgaataccagaagaaaggaaagtccctggattcagaacccagtgtcccatcagcagcaaagcccccatcccctgagaaaacagctcctgttgcttccacaccctcttctacacctattcctgctctgtcaccgcctaccaaagtaccagaaccaaatgagaacgtgggcgatgccgtccagaccaaactcattatgcttgtagatgacttctactatggacgggatggtggcaaagtagcccagctcacaaatttccctaaggtcgccacatctttccgatgcccacattgtaccaaaaggctaaaaaacaatattcgattcatgaaccatatgaaacaccacgtagaactcgatcagcagaacggtgaggtagatggtcacactatctgccagcactgttaccgccagttttccactcccttccagcttcagtgccacttggaaaatgttcatagtccctatgaatctactaccaagtgcaagatctgtgaatgggcgtttgaaagtgagccactatttctccagcatatgaaggatactcataagcctggagagatgccttatgtttgccaggtgtgtcaatatcgctcctcactctactctgaggtagatgtccattttcggatgatccatgaggatacccggcatctgctctgcccttattgcctgaaggtcttcaaaaatggcaatgcattccaacagcattacatgaggcaccagaagagaaatgtttatcactgcaacaaatgccggctgcagtttctctttgccaaggacaaaattgaacacaagcttcaacaccataaaaccttccgtaaacccaagcagctggagggcttgaaaccaggcaccaaggtgacaatccgggcttcccgagggcagccacgaactgttcctgtatcctctaatgatacacctcccagcgccttgcaggaggcagcaccgctgacctcctcaatggaccctctgcctgtcttcctttatccccctgtccagcgcagcatccagaagagagctgttaggaaaatgagtgtcatgggccggcagacatgcctggagtgcagcttcgagatcccagacttccctaatcatttccctacttacgtacactgctctctgtgtcgctatagcacctgctgttctcgagcttatgccaaccacatgatcaacaatcatgttccacggaagagccccaagtatttggctttgtttaaaaattctgtgagtggaatcaagctggcctgcacttcatgtacctttgttacctctgtgggcgatgctatggccaagcatttggtattcaacccctctcacagatccagcagcatcctgccacggggactcacttggatagctcactcaaggcatggccagactcgtgaccgagtgcatgaccggaacgtgaagaatatgtaccctcctccttccttccccactaacaaagctgccactgtgaaatctgcgggggccaccccagctgagcctgaagagctactaactcccttagccccagcactcccatcaccagcctcaactgcaaccccaccaccaacccccactcacccgcaggctttagcccttccaccgctggctacagagggagccgaatgtctgaatgttgatgatcaggatgaagggagcccagtcacccaagaacctgagctagcatcaggtggtggtggtagtggtggagttggcaaaaaggagcagctgtctgtgaagaagcttcgagtagtactgtttgctctatgctgcaatacagaacaggcagctgaacacttccgaaatccccagcgacgtattcgccgttggcttcgacgtttccaggcctcccagggggagaatctagagggcaaatatctgagctttgaggcagaagagaaactggctgagtgggtgctaacccagcgcgaacaacagctacctgtaaatgaggagaccttgttccagaaggccaccaaaataggacgttctttggaaggggggtttaagatctcctatgagtgggctgtgcgtttcatgctgcggcaccacctgactccccatgcccggcgagctgtggcccacaccctacctaaggatgtagcagagaatgcaggactcttcattgattttgtacaacggcagattcacaaccaggacttacccttgtctatgattgtggctattgatgagatctctttgttcctggatacagaggtgctgagcagtgatgatcgaaaggagaatgccctgcagacagtgggcacaggggaaccttggtgtgatgtagtcctagccattctggcagatggcactgtccttcccaccctggttttctacagagggcagatggatcagcctgctaacatgccagactccatattgctagaggcaaaggagagtggctacagtgatgacgagatcatggagctgtggtcaactcgagtgtggcagaagcacacagcttgccagcgcagcaaaggcatgcttgtgatggactgtcatcgcactcacttgtcagaagaggtactggctatgcttagtgcctctagcactttgcctgcagtggtcccagcaggctgtagctccaaaattcagccattagatgtatgcatcaaaagaactgtcaagaacttcctgcataaaaaatggaaggaacaggctcgggaaatggcagatactgcatgtgattctgatgtcctgcttcagctggtgcttgtctggctgggtgaagtgctaggtgtcattggggactgtccagagctagttcagcgctccttcctggtggctagtgttctgcctggccccgatggcaacattaactcacctacaagaaatgctgacatgcaggaggagctaattgcctccctagaggagcaactgaagctgagtggggaacattctgagtcttccactccacgacccagatcatctcctgaagagacaattgagcctgaaagtcttcaccagctctttgagggtgaaagtgagaccgagtctttctatggctttgaagaagctgacctagatctgatggagatttagtaatgaactagtccgtaacttgaaagtatttcgatttcttggctttatatatcttgtggaaaggacgattagcgttgacatacgtattcgta

SEQ ID NO: 1440 - DNA, 4307 bp, Homo sapiens
  source 1..4307: mol_type = genomic DNA
accgccaccatggcggacaccgacctgttcatggaatgtgaggaggaggagttggagccatggcagaaaatcagtgatgtcattgaggactctgtagttgaagattataattcagtggataaaactaccacagtttctgtgagccagcagccagtctcggctccagtgcccatcgctgcccatgcttctgttgctgggcacctctctacatccaccaccgttagtagcagcggggcacagaacagcgacagtacaaagaagactcttgtcacactaattgccaacaacaatgctggcaatcctttggtccagcaaggtggacagccactcatcctgacccagaatccagccccaggtctgggcacaatggttactcaaccagtattgaggcctgttcaggtcatgcagaatgccaatcatgtgactagttcccctgtggcctcacaaccaatatttatcactacgcagggatttcctgtaaggaatgtccggcctgtacaaaatgcaatgaatcaggttgggattgtgctgaacgtacagcaaggccaaacggttagaccaattacactagttccagccccaggtacccagtttgttaagccgacagttggagttccacaagtgttctcccagatgacccctgtgaggccaggctccacaatgcctgtgaggcccaccaccaacaccttcaccaccgtcatcccggccactcttaccattcgaagcaccgtcccacagtcccagtcccagcagaccaagtccactcccagcacttctaccactcccactgccacacagccaacctcactggggcaactagctgttcagtctccaggccagtcaaaccagaccacgaatcccaagctagtgagcattgccagctttgtcactgtgaagcgacctggtgttacaggcgaaaatagcaatgaagtggccaaattggtgaatacccttaacaccatcccttccctgggccagagtcctgggccagtggtggtgtccaacaacagctctgctcatggctctcaaagaaccagcggacctgagtcttcaatgaaagtgacctcttccatcccagtatttgacctccaggatggtggacggaaaatatgtccacgatgtaatgctcaatttcgtgttactgaagctttgagaggtcacatgtgttactgttgcccagaaatggttgaataccagaagaaaggaaagtccctggattcagaacccagtgtcccatcagcagcaaagcccccatcccctgagaaaacagctcctgttgcttccacaccctcttctacacctattcctgctctgtcaccgcctaccaaagtaccagaaccaaatgagaacgtgggcgatgccgtccagaccaaactcattatgcttgtagatgacttctactatggacgggatggtggcaaagtagcccagctcacaaatttccctaaggtcgccacatctttccgatgcccacattgtaccaaaaggctaaaaaacaatattcgattcatgaaccatatgaaacaccacgtagaactcgatcagcagaacggtgaggtagatggtcacactatctgccagcactgttaccgccagttttccactcccttccagcttcagtgccacttggaaaatgttcatagtccctatgaatctactaccaagtgcaagatctgtgaatgggcgtttgaaagtgagccactatttctccagcatatgaaggatactcataagcctggagagatgccttatgtttgccaggtgtgtcaatatcgctcctcactctactctgaggtagatgtccattttcggatgatccatgaggatacccggcatctgctctgcccttattgcctgaaggtcttcaaaaatggcaatgcattccaacagcattacatgaggcaccagaagagaaatgtttatcactgcaacaaatgccggctgcagtttctctttgccaaggacaaaattgaacacaagcttcaacaccataaaaccttccgtaaacccaagcagctggagggcttgaaaccaggcaccaaggtgacaatccgggcttcccgagggcagccacgaactgttcctgtatcctctaatgatacacctcccagcgccttgcaggaggcagcaccgctgacctcctcaatggaccctctgcctgtcttcctttatccccctgtccagcgcagcatccagaagagagctgttaggaaaatgagtgtcatgggccggcagacatgcctggagtgcagcttcgagatcccagacttccctaatcatttccctacttacgtacactgctctctgtgtcgctatagcacctgctgttctcgagcttatgccaaccacatgatcaacaatcatgttccacggaagagccccaagtatttggctttgtttaaaaattctgtgagtggaatcaagctggcctgcacttcatgtacctttgttacctctgtgggcgatgctatggccaagcatttggtattcaacccctctcacagatccagcagcatcctgccacggggactcacttggatagctcactcaaggcatggccagactcgtgaccgagtgcatgaccggaacgtgaagaatatgtaccctcctccttccttccccactaacaaagctgccactgtgaaatctgcgggggccaccccagctgagcctgaagagctactaactcccttagccccagcactcccatcaccagcctcaactgcaaccccaccaccaacccccactcacccgcaggctttagcccttccaccgctggctacagagggagccgaatgtctgaatgttgatgatcaggatgaagggagcccagtcacccaagaacctgagctagcatcaggtggtggtggtagtggtggagttggcaaaaaggagcagctgtctgtgaagaagcttcgagtagtactgtttgctctatgctgcaatacagaacaggcagctgaacacttccgaaatccccagcgacgtattcgccgttggcttcgacgtttccaggcctcccagggggagaatctagagggcaaatatctgagctttgaggcagaagagaaactggctgagtgggtgctaacccagcgcgaacaacagctacctgtaaatgaggagaccttgttccagaaggccaccaaaataggacgttctttggaaggggggtttaagatctcctatgagtgggctgtgcgtttcatgctgcggcaccacctgactccccatgcccggcgagctgtggcccacaccctacctaaggatgtagcagagaatgcaggactcttcattgattttgtacaacggcagattcacaaccaggacttacccttgtctatgattgtggctattgatgagatctctttgttcctggatacagaggtgctgagcagtgatgatcgaaaggagaatgccctgcagacagtgggcacaggggaaccttggtgtgatgtagtcctagccattctggcagatggcactgtccttcccaccctggttttctacagagggcagatggatcagcctgctaacatgccagactccatattgctagaggcaaaggagagtggctacagtgatgacgagatcatggagctgtggtcaactcgagtgtggcagaagcacacagcttgccagcgcagcaaaggcatgcttgtgatggactgtcatcgcactcacttgtcagaagaggtactggctatgcttagtgcctctagcactttgcctgcagtggtcccagcaggctgtagctccaaaattcagccattagatgtatgcatcaaaagaactgtcaagaacttcctgcataaaaaatggaaggaacaggctcgggaaatggcagatactgcatgtgattctgatgtcctgcttcagctggtgcttgtctggctgggtgaagtgctaggtgtcattggggactgtccagagctagttcagcgctccttcctggtggctagtgttctgcctggccccgatggcaacattaactcacctacaagaaatgctgacatgcaggaggagctaattgcctccctagaggagcaactgaagctgagtggggaacattctgagtcttccactccacgacccagatcatctcctgaagagacaattgagcctgaaagtcttcaccagctctttgagggtgaaagtgagaccgagtctttctatggctttgaagaagctgacctagatctgatggagatttagtaatgaactagtccgtaacttgaaagtatttcgatttcttggctttatatatcttgtggaaaggacgactgggagctactgcaaagcctatt

SEQ ID NO: 1441 - DNA, 4049 bp, Homo sapiens
  source 1..4049: mol_type = genomic DNA
accgccaccatggcggacaccgacctgttcatggaatgtgaggaggaggagttggagccatggcagaaaatcagtgatgtcattgaggactctgtagttgaagattataattcagtggataaaactaccacagtttctgtgagccagcagccagtctcggctccagtgcccatcgctgcccatgcttctgttgctgggcacctctctacatccaccaccgttagtagcagcggggcacagaacagcgacagtacaaagaagactcttgtcacactaattgccaacaacaatgccccaggtacccagtttgttaagccgacagttggagttccacaagtgttctcccagatgacccctgtgaggccaggctccacaatgcctgtgaggcccaccaccaacaccttcaccaccgtcatcccggccactcttaccattcgaagcaccgtcccacagtcccagtcccagcagaccaagtccactcccagcacttctaccactcccactgccacacagccaacctcactggggcaactagctgttcagtctccaggccagtcaaaccagaccacgaatcccaagctagctccctccttcccctctccacctgcagtgagcattgccagctttgtcactgtgaagcgacctggtgttacaggcgaaaatagcaatgaagtggccaaattggtgaatacccttaacaccatcccttccctgggccagagtcctgggccagtggtggtgtccaacaacagctctgctcatggctctcaaagaaccagcggacctgagtcttcaatgaaagtgacctcttccatcccagtatttgacctccaggatggtggacggaaaatatgtccacgatgtaatgctcaatttcgtgttactgaagctttgagaggtcacatgtgttactgttgcccagaaatggttgaataccagaagaaaggaaagtccctggattcagaacccagtgtcccatcagcagcaaagcccccatcccctgagaaaacagctcctgttgcttccacaccctcttctacacctattcctgctctgtcaccgcctaccaaagtaccagaaccaaatgagaacgtgggcgatgccgtccagaccaaactcattatgcttgtagatgacttctactatggacgggatggtggcaaagtagcccagctcacaaatttccctaaggtcgccacatctttccgatgcccacattgtaccaaaaggctaaaaaacaatattcgattcatgaaccatatgaaacaccacgtagaactcgatcagcagaacggtgaggtagatggtcacactatctgccagcactgttaccgccagttttccactcccttccagcttcagtgccacttggaaaatgttcatagtccctatgaatctactaccaagtgcaagatctgtgaatgggcgtttgaaagtgagccactatttctccagcatatgaaggatactcataagcctggagagatgccttatgtttgccaggtgtgtcaatatcgctcctcactctactctgaggtagatgtccattttcggatgatccatgaggatacccggcatctgctctgcccttattgcctgaaggtcttcaaaaatggcaatgcattccaacagcattacatgaggcaccagaagagaaatgtttatcactgcaacaaatgccggctgcagtttctctttgccaaggacaaaattgaacacaagcttcaacaccataaaaccttccgtaaacccaagcagctggagggcttgaaaccaggcaccaaggtgacaatccgggcttcccgagggcagccacgaactgttcctgtatcctctaatgatacacctcccagcgccttgcaggaggcagcaccgctgacctcctcaatggaccctctgcctgtcttcctttatccccctgtccagcgcagcatccagaagagagctgttaggaaaatgagtgtcatgggccggcagacatgcctggagtgcagcttcgagatcccagacttccctaatcatttccctacttacgtacactgctctctgtgtcgctatagcacctgctgttctcgagcttatgccaaccacatgatcaacaatcatgttccacggaagagccccaagtatttggctttgtttaaaaattctgtgagtggaatcaagctggcctgcacttcatgtacctttgttacctctgtgggcgatgctatggccaagcatttggtattcaacccctctcacagatccagcagcatcctgccacggggactcacttggatagctcactcaaggcatggccagactcgtgaccgagtgcatgaccggaacgtgaagaatatgtaccctcctccttccttccccactaacaaagctgccactgtgaaatctgcgggggccaccccagctgagcctgaagagctactaactcccttagccccagcactcccatcaccagcctcaactgcaaccccaccaccaacccccactcacccgcaggctttagcccttccaccgctggctacagagggagccgaatgtctgaatgttgatgatcaggatgaagggagcccagtcacccaagaacctgagctagcatcaggtggtggtggtagtggtggagttggcaaaaaggagcagctgtctgtgaagaagcttcgagtagtactgtttgctctatgctgcaatacagaacaggcagctgaacacttccgaaatccccagcgacgtattcgccgttggcttcgacgtttccaggcctcccagggggagaatctagagggcaaatatctgagctttgaggcagaagagaaactggctgagtgggtgctaacccagcgcgaacaacagctacctgtaaatgaggagaccttgttccagaaggccaccaaaataggacgttctttggaaggggggtttaagatctcctatgagtgggctgtgcgtttcatgctgcggcaccacctgactccccatgcccggcgagctgtggcccacaccctacctaaggatgtagcagagaatgcaggactcttcattgattttgtacaacggcagattcacaaccaggacttacccttgtctatgattgtggctattgatgagatctctttgttcctggatacagaggtgctgagcagtgatgatcgaaaggagaatgccctgcagacagtgggcacaggggaaccttggtgtgatgtagtcctagccattctggcagatggcactgtccttcccaccctggttttctacagagggcagatggatcagcctgctaacatgccagactccatattgctagaggcaaaggagagtggctacagtgatgacgagatcatggagctgtggtcaactcgagtgtggcagaagcacacagcttgccagcgcagcaaaggcatgcttgtgatggactgtcatcgcactcacttgtcagaagaggtactggctatgcttagtgcctctagcactttgcctgcagtggtcccagcaggctgtagctccaaaattcagccattagatgtatgcatcaaaagaactgtcaagaacttcctgcataaaaaatggaaggaacaggctcgggaaatggcagatactgcatgtgattctgatgtcctgcttcagctggtgcttgtctggctgggtgaagtgctaggtgtcattggggactgtccagagctagttcagcgctccttcctggtggctagtgttctgcctggccccgatggcaacattaactcacctacaagaaatgctgacatgcaggaggagctaattgcctccctagaggagcaactgaagctgagtggggaacattctgagtcttccactccacgacccagatcatctcctgaagagacaattgagcctgaaagtcttcaccagctctttgagggtgaaagtgagaccgagtctttctatggctttgaagaagctgacctagatctgatggagatttagtaatgaactagtccgtaacttgaaagtatttcgatttcttggctttatatatcttgtggaaaggacgatgacaagttggtgtctagaaggcg

SEQ ID NO: 1442 - DNA, 4334 bp, Homo sapiens
  source 1..4334: mol_type = genomic DNA
accgccaccatggcggacaccgacctgttcatggaatgtgaggaggaggagttggagccatggcagaaaatcagtgatgtcattgaggactctgtagttgaagattataattcagtggataaaactaccacagtttctgtgagccagcagccagtctcggctccagtgcccatcgctgcccatgcttctgttgctgggcacctctctacatccaccaccgttagtagcagcggggcacagaacagcgacagtacaaagaagactcttgtcacactaattgccaacaacaatgctggcaatcctttggtccagcaaggtggacagccactcatcctgacccagaatccagccccaggtctgggcacaatggttactcaaccagtattgaggcctgttcaggtcatgcagaatgccaatcatgtgactagttcccctgtggcctcacaaccaatatttatcactacgcagggatttcctgtaaggaatgtccggcctgtacaaaatgcaatgaatcaggttgggattgtgctgaacgtacagcaaggccaaacggttagaccaattacactagttccagccccaggtacccagtttgttaagccgacagttggagttccacaagtgttctcccagatgacccctgtgaggccaggctccacaatgcctgtgaggcccaccaccaacaccttcaccaccgtcatcccggccactcttaccattcgaagcaccgtcccacagtcccagtcccagcagaccaagtccactcccagcacttctaccactcccactgccacacagccaacctcactggggcaactagctgttcagtctccaggccagtcaaaccagaccacgaatcccaagctagctccctccttcccctctccacctgcagtgagcattgccagctttgtcactgtgaagcgacctggtgttacaggcgaaaatagcaatgaagtggccaaattggtgaatacccttaacaccatcccttccctgggccagagtcctgggccagtggtggtgtccaacaacagctctgctcatggctctcaaagaaccagcggacctgagtcttcaatgaaagtgacctcttccatcccagtatttgacctccaggatggtggacggaaaatatgtccacgatgtaatgctcaatttcgtgttactgaagctttgagaggtcacatgtgttactgttgcccagaaatggttgaataccagaagaaaggaaagtccctggattcagaacccagtgtcccatcagcagcaaagcccccatcccctgagaaaacagctcctgttgcttccacaccctcttctacacctattcctgctctgtcaccgcctaccaaagtaccagaaccaaatgagaacgtgggcgatgccgtccagaccaaactcattatgcttgtagatgacttctactatggacgggatggtggcaaagtagcccagctcacaaatttccctaaggtcgccacatctttccgatgcccacattgtaccaaaaggctaaaaaacaatattcgattcatgaaccatatgaaacaccacgtagaactcgatcagcagaacggtgaggtagatggtcacactatctgccagcactgttaccgccagttttccactcccttccagcttcagtgccacttggaaaatgttcatagtccctatgaatctactaccaagtgcaagatctgtgaatgggcgtttgaaagtgagccactatttctccagcatatgaaggatactcataagcctggagagatgccttatgtttgccaggtgtgtcaatatcgctcctcactctactctgaggtagatgtccattttcggatgatccatgaggatacccggcatctgctctgcccttattgcctgaaggtcttcaaaaatggcaatgcattccaacagcattacatgaggcaccagaagagaaatgtttatcactgcaacaaatgccggctgcagtttctctttgccaaggacaaaattgaacacaagcttcaacaccataaaaccttccgtaaacccaagcagctggagggcttgaaaccaggcaccaaggtgacaatccgggcttcccgagggcagccacgaactgttcctgtatcctctaatgatacacctcccagcgccttgcaggaggcagcaccgctgacctcctcaatggaccctctgcctgtcttcctttatccccctgtccagcgcagcatccagaagagagctgttaggaaaatgagtgtcatgggccggcagacatgcctggagtgcagcttcgagatcccagacttccctaatcatttccctacttacgtacactgctctctgtgtcgctatagcacctgctgttctcgagcttatgccaaccacatgatcaacaatcatgttccacggaagagccccaagtatttggctttgtttaaaaattctgtgagtggaatcaagctggcctgcacttcatgtacctttgttacctctgtgggcgatgctatggccaagcatttggtattcaacccctctcacagatccagcagcatcctgccacggggactcacttggatagctcactcaaggcatggccagactcgtgaccgagtgcatgaccggaacgtgaagaatatgtaccctcctccttccttccccactaacaaagctgccactgtgaaatctgcgggggccaccccagctgagcctgaagagctactaactcccttagccccagcactcccatcaccagcctcaactgcaaccccaccaccaacccccactcacccgcaggctttagcccttccaccgctggctacagagggagccgaatgtctgaatgttgatgatcaggatgaagggagcccagtcacccaagaacctgagctagcatcaggtggtggtggtagtggtggagttggcaaaaaggagcagctgtctgtgaagaagcttcgagtagtactgtttgctctatgctgcaatacagaacaggcagctgaacacttccgaaatccccagcgacgtattcgccgttggcttcgacgtttccaggcctcccagggggagaatctagagggcaaatatctgagctttgaggcagaagagaaactggctgagtgggtgctaacccagcgcgaacaacagctacctgtaaatgaggagaccttgttccagaaggccaccaaaataggacgttctttggaaggggggtttaagatctcctatgagtgggctgtgcgtttcatgctgcggcaccacctgactccccatgcccggcgagctgtggcccacaccctacctaaggatgtagcagagaatgcaggactcttcattgattttgtacaacggcagattcacaaccaggacttacccttgtctatgattgtggctattgatgagatctctttgttcctggatacagaggtgctgagcagtgatgatcgaaaggagaatgccctgcagacagtgggcacaggggaaccttggtgtgatgtagtcctagccattctggcagatggcactgtccttcccaccctggttttctacagagggcagatggatcagcctgctaacatgccagactccatattgctagaggcaaaggagagtggctacagtgatgacgagatcatggagctgtggtcaactcgagtgtggcagaagcacacagcttgccagcgcagcaaaggcatgcttgtgatggactgtcatcgcactcacttgtcagaagaggtactggctatgcttagtgcctctagcactttgcctgcagtggtcccagcaggctgtagctccaaaattcagccattagatgtatgcatcaaaagaactgtcaagaacttcctgcataaaaaatggaaggaacaggctcgggaaatggcagatactgcatgtgattctgatgtcctgcttcagctggtgcttgtctggctgggtgaagtgctaggtgtcattggggactgtccagagctagttcagcgctccttcctggtggctagtgttctgcctggccccgatggcaacattaactcacctacaagaaatgctgacatgcaggaggagctaattgcctccctagaggagcaactgaagctgagtggggaacattctgagtcttccactccacgacccagatcatctcctgaagagacaattgagcctgaaagtcttcaccagctctttgagggtgaaagtgagaccgagtctttctatggctttgaagaagctgacctagatctgatggagatttagtaatgaactagtccgtaacttgaaagtatttcgatttcttggctttatatatcttgtggaaaggacgagttgccaatattgatgatcgcttt

SEQ ID NO: 1443 - DNA, 4148 bp, Homo sapiens
  source 1..4148: mol_type = genomic DNA
accgccaccatggcggacaccgacctgttcatggaatgtgaggaggaggagttggagccatggcagaaaatcagtgatgtcattgaggactctgtagttgaagattataattcagtggataaaactaccacagctggcaatcctttggtccagcaaggtggacagccactcatcctgacccagaatccagccccaggtctgggcacaatggttactcaaccagtattgaggcctgttcaggtcatgcagaatgccaatcatgtgactagttcccctgtggcctcacaaccaatatttatcactacgcagggatttcctgtaaggaatgtccggcctgtacaaaatgcaatgaatcaggttgggattgtgctgaacgtacagcaaggccaaacggttagaccaattacactagttccagccccaggtacccagtttgttaagccgacagttggagttccacaagtgttctcccagatgacccctgtgaggccaggctccacaatgcctgtgaggcccaccaccaacaccttcaccaccgtcatcccggccactcttaccattcgaagcaccgtcccacagtcccagtcccagcagaccaagtccactcccagcacttctaccactcccactgccacacagccaacctcactggggcaactagctgttcagtctccaggccagtcaaaccagaccacgaatcccaagctagtgagcattgccagctttgtcactgtgaagcgacctggtgttacaggcgaaaatagcaatgaagtggccaaattggtgaatacccttaacaccatcccttccctgggccagagtcctgggccagtggtggtgtccaacaacagctctgctcatggctctcaaagaaccagcggacctgagtcttcaatgaaagtgacctcttccatcccagtatttgacctccaggatggtggacggaaaatatgtccacgatgtaatgctcaatttcgtgttactgaagctttgagaggtcacatgtgttactgttgcccagaaatggttgaataccagaagaaaggaaagtccctggattcagaacccagtgtcccatcagcagcaaagcccccatcccctgagaaaacagctcctgttgcttccacaccctcttctacacctattcctgctctgtcaccgcctaccaaagtaccagaaccaaatgagaacgtgggcgatgccgtccagaccaaactcattatgcttgtagatgacttctactatggacgggatggtggcaaagtagcccagctcacaaatttccctaaggtcgccacatctttccgatgcccacattgtaccaaaaggctaaaaaacaatattcgattcatgaaccatatgaaacaccacgtagaactcgatcagcagaacggtgaggtagatggtcacactatctgccagcactgttaccgccagttttccactcccttccagcttcagtgccacttggaaaatgttcatagtccctatgaatctactaccaagtgcaagatctgtgaatgggcgtttgaaagtgagccactatttctccagcatatgaaggatactcataagcctggagagatgccttatgtttgccaggtgtgtcaatatcgctcctcactctactctgaggtagatgtccattttcggatgatccatgaggatacccggcatctgctctgcccttattgcctgaaggtcttcaaaaatggcaatgcattccaacagcattacatgaggcaccagaagagaaatgtttatcactgcaacaaatgccggctgcagtttctctttgccaaggacaaaattgaacacaagcttcaacaccataaaaccttccgtaaacccaagcagctggagggcttgaaaccaggcaccaaggtgacaatccgggcttcccgagggcagccacgaactgttcctgtatcctctaatgatacacctcccagcgccttgcaggaggcagcaccgctgacctcctcaatggaccctctgcctgtcttcctttatccccctgtccagcgcagcatccagaagagagctgttaggaaaatgagtgtcatgggccggcagacatgcctggagtgcagcttcgagatcccagacttccctaatcatttccctacttacgtacactgctctctgtgtcgctatagcacctgctgttctcgagcttatgccaaccacatgatcaacaatcatgttccacggaagagccccaagtatttggctttgtttaaaaattctgtgagtggaatcaagctggcctgcacttcatgtacctttgttacctctgtgggcgatgctatggccaagcatttggtattcaacccctctcacagatccagcagcatcctgccacggggactcacttggatagctcactcaaggcatggccagactcgtgaccgagtgcatgaccggaacgtgaagaatatgtaccctcctccttccttccccactaacaaagctgccactgtgaaatctgcgggggccaccccagctgagcctgaagagctactaactcccttagccccagcactcccatcaccagcctcaactgcaaccccaccaccaacccccactcacccgcaggctttagcccttccaccgctggctacagagggagccgaatgtctgaatgttgatgatcaggatgaagggagcccagtcacccaagaacctgagctagcatcaggtggtggtggtagtggtggagttggcaaaaaggagcagctgtctgtgaagaagcttcgagtagtactgtttgctctatgctgcaatacagaacaggcagctgaacacttccgaaatccccagcgacgtattcgccgttggcttcgacgtttccaggcctcccagggggagaatctagagggcaaatatctgagctttgaggcagaagagaaactggctgagtgggtgctaacccagcgcgaacaacagctacctgtaaatgaggagaccttgttccagaaggccaccaaaataggacgttctttggaaggggggtttaagatctcctatgagtgggctgtgcgtttcatgctgcggcaccacctgactccccatgcccggcgagctgtggcccacaccctacctaaggatgtagcagagaatgcaggactcttcattgattttgtacaacggcagattcacaaccaggacttacccttgtctatgattgtggctattgatgagatctctttgttcctggatacagaggtgctgagcagtgatgatcgaaaggagaatgccctgcagacagtgggcacaggggaaccttggtgtgatgtagtcctagccattctggcagatggcactgtccttcccaccctggttttctacagagggcagatggatcagcctgctaacatgccagactccatattgctagaggcaaaggagagtggctacagtgatgacgagatcatggagctgtggtcaactcgagtgtggcagaagcacacagcttgccagcgcagcaaaggcatgcttgtgatggactgtcatcgcactcacttgtcagaagaggtactggctatgcttagtgcctctagcactttgcctgcagtggtcccagcaggctgtagctccaaaattcagccattagatgtatgcatcaaaagaactgtcaagaacttcctgcataaaaaatggaaggaacaggctcgggaaatggcagatactgcatgtgattctgatgtcctgcttcagctggtgcttgtctggctgggtgaagtgctaggtgtcattggggactgtccagagctagttcagcgctccttcctggtggctagtgttctgcctggccccgatggcaacattaactcacctacaagaaatgctgacatgcaggaggagctaattgcctccctagaggagcaactgaagctgagtggggaacattctgagtcttccactccacgacccagatcatctcctgaagagacaattgagcctgaaagtcttcaccagctctttgagggtgaaagtgagaccgagtctttctatggctttgaagaagctgacctagatctgatggagatttagtaatgaactagtccgtaacttgaaagtatttcgatttcttggctttatatatcttgtggaaaggacgagttgttatcgaccttggcacattc

SEQ ID NO: 1444 - DNA, 2798 bp, Homo sapiens
  source 1..2798: mol_type = genomic DNA
accgccaccatgcgtccaatgcgaatttttgtgaatgatgaccgccatgtgatggcaaagcattcttccgtttatccaacacaagaggagctggaggcagtccagaacatggtgtcccacacggagcgggcgctcaaagctgtgtccgactggatagacgagcaggaaaagggtagcagcgagcaggcagagtccgataacatggatgtgcccccagaggacgacagtaaagaaggggctggggaacagaagacggagcacatgaccagaaccctgcggggagtgatgcgggtgggcctggtggcaaagggcctcctactcaagggggacttggatctggagctggtgctgctgtgtaaggagaagcccacaaccgccctcctggacaaggtggccgacaacctggccatccagcttgctgctgtaacagaagacaagtacgaaatactgcaatctgtcgacgatgctgcgattgtgataaaaaacacaaaagagcctccattgtccctgaccatccacctgacatcccctgttgtcagagaagaaatggagaaagtattagctggagaaacgctatcagtcaacgaccccccggacgttctggacaggcagaaatgccttgctgccttggcgtccctccgacacgccaagtggttccaggccagagccaacgggctgaagtcttgtgtcattgtgatccgggtcttgagggacctgtgcactcgcgtgcccacctggggtcccctccgaggctggcctctcgagctcctgtgtgagaaatccattggcacggccaacagaccgatgggtgctggcgaggccctgcggagagtgctggagtgcctggcgtcgggcatcgtgatgccagatggttctggcatttatgacccttgtgaaaaagaagccactgatgctattgggcatctagacagacagcaacgggaagatatcacacagagtgcgcagcacgcactgcggctcgctgccttcggccagctccataaagtcctaggcatggaccctctgccttccaagatgcccaagaaaccaaagaatgaaaacccagtggactacaccgttcagatcccaccaagcaccacctatgccattacgcccatgaaacgcccaatggaggaggacggggaggagaagtcgcccagcaaaaagaagaagaagattcagaagaaagaggagaaggcagagcccccccaggctatgaatgccctgatgcggttgaaccagctgaagccagggctgcagtacaagctggtgtcccagactgggcccgtccatgcccccatctttaccatgtctgtggaggttgatggcaattcattcgaggcctctgggccctccaaaaagacggccaagctgcacgtggccgttaaggtgttacaggacatgggcttgccgacgggtgctgaaggcagggactcgagcaagggggaggactcggctgaggagaccgaggcgaagccagcagtggtggcccctgccccagtggtagaagctgtctccacccctagtgcggcctttccctcagatgccactgccgagaacgtaaaacagcaggggccgatcctgacaaagcacggcaagaacccagtcatggagctgaacgagaagaggcgtgggctcaagtacgagctcatctccgagaccgggggcagccacgacaagcgcttcgtcatggaggtcgaagtggatggacagaagttccaaggtgctggttccaacaaaaaggtggcgaaggcctacgctgctcttgctgccctagaaaagcttttccctgacacccctctcgcccttgatgccaacaaaaagaagagagccccagtacccgtcagagggggaccgaaatttgctgctaagccacataaccctggcttcggcatgggaggccccatgcacaacgaagtgcccccaccccccaaccttcgagggcggggaagaggcgggagcatccggggacgagggcgcgggcgaggatttggtggcgccaaccatggaggctacatgaatgccggtgctgggtatggaagctatgggtacggaggcaactcggcgacagcaggctacagtcagttctacagcaacggagggcattctgggaatgccagtggcggtggcggcgggggcggtggtggctcctccggctatggctcctactaccaaggtgacaactacaactcaccggtgcccccaaaacacgctgggaagaagcagccgcacgggggccagcagaagccctcctacggctcgggctaccagtcccaccagggccagcagcagtcctacaaccagagcccctacagcaactatggccctccacagggcaagcagaaaggctataaccatggacaaggcagctactcctactcgaactcctacaactctcccgggggcgggggcggatccgactacaactacgagagcaaattcaactacagtggtagtggaggccgaagcggcgggaacagctacggctcaggcggggcatcctacaacccagggtcacacgggggctacggcggaggttctgggggcggctcctcataccaaggcaaacaaggaggctactcacagtcgaactacaactccccggggtccggccagaactacagtggccctcccagctcctaccagtcctcacaaggcggctatggcagaaacgcagaccacagcatgaactaccagtacagatagtaatgaactagtccgtaacttgaaagtatttcgatttcttggctttatatatcttgtggaaaggacgaccgcctacgctcgcatgtgtatca

SEQ ID NO: 1445 - DNA, 2786 bp, Homo sapiens
  source 1..2786: mol_type = genomic DNA
accgccaccatgcgtccaatgcgaatttttgtgaatgatgaccgccatgtgatggcaaagcattcttccgtttatccaacacaagaggagctggaggcagtccagaacatggtgtcccacacggagcgggcgctcaaagctgtgtccgactggatagacgagcaggaaaagggtagcagcgagcaggcagagtccgataacatggatgtgcccccagaggacgacagtaaagaaggggctggggaacagaagacggagcacatgaccagaaccctgcggggagtgatgcgggtgggcctggtggcaaagggcctcctactcaagggggacttggatctggagctggtgctgctgtgtaaggagaagcccacaaccgccctcctggacaaggtggccgacaacctggccatccagcttgctgctgtaacagaagacaagtacgaaatactgcaatctgtcgacgatgctgcgattgtgataaaaaacacaaaagagcctccattgtccctgaccatccacctgacatcccctgttgtcagagaagaaatggagaaagtattagctggagaaacgctatcagtcaacgaccccccggacgttctggacaggcagaaatgccttgctgccttggcgtccctccgacacgccaagtggttccaggccagagccaacgggctgaagtcttgtgtcattgtgatccgggtcttgagggacctgtgcactcgcgtgcccacctggggtcccctccgaggctggcctctcgagctcctgtgtgagaaatccattggcacggccaacagaccgatgggtgctggcgaggccctgcggagagtgctggagtgcctggcgtcgggcatcgtgatgccagatggttctggcatttatgacccttgtgaaaaagaagccactgatgctattgggcatctagacagacagcaacgggaagatatcacacagagtgcgcagcacgcactgcggctcgctgccttcggccagctccataaagtcctaggcatggaccctctgccttccaagatgcccaagaaaccaaagaatgaaaacccagtggactacaccgttcagatcccaccaagcaccacctatgccattacgcccatgaaacgcccaatggaggaggacggggaggagaagtcgcccagcaaaaagaagaagaagattcagaagaaagaggagaaggcagagcccccccaggctatgaatgccctgatgcggttgaaccagctgaagccagggctgcagtacaagctggtgtcccagactgggcccgtccatgcccccatctttaccatgtctgtggaggttgatggcaattcattcgaggcctctgggccctccaaaaagacggccaagctgcacgtggccgttaaggtgttacaggacatgggcttgccgacgggtgctgaaggcagggactcgagcaagggggaggactcggctgaggagaccgaggcgaagccagcagtggtggcccctgccccagtggtagaagctgtctccacccctagtgcggcctttccctcagatgccactgccgagcaggggccgatcctgacaaagcacggcaagaacccagtcatggagctgaacgagaagaggcgtgggctcaagtacgagctcatctccgagaccgggggcagccacgacaagcgcttcgtcatggaggtcgaagtggatggacagaagttccaaggtgctggttccaacaaaaaggtggcgaaggcctacgctgctcttgctgccctagaaaagcttttccctgacacccctctcgcccttgatgccaacaaaaagaagagagccccagtacccgtcagagggggaccgaaatttgctgctaagccacataaccctggcttcggcatgggaggccccatgcacaacgaagtgcccccaccccccaaccttcgagggcggggaagaggcgggagcatccggggacgagggcgcgggcgaggatttggtggcgccaaccatggaggctacatgaatgccggtgctgggtatggaagctatgggtacggaggcaactcggcgacagcaggctacagtcagttctacagcaacggagggcattctgggaatgccagtggcggtggcggcgggggcggtggtggctcctccggctatggctcctactaccaaggtgacaactacaactcaccggtgcccccaaaacacgctgggaagaagcagccgcacgggggccagcagaagccctcctacggctcgggctaccagtcccaccagggccagcagcagtcctacaaccagagcccctacagcaactatggccctccacagggcaagcagaaaggctataaccatggacaaggcagctactcctactcgaactcctacaactctcccgggggcgggggcggatccgactacaactacgagagcaaattcaactacagtggtagtggaggccgaagcggcgggaacagctacggctcaggcggggcatcctacaacccagggtcacacgggggctacggcggaggttctgggggcggctcctcataccaaggcaaacaaggaggctactcacagtcgaactacaactccccggggtccggccagaactacagtggccctcccagctcctaccagtcctcacaaggcggctatggcagaaacgcagaccacagcatgaactaccagtacagatagtaatgaactagtccgtaacttgaaagtatttcgatttcttggctttatatatcttgtggaaaggacgacagagccttggcttacgtgaacgc

SEQ ID NO: 1446 - DNA, 2210 bp, Homo sapiens
  source 1..2210: mol_type = genomic DNA
accgccaccatgcgtccaatgcgaatttttgtgaatgatgaccgccatgtgatggcaaagcattcttccgtttatccaacacaagaggagctggaggcagtccagaacatggtgtcccacacggagcgggcgctcaaagctgtgtccgactggatagacgagcaggaaaagggtagcagcgagcaggcagagtccgataacatggatgtgcccccagaggacgacagtaaagaaggggctggggaacagaagacggagcacatgaccagaaccctgcggggagtgatgcgggtgggcctggtggcaaagggcctcctactcaagggggacttggatctggagctggtgctgctgtgtaaggagaagcccacaaccgccctcctggacaaggtggccgacaacctggccatccagcttgctgctgtaacagaagacaagtacgaaatactgcaatctgtcgacgatgctgcgattgtgataaaaaacacaaaagagcctccattgtccctgaccatccacctgacatcccctgttgtcagagaagaaatggagaaagtattagctggagaaacgctatcagtcaacgaccccccggacgttctggacaggcagaaatgccttgctgccttggcgtccctccgacacgccaagtggttccaggccagagccaacgggctgaagtcttgtgtcattgtgatccgggtcttgagggacctgtgcactcgcgtgcccacctggggtcccctccgaggctggcctctcgagctcctgtgtgagaaatccattggcacggccaacagaccgatgggtgctggcgaggccctgcggagagtgctggagtgcctggcgtcgggcatcgtgatgccagatggttctggcatttatgacccttgtgaaaaagaagccactgatgctattgggcatctagacagacagcaacgggaagatatcacacagagtgcgcagcacgcactgcggctcgctgccttcggccagctccataaagtcctaggcatggaccctctgccttccaagatgcccaagaaaccaaagaatgaaaacccagtggactacaccgttcagatcccaccaagcaccacctatgccattacgcccatgaaacgcccaatggaggaggacggggaggagaagtcgcccagcaaaaagaagaagaagattcagaagaaagaggagaaggcagagcccccccaggctatgaatgccctgatgcggttgaaccagctgaagccagggctgcagtacaagctggtgtcccagactgggcccgtccatgcccccatctttaccatgtctgtggaggttgatggcaattcattcgaggcctctgggccctccaaaaagacggccaagctgcacgtggccgttaaggtgttacaggacatgggcttgccgacgggtgctgaaggcagggactcgagcaagggggaggactcggctgaggagaccgaggcgaagccagcagtggtggcccctgccccagtggtagaagctgtctccacccctagtgcggcctttccctcagatgccactgccgagcaggggccgatcctgacaaagcacggcaagaacccagtcatggagctgaacgagaagaggcgtgggctcaagtacgagctcatctccgagaccgggggcagccacgacaagcgcttcgtcatggaggtcgaagtggatggacagaagttccaaggtgctggttccaacaaaaaggtggcgaaggcctacgctgctcttgctgccctagaaaagcttttccctgacacccctctcgcccttgatgccaacaaaaagaagagagccccagtacccgtcagagggggaccgaaatttgctgctaagccacataaccctggcttcggcatgggaggccccatgcacaacgaagtgcccccaccccccaaccttcgagggcggggaagaggcgggagcatccggggacgagggcgcgggcgaggatttggtggcgccaaccatggaggctacatgaatgccggtgctgggtatggaagctatgggtacggaggcaactcggcgacagcaggctacagtgactttttcacagactgctacggctatcatgattttgggtcttcctagtaatgaactagtccgtaacttgaaagtatttcgatttcttggctttatatatcttgtggaaaggacgactatagcgccaaactcggcgtcac

SEQ ID NO: 1447 - DNA, 2174 bp, Homo sapiens
  source 1..2174: mol_type = genomic DNA
accgccaccatgcgtccaatgcgaatttttgtgaatgatgaccgccatgtgatggcaaagcattcttccgtttatccaacacaagaggagctggaggcagtccagaacatggtgtcccacacggagcgggcgctcaaagctgtgtccgactggatagacgagcaggaaaagggtagcagcgagcaggcagagtccgataacatggatgtgcccccagaggacgacagtaaagaaggggctggggaacagaagacggagcacatgaccagaaccctgcggggagtgatgcgggtgggcctggtggcaaagggcctcctactcaagggggacttggatctggagctggtgctgctgtgtaaggagaagcccacaaccgccctcctggacaaggtggccgacaacctggccatccagcttgctgctgtaacagaagacaagtacgaaatactgcaatctgtcgacgatgctgcgattgtgataaaaaacacaaaagagcctccattgtccctgaccatccacctgacatcccctgttgtcagagaagaaatggagaaagtattagctggagaaacgctatcagtcaacgaccccccggacgttctggacaggcagaaatgccttgctgccttggcgtccctccgacacgccaagtggttccaggccagagccaacgggctgaagtcttgtgtcattgtgatccgggtcttgagggacctgtgcactcgcgtgcccacctggggtcccctccgaggctggcctctcgagctcctgtgtgagaaatccattggcacggccaacagaccgatgggtgctggcgaggccctgcggagagtgctggagtgcctggcgtcgggcatcgtgatgccagatggttctggcatttatgacccttgtgaaaaagaagccactgatgctattgggcatctagacagacagcaacgggaagatatcacacagagtgcgcagcacgcactgcggctcgctgccttcggccagctccataaagtcctaggcatggaccctctgccttccaagatgcccaagaaaccaaagaatgaaaacccagtggactacaccgttcagatcccaccaagcaccacctatgccattacgcccatgaaacgcccaatggaggaggacggggaggagaagtcgcccagcaaaaagaagaagaagattcagaagaaagaggagaaggcagagcccccccaggctatgaatgccctgatgcggttgaaccagctgaagccagggctgcagtacaagctggtgtcccagactgggcccgtccatgcccccatctttaccatgtctgtggaggttgatggcaattcattcgaggcctctgggccctccaaaaagacggccaagctgcacgtggccgttaaggtgttacaggacatgggcttgccgacgggtgctgaaggcagggactcgagcaagggggaggactcggctgaggagaccgaggcgaagccagcagtggtggcccctgccccagtggtagaagctgtctccacccctagtgcggcctttccctcagatgccactgccgagcaggggccgatcctgacaaagcacggcaagaacccagtcatggagctgaacgagaagaggcgtgggctcaagtacgagctcatctccgagaccgggggcagccacgacaagcgcttcgtcatggaggtcgaagtggatggacagaagttccaaggtgctggttccaacaaaaaggtggcgaaggcctacgctgctcttgctgccctagaaaagcttttccctgacacccctctcgcccttgatgccaacaaaaagaagagagccccagtacccgtcagagggggaccgaaatttgctgctaagccacataaccctggcttcggcatgggaggccccatgcacaacgaagtgcccccaccccccaaccttcgagggcggggaagaggcgggagcatccggggacgagggcgcgggcgaggatttggtggcgccaaccatggaggctacatgaatgccggtgctgggtatggaagctatgggtacggaggcaactcggcgacagcaggctacacaggttttgtatagtaatgaactagtccgtaacttgaaagtatttcgatttcttggctttatatatcttgtggaaaggacgaaaatgcctattggctcttctactc

SEQ ID NO: 1448 - DNA, 2741 bp, Homo sapiens
  source 1..2741: mol_type = genomic DNA
accgccaccatggcaggtgggggcggcgacctgagcaccaggaggctgaatgaatgtatttcaccagtagcaaatgagatgaaccatcttcctgcacacagccacgatttgcaaaggatgttcacggaagaccagggtgtagatgacaggctgctctatgacattgtattcaagcacttcaaaagaaataaggtggagatttcaaatgcaataaaaaagacatttccattcctcgagggcctccgtgatcgtgatctcatcacaaataaaatgtttgaagattctcaagattcttgtagaaacctggtccctgtacagagagtggtgtacaatgttcttagtgaactggagaagacatttaacctgccagttctggaagcactgttcagcgatgtcaacatgcaggaataccccgatttaattcacatttataaaggctttgaaaatgtaatccatgacaaattgcctctccaagaaagtgaagaagaagagagggaggagaggtctggcctccaactaagtcttgaacaaggaactggtgaaaactcttttcgaagcctgacttggccaccttcgggttccccatctcatgctggtacaaccccacctgaaaatggactctcagagcacccctgtgaaacagaacagataaatgcaaagagaaaagatacaaccagtgacaaagatgattcgctaggaagccaacaaacaaatgaacaatgtgctcaaaaggctgagccaacagagtcctgcgaacaaattgctgtccaagtgaataatggggatgctggaagggagatgccctgcccgttgccctgtgatgaagaaagcccagaggcagagctacacaaccatggaatccaaattaattcctgttctgtgcgactggtggatataaaaaaggaaaagccattttctaattcaaaagttgagtgccaagcccaagcaagaactcatcataaccaggcatctgacataatagtcatcagcagtgaggactctgaaggatccactgacgttgatgagcccttagaagtcttcatctcagcaccgagaagtgagcctgtgatcaataatgacaaccctttagaatcaaatgatgaaaaggagggccaagaagccacttgctcacgaccccagattgtaccagagcccatggatttcagaaaattatctacattcagagaaagttttaagaaaagagtgataggacaagaccacgacttttcagaatccagtgaggaggaggcgcccgcagaagcctcgagcggggcactgagaagcaagcatggtgagaaggctcctatgacttctagaagtacatctacttggagaatacccagcaggaagagacgtttcagcagtagtgacttttcagacctgagtaatggagaagagcttcaggaaacctgcagctcatccctaagaagagggtcaggatcacagccacaagaacctgaaaataagaagtgctcctgtgtcatgtgttttccaaaaggtgtgccaagaagccaagaagcaaggactgaaagtagtcaagcatctgacatgatggataccatggatgttgaaaacaattctactttggaaaaacacagtgggaaaagaagaaaaaagagaaggcatagatctaaagtaaatggtctccaaagagggagaaagaaagacagacctagaaaacatttaactctgaataacaaagtccaaaagaaaagatggcaacaaagaggaagaaaagccaacactagacctttgaaaagaagaagaaaaagaggtccaagaattcccaaagatgaaaatattaattttaaacaatctgaacttcctgtgacctgtggtgaggtgaagggcactctatataaggagcgattcaaacaaggaacctcaaagaagtgtatacagagtgaggataaaaagtggttcactcccagggaatttgaaattgaaggagaccgcggagcatccaagaactggaagctaagtatacgctgcggtggatataccctgaaagtcctgatggagaacaaatttctgccagaaccaccaagcacaagaaaaaagagaatactggaatctcacaacaataccttagttgacccttgtgaggagcataagaagaagaacccagatgcttcagtcaagttctcagagtttttaaagaagtgctcagagacatggaagaccatttttgctaaagagaaaggaaaatttgaagatatggcaaaggcggacaaggcccattatgaaagagaaatgaaaacctatatccctcctaaaggggagaaaaaaaagaagttcaaggatcccaatgcacccaagaggcctcctttggcctttttcctgttctgctctgagtatcgcccaaaaatcaaaggagaacatcctggcctgtccattgatgatgttgtgaagaaactggcagggatgtggaataacaccgctgcagctgacaagcagttttatgaaaagaaggctgcaaagctgaaggaaaaatacaaaaaggatattgctgcatatcgagctaaaggaaagcctaattcagcaaaaaagagagttgtcaaggctgaaaaaagcaagaaaaagaaggaagaggaagaagatgaagaggatgaacaagaggaggaaaatgaagaagatgatgataaatagtaatgaactagtccgtaacttgaaagtatttcgatttcttggctttatatatcttgtggaaaggacgagaagtacatactgatgtgataggc

SEQ ID NO: 1449 - DNA, 2168 bp, Homo sapiens
  source 1..2168: mol_type = genomic DNA
accgccaccatggcaggtgggggcggcgacctgagcaccaggaggctgaatgaatgtatttcaccagtagcaaatgagatgaaccatcttcctgcacacagccacgatttgcaaaggatgttcacggaagaccagggtgtagatgacaggctgctctatgacattgtattcaagcacttcaaaagaaataaggtggagatttcaaatgcaataaaaaagacatttccattcctcgagggcctccgtgatcgtgatctcatcacaaataaaatgtttgaagattctcaagattcttgtagaaacctggtccctgtacagagagtggtgtacaatgttcttagtgaactggagaagacatttaacctgccagttctggaagcactgttcagcgatgtcaacatgcaggaataccccgatttaattcacatttataaaggctttgaaaatgtaatccatgacaaattgcctctccaagaaagtgaagaagaagagagggaggagaggtctggcctccaactaagtcttgaacaaggaactggtgaaaactcttttcgaagcctgacttggccaccttcgggttccccatctcatgctggtacaaccccacctgaaaatggactctcagagcacccctgtgaaacagaacagataaatgcaaagagaaaagatacaaccagtgacaaagatgattcgctaggaagccaacaaacaaatgaacaatgtgctcaaaaggctgagccaacagagtcctgcgaacaaattgctgtccaagtgaataatggggatgctggaagggagatgccctgcccgttgccctgtgatgaagaaagcccagaggcagagctacacaaccatggaatccaaattaattcctgttctgtgcgactggtggatataaaaaaggaaaagccattttctaattcaaaagttgagtgccaagcccaagcaagaactcatcataaccaggcatctgacataatagtcatcagcagtgaggactctgaaggatccactgacgttgatgagcccttagaagtcttcatctcagcaccgagaagtgagcctgtgatcaataatgacaaccctttagaatcaaatgatgaaaaggagggccaagaagccacttgctcacgaccccagattgtaccagagcccatggatttcagaaaattatctacattcagagaaagttttaagaaaagagtgataggacaagaccacgacttttcagaatccagtgaggaggaggcgcccgcagaagcctcgagcggggcactgagaagcaagcatggtgagaaggctcctatgacttctagaagtacatctacttggagaatacccagcaggaagagacgtttcagcagtagtgacttttcagacctgagtaatggagaagagcttcaggaaacctgcagctcatccctaagaagagggtcaggatcacagccacaagaacctgaaaataagaagtgctcctgtgtcatgtgttttccaaaaggtgtgccaagaagccaagaagcaaggactgaaagtagtcaagcatctgacatgatggataccatggatgttgaaaacaattctactttggaaaaacacagtgggaaaagaagaaaaaagagaaggcatagatctaaagtaaatggtctccaaagagggagaaagaaagacagacctagaaaacatttaactctgaataacaaagtccaaaagaaaagatggcaacaaagaggaagaaaagccaacactagacctttgaaaagaagaagaaaaagaggtccaagaattcccaaagatgaaaatattaattttaaacaatctgaacttcctgtgacctgtggtgaggtgaagggcactctatataaggagcgattcaaacaaggaacctcaaagaagtgtatacagagtgaggataaaaagtggttcactcccagggaatttgaaattgaaggagaccgcggagcatccaagaactggaagctaagtatacgctgcggtggatataccctgaaagtcctgatggagaacaaatttctgccagaaccaccaagcacaagaaaaaaggtgatgatcaagtagtaatgaactagtccgtaacttgaaagtatttcgatttcttggctttatatatcttgtggaaaggacgaaataatgtccaatagcggagcgag

SEQ ID NO: 1450 - DNA, 1460 bp, Homo sapiens
  source 1..1460: mol_type = genomic DNA
accgccaccatggcaggtgggggcggcgacctgagcaccaggatgttcacggaagaccagggtgtagatgacaggctgctctatgacattgtattcaagcacttcaaaagaaataaggtggagatttcaaatgcaataaaaaagacatttccattcctcgagggcctccgtgatcgtgatctcatcacaaataaaatgtttgaagattctcaagattcttgtagaaacctggtccctgtacagagagtggtgtacaatgttcttagtgaactggagaagacatttaacctgccagttctggaagcactgttcagcgatgtcaacatgcaggaataccccgatttaattcacatttataaaggctttgaaaatgtaatccatgacaaattgcctctccaagaaagtgaagaagaagagagggaggagaggtctggcctccaactaagtcttgaacaaggaactggtgaaaactcttttcgaagcctgacttggccaccttcgggttccccatctcatgctggtacaaccccacctgaaaatggactctcagagcacccctgtgaaacagaacagataaatgcaaagagaaaagatacaaccagtgacaaagatgattcgctaggaagccaacaaacaaatgaacaatgtgctcaaaaggctgagccaacagagtcctgcgaacaaattgctgtccaagtgaataatggggatgctggaagggagatgccctgcccgttgccctgtgatgaagaaagcccagaggcagagctacacaaccatggaatccaaattaattcctgttctgtgcgactggtggatataaaaaaggaaaagccattttctaattcaaaagttgagtgccaagcccaagcaagaactcatcataaccaggcatctgacataatagtcatcagcagtgaggactctgaaggatccactgacgttgatgagcccttagaagtcttcatctcagcaccgagaagtgagcctgtgatcaataatgacaaccctttagaatcaaatgatgaaaaggagggccaagaagccacttgctcacgaccccagattgtaccagagcccatggatttcagaaaattatctacattcagagaaagttttaagaaaagagtgataggacaagaccacgacttttcagaatccagtgaggaggaggcgcccgcagaagcctcgagcggggcactgagaagcaagcatgctcctatgacttctagaagtacatctacttggagaatacccagcaggaagagacgtttcagcagtagtgacttttcagacctgagtaatggagaagagcttcaggaaacctgcagctcatccctaagaagagggtcaggtaaagaagattagtaatgaactagtccgtaacttgaaagtatttcgatttcttggctttatatatcttgtggaaaggacgatacatcaaaccatcacctgtttcc

SEQ ID NO: 1451 - DNA, 2759 bp, Homo sapiens
  source 1..2759: mol_type = genomic DNA
accgccaccatggcaggtgggggcggcgacctgagcaccaggaggctgaatgaatgtatttcaccagtagcaaatgagatgaaccatcttcctgcacacagccacgatttgcaaaggatgttcacggaagaccagggtgtagatgacaggctgctctatgacattgtattcaagcacttcaaaagaaataaggtggagatttcaaatgcaataaaaaagacatttccattcctcgagggcctccgtgatcgtgatctcatcacaaataaaatgtttgaagattctcaagattcttgtagaaacctggtccctgtacagagagtggtgtacaatgttcttagtgaactggagaagacatttaacctgccagttctggaagcactgttcagcgatgtcaacatgcaggaataccccgatttaattcacatttataaaggctttgaaaatgtaatccatgacaaattgcctctccaagaaagtgaagaagaagagagggaggagaggtctggcctccaactaagtcttgaacaaggaactggtgaaaactcttttcgaagcctgacttggccaccttcgggttccccatctcatgctggtacaaccccacctgaaaatggactctcagagcacccctgtgaaacagaacagataaatgcaaagagaaaagatacaaccagtgacaaagatgattcgctaggaagccaacaaacaaatgaacaatgtgctcaaaaggctgagccaacagagtcctgcgaacaaattgctgtccaagtgaataatggggatgctggaagggagatgccctgcccgttgccctgtgatgaagaaagcccagaggcagagctacacaaccatggaatccaaattaattcctgttctgtgcgactggtggatataaaaaaggaaaagccattttctaattcaaaagttgagtgccaagcccaagcaagaactcatcataaccaggcatctgacataatagtcatcagcagtgaggactctgaaggatccactgacgttgatgagcccttagaagtcttcatctcagcaccgagaagtgagcctgtgatcaataatgacaaccctttagaatcaaatgatgaaaaggagggccaagaagccacttgctcacgaccccagattgtaccagagcccatggatttcagaaaattatctacattcagagaaagttttaagaaaagagtgataggacaagaccacgacttttcagaatccagtgaggaggaggcgcccgcagaagcctcgagcggggcactgagaagcaagcatggtgagaaggctcctatgacttctagaagtacatctacttggagaatacccagcaggaagagacgtttcagcagtagtgacttttcagacctgagtaatggagaagagcttcaggaaacctgcagctcatccctaagaagagggtcaggatcacagccacaagaacctgaaaataagaagtgctcctgtgtcatgtgttttccaaaaggtgtgccaagaagccaagaagcaaggactgaaagtagtcaagcatctgacatgatggataccatggatgttgaaaacaattctactttggaaaaacacagtgggaaaagaagaaaaaagagaaggcatagatctaaagtaaatggtctccaaagagggagaaagaaagacagacctagaaaacatttaactctgaataacaaagtccaaaagaaaagatggcaacaaagaggaagaaaagccaacactagacctttgaaaagaagaagaaaaagaggtccaagaattcccaaagatgaaaatattaattttaaacaatctgaacttcctgtgacctgtggtgaggtgaagggcactctatataaggagcgattcaaacaaggaacctcaaagaagtgtatacagagtgaggataaaaagtggttcactcccagggaatttgaaattgaaggagaccgcggagcatccaagaactggaagctaagtatacgctgcggtggatataccctgaaagtcctgatggagaacaaatttctgccagaaccaccaagcacaagaaaaaagagaatactggaatctcacaacaataccttagttgacccttgtccggaaaactcaaatatatgtgaggtgtgcaacaaatggggacggctgttctgctgcgacacttgtccaagatcctttcatgagcactgccacatcccatccgtggaagctaacaagaacccgtggagttgcatcttctgcaggataaagactattcaggaaagatgcccagaaagccaatcaggtcatcaggaatctgaagtcctgatgaggcagatgctgcctgaggagcagttgaaatgtgaattcctcctcttgaaggtctactgtgattcgaaaagctgctttttcgcctcagaaccgtattataacagagaggggtctcagggcccacagaagcccatgtggttaaacaaagtcaagacaagtttgaatgagcagatgtacacccgagtagaagggtttgtgcaggacatgcgtctcatctttcataaccacaaggaattttacagggaagataaattcaccagactgggaattcaagtacaggacatctttgagaagaatttcagaaacatttttgcaattcaggaaacaagcaagaacattataatgtttatttagtaatgaactagtccgtaacttgaaagtatttcgatttcttggctttatatatcttgtggaaaggacgattctaacaagcataaatgagctat

SEQ ID NO: 1452 - DNA, 1439 bp, Homo sapiens
  source 1..1439: mol_type = genomic DNA
accgccaccatgatgttcacggaagaccagggtgtagatgacaggctgctctatgacattgtattcaagcacttcaaaagaaataaggtggagatttcaaatgcaataaaaaagacatttccattcctcgagggcctccgtgatcgtgatctcatcacaaataaaatgtttgaagattctcaagattcttgtagaaacctggtccctgtacagagagtggtgtacaatgttcttagtgaactggagaagacatttaacctgccagttctggaagcactgttcagcgatgtcaacatgcaggaataccccgatttaattcacatttataaaggctttgaaaatgtaatccatgacaaattgcctctccaagaaagtgaagaagaagagagggaggagaggtctggcctccaactaagtcttgaacaaggaactggtgaaaactcttttcgaagcctgacttggccaccttcgggttccccatctcatgctggtacaaccccacctgaaaatggactctcagagcacccctgtgaaacagaacagataaatgcaaagagaaaagatacaaccagtgacaaagatgattcgctaggaagccaacaaacaaatgaacaatgtgctcaaaaggctgagccaacagagtcctgcgaacaaattgctgtccaagtgaataatggggatgctggaagggagatgccctgcccgttgccctgtgatgaagaaagcccagaggcagagctacacaaccatggaatccaaattaattcctgttctgtgcgactggtggatataaaaaaggaaaagccattttctaattcaaaagttgagtgccaagcccaagcaagaactcatcataaccaggcatctgacataatagtcatcagcagtgaggactctgaaggatccactgacgttgatgagcccttagaagtcttcatctcagcaccgagaagtgagcctgtgatcaataatgacaaccctttagaatcaaatgatgaaaaggagggccaagaagccacttgctcacgaccccagattgtaccagagcccatggatttcagaaaattatctacattcagagaaagttttaagaaaagagtgataggacaagaccacgacttttcagaatccagtgaggaggaggcgcccgcagaagcctcgagcggggcactgagaagcaagcatggtgagaaggctcctatgacttctagaagtacatctacttggagaatacccagcaggaagagacgtttcagcagtagtgacttttcagacctgagtaatggagaagagcttcaggaaacctgcagctcatccctaagaagagggtcaggtaaagaagattagtaatgaactagtccgtaacttgaaagtatttcgatttcttggctttatatatcttgtggaaaggacgaagtcaagaattgtatcgacttaat

SEQ ID NO: 1453 - DNA, 416 bp, Homo sapiens
  source 1..416: mol_type = genomic DNA
accgccaccatggtgcgatctcggctcactgcagtctccgcctcttgggttcaggctcatccacctgcagacatggggcgcagaaagtcaaaacgaaagccgcctcccaagaagaagatgacaggcaccctcgagacccagttcacctgccccttctgcaaccacgagaaatcctgtgatgtgaaaatggaccgtgcccgcaacaccggagtcatctcttgtaccgtgtgcctagaggaattccagacgcccataacgtatctgtcagaacccgtggatgtgtacagtgattggatagacgcctgcgaggcggccaatcagtagtaatgaactagtccgtaacttgaaagtatttcgatttcttggctttatatatcttgtggaaaggacgagaactaagaaccaagaaatggacc

SEQ ID NO: 1454 - DNA, 374 bp, Homo sapiens
  source 1..374: mol_type = genomic DNA
accgccaccatggctcatccacctgcagacatggggcgcagaaagtcaaaacgaaagccgcctcccaagaagaagatgacaggcaccctcgagacccagttcacctgccccttctgcaaccacgagaaatcctgtgatgtgaaaatggaccgtgcccgcaacaccggagtcatctcttgtaccgtgtgcctagaggaattccagacgcccataacgtatctgtcagaacccgtggatgtgtacagtgattggatagacgcctgcgaggcggccaatcagtagtaatgaactagtccgtaacttgaaagtatttcgatttcttggctttatatatcttgtggaaaggacgaggtttggtgacctcaatggtgctt

SEQ ID NO: 1455 - DNA, 1151 bp, Homo sapiens
  source 1..1151: mol_type = genomic DNA
accgccaccatgggagacatgggagatccaccaaaaaaaaaacgtctgatttccctatgtgttggttgcggcaatcagattcacgatcagtatattctgagggtttctccggatttggaatggcatgcggcatgtttgaaatgtgcggagtgtaatcagtatttggacgagagctgtacatgctttgttagggatgggaaaacctactgtaaaagagattatatcaggttgtacgggatcaaatgcgccaagtgcagcatcggcttcagcaagaacgacttcgtgatgcgtgcccgctccaaggtgtatcacatcgagtgtttccgctgtgtggcctgcagccgccagctcatccctggggacgaatttgcgcttcgggaggacggtctcttctgccgagcagaccacgatgtggtggagagggccagtctaggcgctggcgacccgctcagtcccctgcatccagcgcggccactgcaaatggcagcggagcccatctccgccaggcagccagccctgcggccccacgtccacaagcagccggagaagaccacccgcgtgcggactgtgctgaacgagaagcagctgcacaccttgcggacctgctacgccgcaaacccgcggccagatgcgctcatgaaggagcaactggtagagatgacgggcctcagtccccgtgtgatccgggtctggtttcaaaacaagcggtgcaaggacaagaagcgaagcatcatgatgaagcaactccagcagcagcagcccaatgacaaaactaatatccaggggatgacaggaactcccatggtggctgccagtccagagagacacgacggtggcttacaggctaacccagtggaagtacaaagttaccagccaccttggaaagtactgagcgacttcgccttgcagagtgacatagatcagcctgcttttcagcaactggtcaatttttcagaaggaggaccgggctctaattccactggcagtgaagtagcatcaatgtcctctcaacttccagatacacctaacagcatggtagccagtcctattgaggcatagtaatgaactagtccgtaacttgaaagtatttcgatttcttggctttatatatcttgtggaaaggacgaaagtaacggctcgtgggaagtgtc

SEQ ID NO: 1456 - DNA, 1181 bp, Homo sapiens
  source 1..1181: mol_type = genomic DNA
accgccaccatggtggatattatttttcattatccttttctgggtgctatgggtgatcattccaagaagaagcccgggacggccatgtgcgtgggctgcgggagtcagatccacgaccagtttatcctgcgggtgtcgcccgacctcgagtggcacgcggcctgcctcaagtgtgccgagtgcagccagtacctggacgagacgtgcacgtgcttcgtgagagacgggaagacctactgcaagcgggactatgtcaggctgttcggcatcaagtgcgccaagtgccaggtgggcttcagcagcagcgacctggtgatgagggcgcgggacagcgtgtaccacatcgagtgcttccgctgctccgtgtgcagccgccagctgctgcctggggacgagttctcgctgcgggagcacgagctgctctgccgcgccgaccacggcctcctgctcgagcgcgccgcggccggcagcccgcgcagccccggcccgcttcccggcgcccgcggcctgcatctgcccgacgctgggtcgggccggcagcccgcgttgcgcccgcacgtgcacaagcagacggagaagacgacccgcgtgcggactgtgctgaacgagaagcagctgcacactctgcggacctgctacgccgccaacccgcggcccgacgctctcatgaaggagcagctggtggagatgaccggcctgagcccgcgggtcatccgcgtctggttccagaacaagcgctgcaaggacaagaagaaatccattctcatgaagcagctgcagcagcagcagcacagcgacaagacgagccttcagggactgactgggacgcccctggtggcgggcagtcccatccgccatgagaacgccgtgcagggcagcgcagtggaggtgcagacgtaccagccgccgtggaaggcgctcagcgagtttgccctccagagcgacctggaccaacccgccttccaacagctggtctccttctccgagtccggctccctaggcaactcctccggcagcgacgtgacctccctgtcctcgcagctcccggacacccccaacagtatggtgccgagtcccgtggagacgtagtaatgaactagtccgtaacttgaaagtatttcgatttcttggctttatatatcttgtggaaaggacgagaccgctcggacccgctacggtag

SEQ ID NO: 1457 - DNA, 5330 bp, Homo sapiens
  source 1..5330: mol_type = genomic DNA
accgccaccatgacgtcaagttcgcccgctggcttggaaggttcagacctatcttccatcaacaccatgatgtcggcggtcatgagtgtagggaaggtcacagagaatggcgggagcccccaggggatcaagtccccctcgaagcctccaggaccaaatcggattggcagaaggaaccaggaaacgaaagaggagaagtcttcctataactgccccctgtgtgagaagatttgcactacccagcaccagctgaccatgcacattcgccagcacaacacagacactggaggagccgaccactcatgcagcatctgcggaaagtcactgagctcggccagctccctcgatcgccacatgctggtgcactctggcgagaggccttacaagtgcactgtgtgtggccagtcatttaccaccaatgggaacatgcacagacatatgaagatccatgagaaggaccctaacagtgccacagccacagcccctccatctcctctgaaacgtaggcgattgtcctccaagaggaaactgagtcacgatgccgagtcagagagagaagacccagcaccagctaaaaagatggtagaagacgggcagtcaggtgacttggagaagaaagctgatgaagtctttcactgcccagtatgtttcaaggagtttgtttgcaagtatggactggagacccacatggagacccattcagataacccactaagatgtgacatttgttgtgtcacctttcgaacacatcgaggactgctgcgtcacaacgcgcttgtccacaaacaacttcccagggatgcaatgggcagacctttcatacagaacaacccttcaattcctgctggcttccacgacttaggattcacggacttctcctgtaggaagtttcctcgcatttctcaggcctggtgcgaaacaaacctgcggaggtgcatcagcgagcaacaccgttttgtctgcgacacctgtgacaaggcgttccccatgctctgctcactggctctgcacaagcagacccatgtggcggcagaccagggtcaagaaaagccgcaggccacgcccctgcctggtgacgccctggaccagaagggcttcctggccttgcttggcctgcagcacaccaaagacgtcaggcctgcccccgccgaggagcccctgccggatgacaaccaggcaattcagctccagacactcaagtgtcagctacctcaggaccccggctgcaccaacctgctgagcctgtcacctttcgaagctgcttccctaggcggttctctcacagttctccccgcgaccaaggacagcataaagcacctgtccctgcagcccttccagaagggcttcatcatccagcctgacagcagcattgtggtcaagcccatctctggcgagtcggccatcgagctggcagacatccagcaaattctgaagatggcagcctcggctccccctcagatcagtcttccgcccttctccaaggcccctgccgccccactgcaggcgatcttcaagcacatgccccctctgaagccaaagcccctggtcacaccacggacggtggtggccacctccacgcccccgcctctcatcaacgcccagcaggcttccccgggctgtatcagccccagcctgccgccaccgcccctgaagctcctcaaaggctcagtggaggcggcctccaacgcccacctgctgcagtccaagtccgggacccagccccacgcggccacgcggctctccctgcagcagccgcgggcggagctgccgggccagcctgagatgaagacgcagctggagcaggacagcatcatcgaggccctgctgccgctgagcatggaggccaagatcaagcaggagatcacagagggggaactcaaggccttcatgacagcgcccggcggcaagaagacgcccgccatgcgcaaggtgctctacccctgccgcttctgcaaccaggtgtttgccttctcgggggtcttgcgtgcccacgtgcgctcccacctgggcatctcgccataccagtgcaacatctgcgactacatcgccgccgacaaggccgcgctcatccgccacctgcgcacgcacagtggggagcggccctacatttgcaagatctgccactaccccttcactgtcaaagccaactgcgagcggcacctgcgcaagaagcacctcaaggccacccgcaaggatatcgagaagaacatcgagtatgtgagtagcagcgcggccgagctggtggacgccttctgcgccccggacaccgtgtgccggctgtgcggcgaggacctcaagcactatcgtgccctgcgcatccacatgcgcacgcactgcggccgcggcctgggcgggggccacaagggccgcaagcccttcgagtgcaaggagtgcagcgccgcgttcgcggccaagcgcaactgcatccaccacatcctcaagcagcacctgcacgtgcccgagcaggacatcgagagctacgtgctggccgccgacggcctgggccccgcagaggcgccggccgctgaggcgtcggggcgcggggaggacagtggctgcgctgcccttggtgactgcaagcccctcactgccttcctggaaccccagaacggctttcttcacaggggccccacccagcctccacctccccatgtctcgatcaagttggagcccgccagtagctttgcggtggacttcaatgagcccctggacttctcgcagaagggcctggccctggtccaagtgaagcaggaaaacatctcctttctgagcccttcttccctggtcccctatgactgctccatggagcccatcgacctgtccatccccaagaacttcaggaaaggggacaaggatttggccactcccagcgaagccaagaagcctgaggaggaggcggggagcagcgagcagccctctccctgcccagcacccggcccttctcttcctgtaactttggggcccagcggaatcctggaaagccccatggcccctgctccggcggccaccccggaacccccagcacagcccctgcagggccctgttcagctggcggtcccaatctactcctcagccctggtcagcagccctccactcgtgggcagctcagccctcctgagtggcacagccttgctgcgtccactgcggcccaagcccccgctgcttttgccaaagccccccgtgacagaagagctgcccccgctggcctccattgcccagatcatctcatctgtatcctcggcccccaccctgctgaaaaccaaggtggcggacccagggcccgcaagcactggcagtaacaccacggcttcagacagcttaggaggttctgtccccaaagccgccaccaccgccacccccgctgccaccaccagcccaaaagagtctagtgagcctcccgctccagccagcagcccagaggctgcctctcccaccgagcagggcccagcgggcacgtcgaagaagaggggccggaaaagggggatgaggagccgaccccgcgccaacagcggcggggtggacctggactccagcggggagtttgccagcatcgagaagatgctggccaccacagacaccaacaagttcagtccgtttctgcagacagcggaggacaacactcaggatgaggtggccggagcccctgccgaccaccatgggcccagtgatgaagagcagggcagtcccccagaagacaagctgctgagggccaagcggaactcgtacaccaactgcctgcagaagatcacctgtccccactgtccccgggttttcccttgggccagctccctacagaggcacatgctcacacacactggtcagaaacccttcccttgtcaaaaatgcgatgccttcttttctaccaaatctaactgtgaacgccaccagttgcgcaaacacggagttaccacctgttccctgagaagaaacgggcttatcccccagtcaaaagagagtgatgttggatcccatgatagcacagacagtcagtcggatgcggagactgcagccgccgcgggcgaagtgctagacctcacctcacgggacagagagcagccgtcggagggcgccactgagctccgccaggtcgcaggggatgcgcctgtggagcaggccacggcggaaacggcctcgccggtgcaccgggaagagcacgggcgtggggagagccatgagccggaggaggagcatggcactgaggagagcactggggacgccgacggcgcggaagaggacgcgtcgagcaaccagagcctggacctggacttcgccaccaagctcatggacttcaagctggcggagggcgacggcgaggcaggcgccgggggcgcggcctcgcaggagcagaagctcgcctgcgacacctgtgggaagagcttcaagttcctgggcaccctgagccgccaccggaaggcgcacggccgccaggagcccaaggacgagaagggagatggcgccagcactgcagaggaggggccccagcccgcccctgaacaggaggagaagccccccgagaccccggcagaggtggtggagtcggccccgggtgccggggaggccccggcggaaaagctcgcggaggagacggagggcccctccgacggggagagcgcggccgagaaaaggtcctcagagaagagcgacgatgacaagaaaccaaagacagactcccccaaaagcgtggccagcaaggcagacaagaggaagaaggtctgcagcgtgtgcaacaagcggttctggtcgctgcaggacctgacccggcacatgcgctcccacacaggggaaaggccatacaaatgtcagacctgcgagcgaaccttcaccttgaagcacagcctggttcgccaccagcggatccaccagaaagccaggcatgccaaacaccacgggaaggacagcgacaaggaagagcggggtgaggaggacagcgagaatgagtccacccacagcggcaacaacgccgtctcagagaacgaggctgagctggctcccaatgccagcaaccacatggctgtcacccggagccggaaggagggcttggccagtgccaccaaggactgcagccacagggaggagaaggtcacggcagggtggccgtctgagcctggccagggtgaccttaacccagagagcccggcggccctggggcaggacctgctggagccgcgcagcaagaggcctgcccacccaatcctggccacagctgatggcgcctcccagctcgtggggatggagtagtaatgaactagtccgtaacttgaaagtatttcgatttcttggctttatatatcttgtggaaaggacgaacgttgagaacttacagacacaac

SEQ ID NO: 1458 - DNA, 4532 bp, Homo sapiens
  source 1..4532: mol_type = genomic DNA
accgccaccatgacgtcaagttcgcccgctggcttggaaggttcagacctatcttccatcaacaccatgatgtcggcggtcatgagtgtagggaaggtcacagagaatggcgggagcccccaggggatcaagtccccctcgaagcctccaggaccaaatcggattggcagaaggaaccaggaaacgaaagaggagaagtcttcctataactgccccctgtgtgagaagatttgcactacccagcaccagctgaccatgcacattcgccagcacaacacagacactggaggagccgaccactcatgcagcatctgcggaaagtcactgagctcggccagctccctcgatcgccacatgctggtgcactctggcgagaggccttacaagtgcactgtgtgtggccagtcatttaccaccaatgggaacatgcacagacatatgaagatccatgagaaggaccctaacagtgccacagccacagcccctccatctcctctgaaacgtaggcgattgtcctccaagaggaaactgagtcacgatgccgagtcagagagagaagacccagcaccagctaaaaagatggtagaagacgggcagtcaggtgacttggagaagaaagctgatgaagtctttcactgcccagtatgtttcaaggagtttgtttgcaagtatggactggagacccacatggagacccattcagataacccactaagatgtgacatttgttgtgtcacctttcgaacacatcgaggactgctgcgtcacaacgcgcttgtccacaaacaacttcccagggatgcaatgggcagacctttcatacagaacaacccttcaattcctgctggcttccacgacttaggattcacggacttctcctgtaggaagtttcctcgcatttctcaggcctggtgcgaaacaaacctgcggaggtgcatcagcgagcaacaccgttttgtctgcgacacctgtgacaaggcgttccccatgctctgctcactggctctgcacaagcagacccatgtggcggcagaccagggtcaagaaaagccgcaggccacgcccctgcctggtgacgccctggaccagaagggcttcctggccttgcttggcctgcagcacaccaaagacgtcaggcctgcccccgccgaggagcccctgccggatgacaaccaggcaattcagctccagacactcaagtgtcagctacctcaggaccccggctgcaccaacctgctgagcctgtcacctttcgaagctgcttccctaggcggttctctcacagttctccccgcgaccaaggacagcataaagcacctgtccctgcagcccttccagaagggcttcatcatccagcctgacagcagcattgtggtcaagcccatctctggcgagtcggccatcgagctggcagacatccagcaaattctgaagatggcagcctcggctccccctcagatcagtcttccgcccttctccaaggcccctgccgccccactgcaggcgatcttcaagcacatgccccctctgaagccaaagcccctggtcacaccacggacggtggtggccacctccacgcccccgcctctcatcaacgcccagcaggcttccccgggctgtatcagccccagcctgccgccaccgcccctgaagctcctcaaaggctcagtggaggcggcctccaacgcccacctgctgcagtccaagtccgggacccagccccacgcggccacgcggctctccctgcagcagccgcgggcggagctgccgggccagcctgagatgaagacgcagctggagcaggacagcatcatcgaggccctgctgccgctgagcatggaggccaagatcaagcaggagatcacagagggggaactcaaggccttcatgacagcgcccggcggcaagaagacgcccgccatgcgcaaggtgctctacccctgccgcttctgcaaccaggtgtttgccttctcgggggtcttgcgtgcccacgtgcgctcccacctgggcatctcgccataccagtgcaacatctgcgactacatcgccgccgacaaggccgcgctcatccgccacctgcgcacgcacagtggggagcggccctacatttgcaagatctgccactaccccttcactgtcaaagccaactgcgagcggcacctgcgcaagaagcacctcaaggccacccgcaaggatatcgagaagaacatcgagtatgtgagtagcagcgcggccgagctggtggacgccttctgcgccccggacaccgtgtgccggctgtgcggcgaggacctcaagcactatcgtgccctgcgcatccacatgcgcacgcactgcggccgcggcctgggcgggggccacaagggccgcaagcccttcgagtgcaaggagtgcagcgccgcgttcgcggccaagcgcaactgcatccaccacatcctcaagcagcacctgcacgtgcccgagcaggacatcgagagctacgtgctggccgccgacggcctgggccccgcagaggcgccggccgctgaggcgtcggggcgcggggaggacagtggctgcgctgcccttggtgactgcaagcccctcactgccttcctggaaccccagaacggctttcttcacaggggccccacccagcctccacctccccatgtctcgatcaagttggagcccgccagtagctttgcggtggacttcaatgagcccctggacttctcgcagaagggcctggccctggtccaagtgaagcaggaaaacatctcctttctgagcccttcttccctggtcccctatgactgctccatggagcccatcgacctgtccatccccaagaacttcaggaaaggggacaaggatttggccactcccagcgaagccaagaagcctgaggaggaggcggggagcagcgagcagccctctccctgcccagcacccggcccttctcttcctgtaactttggggcccagcggaatcctggaaagccccatggcccctgctccggcggccaccccggaacccccagcacagcccctgcagggccctgttcagctggcggtcccaatctactcctcagccctggtcagcagccctccactcgtgggcagctcagccctcctgagtggcacagccttgctgcgtccactgcggcccaagcccccgctgcttttgccaaagccccccgtgacagaagagctgcccccgctggcctccattgcccagatcatctcatctgtatcctcggcccccaccctgctgaaaaccaaggtggcggacccagggcccgcaagcactggcagtaacaccacggcttcagacagcttaggaggttctgtccccaaagccgccaccaccgccacccccgctgccaccaccagcccaaaagagtctagtgagcctcccgctccagccagcagcccagaggctgcctctcccaccgagcagggcccagcgggcacgtcgaagaagaggggccggaaaagggggatgaggagccgaccccgcgccaacagcggcggggtggacctggactccagcggggagtttgccagcatcgagaagatgctggccaccacagacaccaacaagttcagtccgtttctgcagacagcggaggacaacactcaggatgaggtggccggagcccctgccgaccaccatgggcccagtgatgaagagcagggcagtcccccagaagacaagctgctgagggccaagcggaactcgtacaccaactgcctgcagaagatcacctgtccccactgtccccgggttttcccttgggccagctccctacagaggcacatgctcacacacactggtcagaaacccttcccttgtcaaaaatgcgatgccttcttttctaccaaatctaactgtgaacgccaccagttgcgcaaacacggagttaccacctgttccctgagaagaaacgggcttatcccccagtcaaaagagagtgatgttggatcccatgatagcacaggggaaaggccatacaaatgtcagacctgcgagcgaaccttcaccttgaagcacagcctggttcgccaccagcggatccaccagaaagccaggcatgccaaacaccacgggaaggacagcgacaaggaagagcggggtgaggaggacagcgagaatgagtccacccacagcggcaacaacgccgtctcagagaacgaggctgagctggctcccaatgccagcaaccacatggctgtcacccggagccggaaggagggcttggccagtgccaccaaggactgcagccacagggaggagaaggtcacggcagggtggccgtctgagcctggccagggtgaccttaacccagagagcccggcggccctggggcaggacctgctggagccgcgcagcaagaggcctgcccacccaatcctggccacagctgatggcgcctcccagctcgtggggatggagtagtaatgaactagtccgtaacttgaaagtatttcgatttcttggctttatatatcttgtggaaaggacgagtatgaatctttgctcttctacag

SEQ ID NO: 1459 - DNA, 5165 bp, Homo sapiens
  source 1..5165: mol_type = genomic DNA
accgccaccatgacgtcaagttcgcccgctggcttggaaggttcagacctatcttccatcaacaccatgatgtcggcggtcatgagtgtagggaaggtcacagagaatggcgggagcccccaggggatcaagtccccctcgaagcctccaggaccaaatcggattggcagaaggaaccaggaaacgaaagaggagaagtcttcctataactgccccctgtgtgagaagatttgcactacccagcaccagctgaccatgcacattcgccagcacaacacagacactggaggagccgaccactcatgcagcatctgcggaaagtcactgagctcggccagctccctcgatcgccacatgctggtgcactctggcgagaggccttacaagtgcactgtgtgtggccagtcatttaccaccaatgggaacatgcacagacatatgaagatccatgagaaggaccctaacagtgccacagccacagcccctccatctcctctgaaacgtaggcgattgtcctccaagaggaaactgagtcacgatgccgagtcagagagagaagacccagcaccagctaaaaagatggtagaagacgggcagtcaggtgacttggagaagaaagctgatgaagtctttcactgcccagtatgtttcaaggagtttgtttgcaagtatggactggagacccacatggagacccattcagataacccactaagatgtgacatttgttgtgtcacctttcgaacacatcgaggactgctgcgtcacaacgcgcttgtccacaaacaacttcccagggatgcaatgggcagacctttcatacagaacaacccttcaattcctgctggcttccacgacttaggattcacggacttctcctgtaggaagtttcctcgcatttctcaggcctggtgcgaaacaaacctgcggaggtgcatcagcgagcaacaccgttttgtctgcgacacctgtgacaaggcgttccccatgctctgctcactggctctgcacaagcagacccatgtggcggcagaccagggtcaagaaaagccgcaggccacgcccctgcctggtgacgccctggaccagaagggcttcctggccttgcttggcctgcagcacaccaaagacgtcaggcctgcccccgccgaggagcccctgccggatgacaaccaggcaattcagctccagacactcaagtgtcagctacctcaggaccccggctgcaccaacctgctgagcctgtcacctttcgaagctgcttccctaggcggttctctcacagttctccccgcgaccaaggacagcataaagcacctgtccctgcagcccttccagaagggcttcatcatccagcctgacagcagcattgtggtcaagcccatctctggcgagtcggccatcgagctggcagacatccagcaaattctgaagatggcagcctcggctccccctcagatcagtcttccgcccttctccaaggcccctgccgccccactgcaggcgatcttcaagcacatgccccctctgaagccaaagcccctggtcacaccacggacggtggtggccacctccacgcccccgcctctcatcaacgcccagcaggcttccccgggctgtatcagccccagcctgccgccaccgcccctgaagctcctcaaaggctcagtggaggcggcctccaacgcccacctgctgcagtccaagtccgggacccagccccacgcggccacgcggctctccctgcagcagccgcgggcggagctgccgggccagcctgagatgaagacgcagctggagcaggacagcatcatcgaggccctgctgccgctgagcatggaggccaagatcaagcaggagatcacagagggggaactcaaggccttcatgacagcgcccggcggcaagaagacgcccgccatgcgcaaggtgctctacccctgccgcttctgcaaccaggtgtttgccttctcgggggtcttgcgtgcccacgtgcgctcccacctgggcatctcgccataccagtgcaacatctgcgactacatcgccgccgacaaggccgcgctcatccgccacctgcgcacgcacagtggggagcggccctacatttgcaagatctgccactaccccttcactgtcaaagccaactgcgagcggcacctgcgcaagaagcacctcaaggccacccgcaaggatatcgagaagaacatcgagtatgtgagtagcagcgcggccgagctggtggacgccttctgcgccccggacaccgtgtgccggctgtgcggcgaggacctcaagcactatcgtgccctgcgcatccacatgcgcacgcactgcggccgcggcctgggcgggggccacaagggccgcaagcccttcgagtgcaaggagtgcagcgccgcgttcgcggccaagcgcaactgcatccaccacatcctcaagcagcacctgcacgtgcccgagcaggacatcgagagctacgtgctggccgccgacggcctgggccccgcagaggcgccggccgctgaggcgtcggggcgcggggaggacagtggctgcgctgcccttggtgactgcaagcccctcactgccttcctggaaccccagaacggctttcttcacaggggccccacccagcctccacctccccatgtctcgatcaagttggagcccgccagtagctttgcggtggacttcaatgagcccctggacttctcgcagaagggcctggccctggtccaagtgaagcaggaaaacatctcctttctgagcccttcttccctggtcccctatgactgctccatggagcccatcgacctgtccatccccaagaacttcaggaaaggggacaaggatttggccactcccagcgaagccaagaagcctgaggaggaggcggggagcagcgagcagccctctccctgcccagcacccggcccttctcttcctgtaactttggggcccagcggaatcctggaaagccccatggcccctgctccggcggccaccccggaacccccagcacagcccctgcagggccctgttcagctggcggtcccaatctactcctcagccctggtcagcagccctccactcgtgggcagctcagccctcctgagtggcacagccttgctgcgtccactgcggcccaagcccccgctgcttttgccaaagccccccgtgacagaagagctgcccccgctggcctccattgcccagatcatctcatctgtatcctcggcccccaccctgctgaaaaccaaggtggcggacccagggcccgcaagcactggcagtaacaccacggcttcagacagcttaggaggttctgtccccaaagccgccaccaccgccacccccgctgccaccaccagcccaaaagagtctagtgagcctcccgctccagccagcagcccagaggctgcctctcccaccgagcagggcccagcgggcacgtcgaagaagaggggccggaaaagggggatgaggagccgaccccgcgccaacagcggcggggtggacctggactccagcggggagtttgccagcatcgagaagatgctggccaccacagacaccaacaagttcagtccgtttctgcagacagcggaggacaacactcaggatgaggtggccggagcccctgccgaccaccatgggcccagtgatgaagagcagggcagtcccccagaagacaagctgctgagggccaagcggaactcgtacaccaactgcctgcagaagatcacctgtccccactgtccccgggttttcccttgggccagctccctacagaggcacatgctcacacacactgacagtcagtcggatgcggagactgcagccgccgcgggcgaagtgctagacctcacctcacgggacagagagcagccgtcggagggcgccactgagctccgccaggtcgcaggggatgcgcctgtggagcaggccacggcggaaacggcctcgccggtgcaccgggaagagcacgggcgtggggagagccatgagccggaggaggagcatggcactgaggagagcactggggacgccgacggcgcggaagaggacgcgtcgagcaaccagagcctggacctggacttcgccaccaagctcatggacttcaagctggcggagggcgacggcgaggcaggcgccgggggcgcggcctcgcaggagcagaagctcgcctgcgacacctgtgggaagagcttcaagttcctgggcaccctgagccgccaccggaaggcgcacggccgccaggagcccaaggacgagaagggagatggcgccagcactgcagaggaggggccccagcccgcccctgaacaggaggagaagccccccgagaccccggcagaggtggtggagtcggccccgggtgccggggaggccccggcggaaaagctcgcggaggagacggagggcccctccgacggggagagcgcggccgagaaaaggtcctcagagaagagcgacgatgacaagaaaccaaagacagactcccccaaaagcgtggccagcaaggcagacaagaggaagaaggtctgcagcgtgtgcaacaagcggttctggtcgctgcaggacctgacccggcacatgcgctcccacacaggggaaaggccatacaaatgtcagacctgcgagcgaaccttcaccttgaagcacagcctggttcgccaccagcggatccaccagaaagccaggcatgccaaacaccacgggaaggacagcgacaaggaagagcggggtgaggaggacagcgagaatgagtccacccacagcggcaacaacgccgtctcagagaacgaggctgagctggctcccaatgccagcaaccacatggctgtcacccggagccggaaggagggcttggccagtgccaccaaggactgcagccacagggaggagaaggtcacggcagggtggccgtctgagcctggccagggtgaccttaacccagagagcccggcggccctggggcaggacctgctggagccgcgcagcaagaggcctgcccacccaatcctggccacagctgatggcgcctcccagctcgtggggatggagtagtaatgaactagtccgtaacttgaaagtatttcgatttcttggctttatatatcttgtggaaaggacgattcattcagcacataatcagcata

SEQ ID NO: 1460 - DNA, 1526 bp, Homo sapiens
  source 1..1526: mol_type = genomic DNA
accgccaccatggaactcttaacattcagggatgtggccatagaattctctccagaagagtggaaatgcctggaccctgaccagcagaatttgtatagagatgtgatgttggagaactacaggaacctggtctccctgggtgttgctatctctaacccagacctggtcacctgtctggagcaaagaaaagagccctacaatgtgaagatacataagatcgtagccagacccccagctatgtgttctcatttcacccaagaccattggccagtgcagggcatagaagattcattccacaaacttatactgagaagatatgagaaatgtggacatgataatttacaattaagaaaaggctgtaaaagtttgaatgagtgtaagttgcagaaaggaggttataatgaatttaatgaatgcttgtcaactacccagagcaaaatacttcagtgtaaagcaagtgtcaaagttgttagtaaattttcaaattcaaacaaacgtaagacaagacatactggagagaaacactttaaagaatgtggcaaatcatttcagaagttttcacacctaactcaacataaggtaattcatgctggagagaaaccctacacttgtgaagaatgtggcaaagcctttaaatggtctttaatatttaatgaacataagagaattcatactggagagaaaccttttacttgtgaagaatgtggcagcatctttaccacatcctcacactttgctaagcataaaataattcatactggagaaaaaccctataaatgtgaagaatgtggcaaagcctttaataggttcacaacccttactaaacataagagaattcatgctggagagaaacccatcacatgtgaagaatgtaggaaaatctttacctcatcctcaaactttgccaaacataagcgaattcatactggagagaaaccctacaaatgtgaagaatgtggcaaagcctttaataggtccacaacccttactaaacataagagaattcatactggagagaaaccctacacatgtgaagaatgtggcaaagcttttagacagtcctcaaaactgaatgaacataagaaagttcatactggagagcggccctacaaatgtgatgaatgtggcaaagcctttggacggtccagggtcctgaatgaacataaaaaaattcatactggagagaaaccctacaaatgtgaagaatgtggcaaagcctttagacggtccacagatcggagtcaacataagaaaattcatagtgcagataaaccctacaaatgtaaagaatgtgacaaagcctttaaacaattttcgctcctgagtcaacataagaaaattcatactgtagataaaccctacaaatgtaaagattgtgacaaagcctttaaacggttctcacacctgaataaacataagaaaattcatacttagtaatgaactagtccgtaacttgaaagtatttcgatttcttggctttatatatcttgtggaaaggacgacggtattgccattaccgatcctat

SEQ ID NO: 1461 - DNA, 1166 bp, Homo sapiens
  source 1..1166: mol_type = genomic DNA
accgccaccatggaaagaattctaagtcaaggccctgtgtattccagttttaaaggaggctggaaatgcaaggatcatactgagatgctgcaagaaaatcagggatgtattaggaaagtaacagtctctcatcaagaagccctggctcaacatatgaatatcagtactgtggagaggccctatggatgccatgaatgtggaaaaacttttggtcgacgcttttccctggtgttacaccagaggactcatactggagagaaaccatatgcatgtaaggaatgtggcaaaacctttagccagatttcaaaccttgtgaaacaccaaatgatacatactggaaagaaaccccatgagtgtaaggactgtaataaaacattcagttacctttcatttcttattgaacaccagagaacgcacactggggagaaaccttatgaatgtactgagtgtggaaaggcctttagccgtgcctccaacctcactcgacatcaaagaattcacataggaaagaaacaatatatatgtaggaaatgtggtaaagcatttagcagtggctcagaactcattcgccaccagattacacatactggagagaaaccttatgaatgcattgaatgtgggaaggcatttcgccgtttctcacaccttactcgacatcagagcatccatacaaccaaaaccccgtatgaatgtaatgaatgtaggaaagctttccgttgtcactcattccttattaaacatcagagaattcatgctggagaaaagctctatgaatgtgatgaatgtggtaaagttttcacttggcatgcatcccttattcaacatacgaagagtcacactggagagaaaccctatgcgtgtgctgaatgtgataaagccttcagccggagcttttccctcattctacatcagagaactcatactggagagaaaccctatgtatgtaaggtatgcaacaaatccttcagctggagctcaaaccttgctaaacatcagaggacacacactcttgacaacccctatgaatatgaaaattcatttaattaccactcattccttactgaacaccagtagtaatgaactagtccgtaacttgaaagtatttcgatttcttggctttatatatcttgtggaaaggacgaagcgacgttcattggtgtccgtaa

SEQ ID NO: 1462 - DNA, 1925 bp, Homo sapiens
  source 1..1925: mol_type = genomic DNA
accgccaccatgttgttagcccaaataaatcgagattctcagggaatgacagagtttcctggaggagggatggaggcgcaacatgttacgctgtgcttgacagaggcagtcaccgtggcagatgcaaaactcatagatggccaggtcattcagttggaagatggttctgcggcctatgttcaacatgtacccatacctaaaagtacaggggacagtttgcgtctagaggatggtcaagcagtacagttagaagatggtaccacagcatttattcaccacacctccaaagatagttatgaccagagtgcattacaggcggttcagctggaagatggtaccacagcttatatccaccatgcagtgcaagtcccgcagtctgacaccatcttggcaattcaggctgatgggacagtggcaggtctgcacactggggatgctacaattgaccctgacaccatcagtgctttggaacagtatgcagcaaaggtgtccattgatggaagtgaaagtgtagcaggtactggaatgattggagaaaatgagcaagagaaaaaaatgcagattgttttacaaggacatgctacaagagtaactgctaaatctcaacagagtggagagaaggcatttcgatgtgaatatgatggatgtggaaaattatatacaacagctcatcatctcaaggtccatgagaggtcacacacaggagatcggccttatcagtgtgagcatgcaggctgtgggaaggcatttgcaacaggttatggattaaaaagtcacgtcagaactcatacaggagaaaagccatatcggtgttcggaagataattgtactaaatctttcaaaacttcaggagatctacagaaacacatcagaactcatacaggagaaaggccctttaagtgtcccttcgaaggctgcggtcggtcctttacaacatcaaatatcagaaaagtgcacgttaggacacacacaggagaaagaccttattactgcacagagccaggatgtgggagggcatttgccagtgcaacaaattataaaaaccatgtgaggatacacacaggagaaaagccatatgtttgtacagttcctgggtgtgacaaaaggtttacagaatattccagtttgtacaaacatcatgttgtccacactcattccaaaccttacaactgtaaccactgtgggaagacatacaagcagatctccacgctggccatgcacaaacggacagcccacaacgacactgagcccatcgaggaggagcaggaagccttctttgagccgcccccaggtcaaggtgaagatgttcttaaagggtcccagattacgtatgttacaggtgtagaaggggacgacgttgtttctacacaagtagccacagtaacccaatctggactgagtcaacaagttacactcatatcccaggatgggactcagcatgtcaacatatctcaagctgacatgcaggccattggcaacaccatcacaatggtaacgcaggatggcacgcccatcacagtccccgcccatgatgcagtcatctcctcagcaggaacgcactctgttgctatggttactgctgagggtacagaaggggaacaggttgcaattgtagctcaagacttggcagcattccatactgcctcatcagaaatggggcaccagcagcatagccatcacttagtaaccacagaaaccagacctctgaccttagtagcaacatccaatggcacccagattgcagttcagcttggagaacagccatctctggaagaagccatcagaatagcgtctagaatccaacaaggagaaacgccagggttggatgattagtaatgaactagtccgtaacttgaaagtatttcgatttcttggctttatatatcttgtggaaaggacgaaatactgtacctcgtaccgtcggt

SEQ ID NO: 1463 - DNA, 2015 bp, Homo sapiens
  source 1..2015: mol_type = genomic DNA
accgccaccatgttgttagcccaaataaatcgagattctcagggaatgacagagtttcctggaggagggatggaggcgcaacatgttacgctgtgcttgacagaggcagtcaccgtggcagatggtgacaacttagaaaatatggaaggcgtaagcttgcaagcagtaacacttgcagatggttctactgcttacatacaacacaattctaaagatgcaaaactcatagatggccaggtcattcagttggaagatggttctgcggcctatgttcaacatgtacccatacctaaaagtagggacagtttgcgtctagaggatggtcaagcagtacagttagaagatggtaccacagcatttattcaccacacctccaaagatagttatgaccagagtgcattacaggcggttcagctggaagatggtaccacagcttatatccaccatgcagtgcaagtcccgcagtctgacaccatcttggcaattcaggctgatgggacagtggcaggtctgcacactggggatgctacaattgaccctgacaccatcagtgctttggaacagtatgcagcaaaggtgtccattgatggaagtgaaagtgtagcaggtactggaatgattggagaaaatgagcaagagaaaaaaatgcagattgttttacaaggacatgctacaagagtaactgctaaatctcaacagagtggagagaaggcatttcgatgtgaatatgatggatgtggaaaattatatacaacagctcatcatctcaaggtccatgagaggtcacacacaggagatcggccttatcagtgtgagcatgcaggctgtgggaaggcatttgcaacaggttatggattaaaaagtcacgtcagaactcatacaggagaaaagccatatcggtgttcggaagataattgtactaaatctttcaaaacttcaggagatctacagaaacacatcagaactcatacaggagaaaggccctttaagtgtcccttcgaaggctgcggtcggtcctttacaacatcaaatatcagaaaagtgcacgttaggacacacacaggagaaagaccttattactgcacagagccaggatgtgggagggcatttgccagtgcaacaaattataaaaaccatgtgaggatacacacaggagaaaagccatatgtttgtacagttcctgggtgtgacaaaaggtttacagaatattccagtttgtacaaacatcatgttgtccacactcattccaaaccttacaactgtaaccactgtgggaagacatacaagcagatctccacgctggccatgcacaaacggacagcccacaacgacactgagcccatcgaggaggagcaggaagccttctttgagccgcccccaggtcaaggtgaagatgttcttaaagggtcccagattacgtatgttacaggtgtagaaggggacgacgttgtttctacacaagtagccacagtaacccaatctggactgagtcaacaagttacactcatatcccaggatgggactcagcatgtcaacatatctcaagctgacatgcaggccattggcaacaccatcacaatggtaacgcaggatggcacgcccatcacagtccccgcccatgatgcagtcatctcctcagcaggaacgcactctgttgctatggttactgctgagggtacagaaggggaacaggttgcaattgtagctcaagacttggcagcattccatactgcctcatcagaaatggggcaccagcagcatagccatcacttagtaaccacagaaaccagacctctgaccttagtagcaacatccaatggcacccagattgcagttcagcttggagaacagccatctctggaagaagccatcagaatagcgtctagaatccaacaaggagaaacgccagggttggatgattagtaatgaactagtccgtaacttgaaagtatttcgatttcttggctttatatatcttgtggaaaggacgagctgtgcagattgtgcttgtccca

SEQ ID NO: 1464 - DNA, 2018 bp, Homo sapiens
  source 1..2018: mol_type = genomic DNA
accgccaccatgttgttagcccaaataaatcgagattctcagggaatgacagagtttcctggaggagggatggaggcgcaacatgttacgctgtgcttgacagaggcagtcaccgtggcagatggtgacaacttagaaaatatggaaggcgtaagcttgcaagcagtaacacttgcagatggttctactgcttacatacaacacaattctaaagatgcaaaactcatagatggccaggtcattcagttggaagatggttctgcggcctatgttcaacatgtacccatacctaaaagtacaggggacagtttgcgtctagaggatggtcaagcagtacagttagaagatggtaccacagcatttattcaccacacctccaaagatagttatgaccagagtgcattacaggcggttcagctggaagatggtaccacagcttatatccaccatgcagtgcaagtcccgcagtctgacaccatcttggcaattcaggctgatgggacagtggcaggtctgcacactggggatgctacaattgaccctgacaccatcagtgctttggaacagtatgcagcaaaggtgtccattgatggaagtgaaagtgtagcaggtactggaatgattggagaaaatgagcaagagaaaaaaatgcagattgttttacaaggacatgctacaagagtaactgctaaatctcaacagagtggagagaaggcatttcgatgtgaatatgatggatgtggaaaattatatacaacagctcatcatctcaaggtccatgagaggtcacacacaggagatcggccttatcagtgtgagcatgcaggctgtgggaaggcatttgcaacaggttatggattaaaaagtcacgtcagaactcatacaggagaaaagccatatcggtgttcggaagataattgtactaaatctttcaaaacttcaggagatctacagaaacacatcagaactcatacaggagaaaggccctttaagtgtcccttcgaaggctgcggtcggtcctttacaacatcaaatatcagaaaagtgcacgttaggacacacacaggagaaagaccttattactgcacagagccaggatgtgggagggcatttgccagtgcaacaaattataaaaaccatgtgaggatacacacaggagaaaagccatatgtttgtacagttcctgggtgtgacaaaaggtttacagaatattccagtttgtacaaacatcatgttgtccacactcattccaaaccttacaactgtaaccactgtgggaagacatacaagcagatctccacgctggccatgcacaaacggacagcccacaacgacactgagcccatcgaggaggagcaggaagccttctttgagccgcccccaggtcaaggtgaagatgttcttaaagggtcccagattacgtatgttacaggtgtagaaggggacgacgttgtttctacacaagtagccacagtaacccaatctggactgagtcaacaagttacactcatatcccaggatgggactcagcatgtcaacatatctcaagctgacatgcaggccattggcaacaccatcacaatggtaacgcaggatggcacgcccatcacagtccccgcccatgatgcagtcatctcctcagcaggaacgcactctgttgctatggttactgctgagggtacagaaggggaacaggttgcaattgtagctcaagacttggcagcattccatactgcctcatcagaaatggggcaccagcagcatagccatcacttagtaaccacagaaaccagacctctgaccttagtagcaacatccaatggcacccagattgcagttcagcttggagaacagccatctctggaagaagccatcagaatagcgtctagaatccaacaaggagaaacgccagggttggatgattagtaatgaactagtccgtaacttgaaagtatttcgatttcttggctttatatatcttgtggaaaggacgaacccgtaggatcgttgccgagctc

SEQ ID NO: 1465 - DNA, 5165 bp, Homo sapiens
  source 1..5165: mol_type = genomic DNA
accgccaccatgacagacccccttttggactcacagccagccagtagcaccggggagatggatggactgtgccctgagctattgctgatccccccgcctctctctaaccgtggaatcctggggcctgtccagagcccctgtccttcccgggaccctgcacctatacctactgagccaggctgcctgctggtagaggccacagcaactgaagagggaccagggaacatggagatcattgtggagacagtagctggaaccctgaccccaggtgctcctggagagaccccagctcccaaactgcctccaggagagagagaaccttcacaggaagcaggtacacccttgcctgggcaggagacagctgaagaggagaatgtagagaaagaagagaagagtgacacccagaaggactcccaaaaggctgtggataaaggccaaggggctcagcggctggaaggggatgtggtctctggcaccgagtccctcttcaagacccatatgtgtccagagtgtaagcgctgctttaagaagcggactcatctggtggagcacctgcatctccacttcccagaccccagcctccagtgccctaactgccagaagttcttcaccagtaagagcaagctcaagacccatctgctgcgggagctgggtgaaaaggcccaccactgcccactgtgccactacagtgcggtggagaggaatgcactcaaccgccacatggccagcatgcatgaagatatttccaacttctactcagacacctatgcctgtcctgtctgccgtgaggaattccgcctcagccaggccctaaaggagcacctcaagagccacacggcagcagccgcagcagagccattaccccttcgctgctttcaggagggctgcagctatgcagcacccgaccgcaaggccttcattaagcacctgaaggagacccatggggtgcgggctgtggagtgccgccatcactcatgtcccatgctctttgccacagccgaagccatggaggcccaccacaagagtcactacgccttccactgcccccactgtgattttgcttgttccaataagcacctattccgtaaacacaagaagcagggccaccctggcagtgaagagctgcgctgcaccttctgcccctttgccaccttcaacccagtggcttaccaggatcatgtaggcaagatgcatgctcatgaaaagatccaccagtgtcctgagtgcaactttgccactgcccacaagagggtgctcatccgacacatgcttctacatacgggtgagaagccccacaagtgtgagctgtgtgacttcacatgccgagacgtgagctacctatccaagcacatgctgacccactccaacaccaaggattacatgtgcactgaatgtggctatgtcaccaagtggaagcactacctccgtgtgcacatgcgaaaacatgcaggggacctcaggtatcagtgcaaccagtgctcctatcgctgtcaccgggctgatcagctgagcagccacaagctgcggcatcagggcaagtctctgatgtgtgaggtgtgtgccttcgcctgcaagcggaagtatgagctgcagaagcacatggcttcccagcaccaccctggcacaccggccccactctacccttgccactactgcagttaccagagccgccacaagcaggctgtgctgagccatgagaactgcaagcatacccgcctccgtgagttccactgtgccctctgtgactaccgcaccttcagcaacaccacactcttgttccataaacgcaaggcccatggctatgtacctggagaccaggcctggcagctccgctatgcaagccaggagccagaaggggccatgcagggcccaacacccccaccagattcagagccctcaaaccagctgtcagcccgacctgaggggccaggtcacgaacctgggactgtggtggaccccagcttggaccaggccctgccagagatgagtgaggaggtcaacactggaagacaggagggcagtgaggctccccatgggggtgacctgggtggcagtcccagcccagcagaggtggaggagggcagctgcacactacacctagaggccctgggagtagagctggagtctgtgactgagccaccccttgaggaggtcactgaaacagcccctatggagttcaggcccctgggactggaagggccagatggactggaaggaccagagctatctagctttgaaggtattgggacttctgacttgagtgctgaagaaaatccccttctggaaaagccagtgtctgagccctccacaaatcctccatccttagaggaggctcctaacaactgggtaggaaccttcaagacaactccacctgctgagacagcacccttgcccccattacctgagtcagagtcattactcaaggccctaaggagacaggacaaagaacaagcagaggcattggtgctagaggggcgggtgcagatggtagtgatccagggagaggggcgagccttccgctgcccacactgcccttttatcactcgccgggagaaggccctgaatctgcactccaggactgggtgccaaggccgccgagagcccctgctgtgccccgagtgtggggctagcttcaagcaacaacgcggcctcagcacccacctgctgaagaagtgccctgttctactcagaaagaacaagggcttgcccagaccagattcacccatccctctgcaacctgtgctcccaggtacccaggcctcagaggacacagaaagtgggaagcccccacctgcatcacaagaagcagagctactgcttccaaaagatgctcctttggagcttcccagggagccagaagaaacagaagagcctcttgccacagtctctggttccccagtccctcctgcaggaaactccttgcccacagaggcccctaagaagcactgctttgacccagtccctcctgcaggaaactcctcacccacggaggcccctaagaagcaccaccttgacccagtccctcctgcaggaaactcctcacccacagaggccctgaagaagcaccgctttgagcagggcaagtttcactgcaactcctgcccattcctttgttcccggctctcctctattacctctcacgtggctgaaggctgcagggggggacgtggcgggggaggaaaacgagggaccccccagacccagcctgatgtgtccccgttgagcaatggggactctgctcccccgaagaatgggagtacagagtccagctctggtgatggggatacagttctggttcaaaagcagaagggggctcgcttctcctgccctacatgtccctttagctgccagcaggaacgggctctgaggactcaccagatccggggctgccccctcgaggagtctggagagctgcactgcagcctctgcccattcactgctcctgctgccactgccttaaggctccaccagaagcggaggcaccccactgcagccccagcccgtgggccccggccccatctacagtgtggggactgtggcttcacctgtaaacagagccgttgcatgcagcagcaccggcggctcaagcacgagggggtgaagccccatcagtgccccttctgtgacttttcgaccaccagacggtaccggttagaggctcaccagtcccgacacacaggcattggccgcatcccctgcagctcttgcccccagacgtttggtaccaactcgaaactgcgcttgcaccggttaagggtacatgacaaaacacctacccacttctgtccactttgtgactatagtggctaccttcgccatgacatcactcgtcatgtcaacagctgccaccaaggcaccccagcctttgcctgctcccagtgtgaagcccagttcagctcagagacagcacttaagcagcatgctctgcgccgacaccccgagcctgcacagcctgcccctggctctcctgcagagaccactgagggccccctgcactgttcccgctgtgggttgctgtgccccagccctgccagcttacgaggacacacccgtaaacagcacccacggcttgagtgtggggcctgccaggaggccttccctagccgactggctctggatgagcaccggaggcagcagcatttcagccaccgctgtcagctctgtgactttgctgcccgggagcgggtgggcctggtaaagcactacctggaacagcatgaggagacttcagcagccgtggcagcctcagatggggatggggatgctggccagcccccgctacactgccccttttgtgacttcacatgccgccatcagctggtactagatcaccatgtgaaagggcatgggggcactcgtctctacaagtgcaccgattgtgcttacagcaccaagaaccgacagaagatcacctggcacagccgcatccacactggggaaaagccttaccactgtcacctctgcccctatgcctgtgctgatccctctcgtctcaagtaccacatgcggatccacaaggaggaacggaagtacctgtgccctgagtgtggctacaagtgcaagtgggtcaaccagctgaaataccacatgaccaagcatacaggactgaagccataccagtgtcccgagtgtgagtactgcaccaaccgggctgatgcactgcgtgtgcaccaggagacccggcatcgagaagcacgggctttcatgtgtgagcagtgtggcaaggccttcaagacgcgcttcctgctgcgcacccaccttcgcaagcacagtgaggccaaaccctatgtgtgcaatgtgtgccaccgtgctttccgctgggctgctggcctgcgccatcatgccctcacccacaccgaccgccaccccttcttttgccgcctctgcaactacaaggccaagcaaaagttccaggtggtcaagcacgtacgcaggcaccaccctgaccaagccgacccaaaccagggtgtgggcaaagaccccaccacccccacagtgcacctgcatgatgtgcagctggaggatcccagccctcctgctcctgccgctccccacactggacctgagggctagtaatgaactagtccgtaacttgaaagtatttcgatttcttggctttatatatcttgtggaaaggacgagtttgtatataccatttctttggc

SEQ ID NO: 1466 - DNA, 980 bp, Homo sapiens
  source 1..980: mol_type = genomic DNA
accgccaccatgtcacacctcagccagcagagaatttacagtggggaaaacccctttgcctgtaaggtatgtggaaaagtcttcagccacaaatcaaacctcactgagcatgagcattttcacacgagagagaaaccttttgaatgtaacgagtgtggaaaagcctttagccaaaagcagtatgtcattaaacatcagaacacccatactggcgagaagcttttcgaatgtaatgaatgtggaaaatcatttagccagaaggaaaacctccttacgcaccagaaaattcacactggagaaaaaccttttgagtgtaaagattgcgggaaagctttcattcagaagtcaaacctcatcagacaccagagaactcacacaggagagaagccctttgtatgtaaggagtgtggaaaaaccttcagtggcaaatccaaccttactgagcatgagaaaatccatattggagagaagccttttaaatgtagtgaatgtggaacagcctttggccagaagaagtacctcataaaacatcagaacattcacactggagagaaaccctatgaatgtaacgaatgtggaaaagccttctctcagcgaacatcacttattgtacatgtgaggattcattcaggtgataaaccttacgaatgcaatgtttgtggaaaagccttctctcagagctcatctctcactgtgcatgtgagaagccatacaggggagaagccctatggttgtaatgaatgtgggaaagctttctctcagttctcaacccttgctctgcatttgagaatacacacaggtaagaagccttatcagtgcagtgaatgtgggaaagctttcagccagaagtcacaccacattagacaccagaaaattcatactcactagtaatgaactagtccgtaacttgaaagtatttcgatttcttggctttatatatcttgtggaaaggacgagatttcggaggatcctctgtgtga

SEQ ID NO: 1467 - DNA, 2486 bp, Homo sapiens
  source 1..2486: mol_type = genomic DNA
accgccaccatgaacattgacgacaaactggaaggattgtttcttaaatgtggcggcatagacgaaatgcagtcttccaggacaatggttgtaatgggtggagtgtctggccagtctactgtgtctggagagctacaggattcagtacttcaagatcgaagtatgcctcaccaggagatccttgctgcagatgaagtgttacaagaaagtgaaatgagacaacaggatatgatatcacatgatgaactcatggtccatgaggagacagtgaaaaatgatgaagagcagatggaaacacatgaaagacttcctcaaggactacagtatgcacttaatgtccctataagcgtaaagcaggaaattacttttactgatgtatctgagcaactgatgagagacaaaaaacaaatcagagagccagtagacttacagaaaaagaagaagcggaaacaacgttctcccgcaaaaatccttacaataaatgaggatggatcacttggtttgaaaacccctaaatctcacgtttgtgagcactgcaatgctgcctttagaacgaactatcacttacagagacatgtcttcattcatacaggtgaaaaaccatttcaatgtagtcaatgtgacatgcgtttcatacagaagtacctgcttcagagacatgagaagattcatactggtgaaaaaccatttcgctgtgatgaatgtggtatgagattcatacaaaaatatcatatggaaaggcataagagaactcatagtggagaaaaaccttaccagtgtgaatactgtttacagtatttttccagaacagatcgtgtattgaaacataaacgtatgtgccatgaaaatcatgacaaaaaactaaatagatgtgccatcaaaggtggccttctgacatctgaggaagattctggcttttctacatcaccaaaagacaactcactgccaaaaaagaaaaggcagaaaacggagaaaaaatcatctggaatggacaaagagagtgctttggacaaatctgacctgaaaaaagacaaaaatgattacttgcctctttattcttcaagtactaaagtaaaagatgagtatatggttgcagaatatgctgttgaaatgccacattcgtcagttgggggctcgcatttagaagatgcgtcaggagaaatacacccacctaagttagttctcaaaaaaattaatagtaagagaagtctgaaacagccactggagcaaaatcaaacaatttcacctttatccacatatgaagagagcaaagtttcaaagtatgcttttgaacttgtggataaacaggctttactggactcagaaggcaatgctgacattgatcaggttgataatttgcaggaggggcccagtaaacctgtgcatagtagtactaattatgatgatgccatgcagtttttgaagaagaagcggtatcttcaagcagcaagtaacaacagcagggaatatgcgctgaatgtgggtaccatagcttctcagccttctgtaacacaagcagctgtggcaagtgtcattgatgaaagtaccacggcatccatattagagtcacaggcactgaatgtggagattaagagtaatcatgacaaaaatgttattccagatgaggtactgcagactctgttggatcattattcccacaaagctaatggacagcatgagatatccttcagtgttgcagatactgaagtgacttctagcatatcaataaattcttcagaagtaccagaggtcaccccgtcagagaatgttggatcaagctcccaagcatcctcatcagataaagccaacatgttgcaggaatactccaagtttctgcagcaggctttggacagaactagccaaaatgatgcctatttgaatagcccgagccttaactttgtgactgataaccagaccctcccaaatcagccagcattctcttccatagacaagcaggtctatgccaccatgcccatcaatagctttcgatcaggaatgaattctccactaagaacaactccagataagtcccactttggactaatagttggtgattcacagcactcatttcccttttcaggtgatgagacaaaccatgcttctgccacatcaacacaggactttctggatcaagtgacttctcagaagaaagctgaggcccagcctgtccaccaagcttaccaaatgagctcctttgaacagcccttccgtgctccctatcatggatcaagagctggaatagctactcaatttagcactgccaatggacaggtgaaccttcggggaccagggacaagtgctgaattttcagaatttcccttggtgaatgtaaatgataatagagctgggatgacatcttcacctgatgccacaactggccagacttttggctagtaatgaactagtccgtaacttgaaagtatttcgatttcttggctttatatatcttgtggaaaggacgagccgctgcgcgtcactccatctac

SEQ ID NO: 1468 - DNA, 1742 bp, Homo sapiens
  source 1..1742: mol_type = genomic DNA
accgccaccatggccgaagcggcgcctgcccgggaccccgagacagacaagcacacagaggaccagagtccttcgacacccttgccccagccagctgctgagaagaactcgtacctctactccacggaaatcacactgtggacggtggtggccgccattcaggccttggagaagaaggtggattcctgcctgacccgcttgctgactctggaggggcgcacggggacagccgagaagaagctggccgactgcgagaagacagctgtggagttcgggaaccagctggagggcaagtgggccgtgctggggaccttgctgcaggagtacgggctgctgcagaggcggctggagaatgtggagaacttgctgcgcaacaggaacttctggatcttgcggctgcccccgggcagcaagggggaggcccccaaggtgcccgtgaccttcgatgatgtggccgtgtatttctctgagctggagtggggcaagctggaggactggcagaaggagctctacaagcacgtgatgaggggcaactacgagacgctggtctccctggattatgcaatctccaaaccagacatcctcacccggatagagaggggagaggagccttgtcttgaccggtggggccaggagaaggggaatgaagtagaggtgggacgtccaaggatgatgggcactggcctccctccgtatccagagcacctcaccagcccacttagccctgcccaggaggagctgaaagaagggcaggcccccaagcagcagcaggactcagaggcgagagtggccccagccgggccagaagcaggtggtggtgtggccatcaagacagaggcacagtctgaagacgagatgacgcctgagcggctctttctgggggtgtcccgaggccagaccgagtgtagaatcccccgagggcccaggaacaggcctgggggccccagccgtcatcaggcccagggcatgcccagggtgcgggcaggggagccacggccaccgggggccagtggggagacgccccgagtcctctcccgcaggcggcagcgggcattcccctgccccgactgcgggcagagcttccgcctgaagatcaatctgacgattcatcagcggacccatgtggaggaggggcggcaggaggcccccggccgctcgcccaccagctgcggggacagccaggccatgctggagccgggggaggtggtggtacccggccctgtcatccgctggctccccgaggagcctgagggtcgccgctccgtggcagggggccgtgccttggtggggcggcggcctgcagccagcaagatgtaccactgcagcgagtgcctgcgcttcttccagcagcgcaagagcctgctgctgcaccagcgcctgcacaccggcaatggccagggctggcccgcctgcccctactgcggcaaggccttccgccggccctcggacctcttccggcaccagcgcatccacaccggtgagcggccctaccagtgcccccagtgtggccggaccttcaaccgcaaccaccacctggccgtgcacatgcagacccacgcccgaggccaggtgggcccacacttccctgccgcccccgcccgccacgggagcctgcccctgccctggcccagccggaaggaggagggctagtaatgaactagtccgtaacttgaaagtatttcgatttcttggctttatatatcttgtggaaaggacgaggtgatcttggaggctcggtttga

SEQ ID NO: 1469 - DNA, 2201 bp, Homo sapiens
  source 1..2201: mol_type = genomic DNA
accgccaccatgaacacatttcaggcatcagtgtcattccaggacgtgactgtggaattcagccaggaggagtggcagcacatgggccctgttgagaggaccctgtacagagatgtgatgctggagaactacagccacctcgtctcagtgggctactgctttacaaaaccagaactgatcttcacattggaacaaggagaagatccatggttattagagaaagagaaaggatttctaagcaggaactccccagaagactcccaacctgatgaaatctcagagaagagcccagaaaatcaaggcaaacatttgttgcaagttttattcaccaataaattattgactacagagcaagaaatttcaggaaaaccacataatcgagacataaacatttttcgtgcaagaatgatgccttgtaaatgtgacattgcggggtctgcttgccaggggctcagcctgatggccccacactgtcagtattcaaaagaaaaggctcatgagcgtaatgtttgtgacaaatggctcatcagtattaaggatggcagaactaacactcaagagaaatctttcgcttatagtaaaattgtgaaaaccctccatcataaggaggaagttattcaacatcagacaattcagactctggggcaagattttgaatataatgaaagtagaaaagcttttcttgaaaaggctgcccttgttacatctaacagtacccacccaaaaggaaaatcttacaatttcaataaatttggggaaaacaaatatgataaatcaacctttattattcctcagaacatgaatccagagaagagtcactatgagtttaatgatactggaaattgtttctgtagaatcactcacaaaactctcacaggagggaaatccttcagccaaaagtcacacattagagaacatcatagagttcatataggggtgaaaccctttgaatatggaaaaagtttcaaccgtaattcaaccctcccagtgcatcagagaactcatgcaacagataaatactctgattatcacccatgtacagagacattcagctaccagtcaactttcagtgtacatcagaaggttcacataagggcaaaaccctatgagtataatgaatgtgggaaatcctgctctatgaattcacacttgatttggcctcagaaaagtcacacaggggagaaaccctatgaatgtcctgagtgcgggaaagccttcagtgagaagtcacgcctaagaaaacatcagagaactcacacgggagagaaaccatacaaatgtgatggatgtgataaagctttcagtgcaaagtcaggcctaagaatacaccagagaacccacacaggggagaaaccattcgaatgtcatgaatgtgggaaatcttttaactataagtcaatcctcatagtgcatcagagaactcacacaggggagaaaccttttgaatgtaatgaatgcgggaaatctttcagccatatgtcaggcctaaggaatcaccgaagaactcacacaggggaaagaccatataaatgtgatgaatgtgggaaagctttcaaactgaagtcaggcctgaggaaacatcatagaacacacacaggggagaagccctacaaatgtaatcagtgtggaaaagctttcggtcagaaatcacaactcagaggacatcatagaattcacacaggggaaaaaccctataaatgtaatcattgtggggaagctttcagtcagaaatcaaacctcagagtacatcacagaactcatactggggagaaaccctatcaatgtgaggagtgtggaaaaacattcaggcagaaatcaaatctcagagggcatcagagaactcacactggggagaagccctatgaatgtaatgaatgtggaaaagctttcagtgagaagtcagtcctaagaaaacatcagcgaactcacaccggggagaaaccatataattgtaatcagtgtggggaagctttcagtcagaaatccaatctcagagtacatcagagaactcacacaggggagaaaccctataaatgtgataaatgtgggagaactttcagtcaaaaatcaagccttagagaacatcagaaagcccacccaggggattagtaatgaactagtccgtaacttgaaagtatttcgatttcttggctttatatatcttgtggaaaggacgagatacgctccgttgctcgcttatc

SEQ ID NO: 1470 - DNA, 1250 bp, Homo sapiens
  source 1..1250: mol_type = genomic DNA
accgccaccatggagctgcgggaagaagcctggtctccggggccgctggattctgaggaccagcagatggccagtcacgagaacccagtggacatcctcatcatggatgatgacgacgtccccagctggcctcccaccaagctgtccccgccccagtctgcgcccccagccggcccgcctccccggccgcggccgcccgccccctacatctgcaacgagtgtggcaagagctttagccactggtccaagctgacgcggcaccagcgcacgcacaccggcgagcggcccaacgcctgcgccgactgcggcaagaccttctcgcagagctcgcacctggtgcagcaccggcgcatccacacgggcgagaagccctacgcctgcttggagtgcggcaagcgcttcagctggagctccaacctcatgcagcaccagcgcatccacacgggcgagaagccctacacctgccccgactgcggccgcagcttcactcagagcaagagcctggccaagcaccggcgctcgcacagcggcctcaagcccttcgtgtgcccgcgctgcggccgcggcttcagccagcccaagagcctcgcgcgtcacctgcggctgcacccggagctgtcggggcctggcgtggcggccaaggtgctggcggctagcgtccggcgggccaaggggcccgaagaggcggtggcggcggacggcgagatcgccatccccgtgggcgatggcgagggcatcatcgtggtgggcgcgccgggcgagggggccgcggccgcggcagccatggcgggcgcgggggcaaaggccgcggggccccggtcgcggcgcgccccggcccccaagccgtacgtgtgtctggagtgcgggaagggcttcgggcacggggccgggctcctggcgcaccagcgggcccagcacggggacgggctcggggcggcggggggcgaggagccggcccacatctgcgtggagtgcggggagggcttcgtgcagggcgccgcgctccggagacacaagaagatccacgcggtgggcgcgccctcggtctgcagcagctgcggacagagctactaccgcgcgggcggggaggaggaggacgacgacgacgaggccgcgggcgggcggtgccccgagtgccgcggtggggagggccggtagtaatgaactagtccgtaacttgaaagtatttcgatttcttggctttatatatcttgtggaaaggacgaaatttaaccattaaactcgcatcc

SEQ ID NO: 1471 - DNA, 290 bp, Homo sapiens
  source 1..290: mol_type = genomic DNA
accgccaccatgttcccaccagccagggggaaggagctgctctcgtttgaggatgtggcgatgtacttcaccagagaggagtggggccacctcaactggggtcagaaggacctctaccgagatgtgatgttggagaactacaggaacatggtcttgctggtttatttccagtttgatgctgcaataccactgtgctagtaatgaactagtccgtaacttgaaagtatttcgatttcttggctttatatatcttgtggaaaggacgagctgcggcttcgatcacgggtttg

SEQ ID NO: 1472 - DNA, 1379 bp, Homo sapiens
  source 1..1379: mol_type = genomic DNA
accgccaccatgttcccaccagccagggggaaggagctgctctcgtttgaggatgtggcgatgtacttcaccagagaggagtggggccacctcaactggggtcagaaggacctctaccgagatgtgatgttggagaactacaggaacatggtcttgctgggatttcagtttcccaaacctgagatgatctgtcagctggagaactgggacgagcagtggatcctggatctaccgagaactgggaataggaaggcttccggtagtgcttgcccaggttctgaagccagacacaagatgaaaaagctaactccaaaacagaaattttctgaagatttagagtcatataagatatcagtggtaatgcaggaatcagctgagaaactttcagaaaagttacataagtgtaaagaatttgtggacagttgcaggcttactttccctactagtggtgatgaatacagcaggggcttccttcaaaaccttaaccttattcaagatcagaatgcgcaaacaaggtggaagcagggcagatatgatgaggatggcaaacccttcaatcaaagatctttgcttttggggcatgagcgaattctcacaagagcaaagtcttatgaatgcagtgaatgtggaaaagtcattaggcgtaaggcatggtttgatcaacatcaaagaattcactttttagagaatccttttgagtgtaaggtctgtgggcaagccttcagacagcggtcagctcttacggtccataaacagtgtcacctgcaaaacaagccatacagatgtcatgactgtggaaagtgttttcggcagctcgcgtatcttgttgaacataagaggattcacaccaaagaaaaaccttataaatgtagcaaatgtgaaaaaacgtttagtcagaattcaacccttattcgacatcaggtgatccatagtggagaaaaacgccataaatgccttgagtgtggaaaagcctttggccggcattcaacccttctatgtcatcaacagattcacagtaaaccgaacacccataaatgcagtgaatgtggacagtcctttggtaggaatgtggatctcattcagcatcaaagaatccatacaaaggaggaattctttcaatgtggagaatgtgggaaaacgtttagttttaagaggaatctttttcgacatcaggtcattcacactggaagccaaccctaccaatgtgtcatatgtggaaaatctttcaagtggcacacaagctttattaagcaccagggcactcacaaaggacagatatccacatagtaatgaactagtccgtaacttgaaagtatttcgatttcttggctttatatatcttgtggaaaggacgagtgcccagcaaacgcgcaggcgta

SEQ ID NO: 1473 - DNA, 290 bp, Homo sapiens
  source 1..290: mol_type = genomic DNA
accgccaccatggactcagtggcctttgaggatgtggctgtgaacttcaccccagacgagtgggctttgctggatccttcccaaaagaatctctaccgagaagtgatgcaagaaaccttgaggaacttggcctctatagaggtcttatggaagagagactctttgaaagtgaaggtcatcagcatggagaaattttagtaatgaactagtccgtaacttgaaagtatttcgatttcttggctttatatatcttgtggaaaggacgaaaaggcgccgtgagtagtgtagct

SEQ ID NO: 1474 - DNA, 350 bp, Homo sapiens
  source 1..350: mol_type = genomic DNA
accgccaccatgagaaatatgattccacaggacaatgaaaacccaccccaacagggtgaagcaaatcaaaatgactcagtggcctttgaggatgtggctgtgaacttcaccccagacgagtgggctttgctggatccttcccaaaagaatctctaccgagaagtgatgcaagaaaccttgaggaacttggcctctatagaggtcttatggaagagagactctttgaaagtgaaggtcatcagcatggagaaattttagtaatgaactagtccgtaacttgaaagtatttcgatttcttggctttatatatcttgtggaaaggacgattgaagtaccttatatgctatatc

SEQ ID NO: 1475 - DNA, 3383 bp, Homo sapiens
  source 1..3383: mol_type = genomic DNA
accgccaccatgagttggttcaacgcctcccagctctccagcttcgctaagcaggccctgtcccaggcccagaagtctattgacagggttctggacatccaggaagaggagccgagcatctgggccgagaccattccgtatggagagccgggaataagttcccctgtcagtggaggatgggatacttcaacctgggggttgaaatcaaacactgaacctcagagtccaccaatagcctctcctaaagcaatcacaaagccagttcggaggactgtggtcgatgaatctgaaaatttcttcagtgcctttctctcgccaactgatgtccagaccattcagaagagtccagtggtatcaaaacctccagcaaaatcacaacgaccagaagaagaagtgaaaagcagcttacatgaatccttgcacattggccagtcaagaactcctgaaacaactgaatcacaagtaaaagactcttctttgtgtgtttcaggggaaactctggcagcaggtacttcatcacctaaaactgaaggcaagcacgaagaaactgttaataaagaatcggatatgaaggtgccaactgtaagtttgaaagtatctgaaagtgtaattgatgtgaaaacaactatggaaagtatatctaatacgtctacgcagtctctcacagcagaaacaaaggacatagctttggaacctaaggaacaaaaacatgaagacaggcagagcaatacaccttctcctcctgttagtaccttttcatcaggtacttctaccaccagtgatattgaagttttagatcatgaaagtgtaataagtgagagctcagcgagctcgagacaagagactacagattcaaaatcaagtcttcacttgatgcagacatcttttcagcttctctctgcatctgcttgtcctgaatataatcgtttagatgatttccaaaaactcactgagagttgctgttcatctgatgcttttgaaagaatagactcatttagtgtacagtcattagatagccggagtgtaagtgaaatcaattcagatgatgaattgtcaggcaagggatatgctttagtgcctattatagttaattcttcaactccaaagtctaaaacagttgaatctgctgaaggaaaatctgaagaagtaaatgaaacattagttatacccactgaggaagcagaaatggaagaaagtggacgaagtgcaactcctgttaactgtgaacagcctgatatcttggtttcttccacaccaataaatgaaggacagactgtgttagacaaggtggctgagcagtgtgaacctgctgaaagtcagccagaagcactttctgagaaggaagatgtttgcaagacagttgaatttctgaatgaaaagctggaaaaaagggaggctcagttattatctcttagtaaggaaaaagcacttctagaagaagcttttgataacctgaaagatgaaatgttcagagtgaaagaagaaagcagtagcatttcttccttgaaagatgagtttactcaaagaattgcagaagcagaaaagaaagttcaactagcctgcaaagagagagatgctgctaaaaaggaaatcaaaaacataaaagaagaacttgccactagattaaatagtagtgaaactgcagaccttttgaaagagaaagatgagcagatccgagggttaatggaagaaggagaaaaactttcaaaacagcagctgcacaattctaacatcatcaagaaattaagagctaaagacaaggagaatgaaaatatggttgcaaagctgaacaaaaaagttaaagagctagaagaggagttgcagcatttgaaacaggtccttgatggcaaagaagaggttgagaaacaacatagagaaaatattaaaaaactaaattccatggtagaacgccaagagaaagatcttggccgtcttcaggtagacatggatgaacttgaagaaaagaaccgaagtattcaggctgccctggatagtgcatacaaagaacttactgatcttcacaaagccaatgctgcaaaggatagtgaggcacaggaagctgctctgagccgtgaaatgaaagctaaagaagaactttctgcagcattagagaaggcccaagaagaagcccgtcagcagcaagaaacattagccattcaagtgggggaccttaggcttgcattgcagcgtacagaacaagcggctgccagaaaggaggattatttacgccatgagatcggtgaacttcagcagagactccaggaagcagagaatcgaaaccaggaactgagtcaaagtgtttcatcaacaacaagaccattgcttcgacaaatagaaaatttgcaagcaaccctgggatcccagacatcgtcgtgggagaaattagagaagaatctttctgataggcttggtgaatcccagaccttgctggcagcagcagttgagagagaacgtgcagctacagaagaactccttgctaacaaaattcagatgtcttccatggagtcacagaattctcttttaagacaggaaaacagtagatttcaagcccagctagaatcagagaaaaataggctgtgtaaactggaggatgagaacaataggtaccaggttgaattggaaaacctaaaagatgaatatgtaagaacacttgaagagacgaggaaagaaaagacattgttgaatagtcagttagaaatggaaagaatgaaagttgaacaagaaaggaagaaagccatttttactcaagaaacaataaaagaaaaggaacgcaagccattttctgtttctagcactcccaccatgtcacgctcaagttcaataagtggtgttgatatggcaggactacagacatcttttctgtctcaggatgagtctcatgatcactcatttggaccaatgcctatatcagcaaatggaagcaatctttatgatgctgtaaggatgggagcaggatcaagcataattgaaaacctacagtctcagctaaagctaagggaaggggaaatcactcatttacagctagaaattggcaatctagaaaaaactcgatcaataatggctgaagaactagttaaattaacaaatcaaaatgatgaacttgaagagaaggtgaaggagatacccaaacttagaactcagctaagagatttggatcaaaggtacaacactattctgcagatgtatggagaaaaagcagaagaggcagaagaacttcgattagatctcgaagatgtaaaaaatatgtacaaaactcaaatagatgaacttttaagacaaagtctcagttagtaatgaactagtccgtaacttgaaagtatttcgatttcttggctttatatatcttgtggaaaggacgaaacctgacttcgtacgatcctgtt

SEQ ID NO: 1476 - DNA, 1364 bp, Homo sapiens
  source 1..1364: mol_type = genomic DNA
accgccaccatgagtagaagttcaccaagtgggaaaggacactctaggatggccgagcctcgatttaacaacccctacttctggccccctcctcccaccatgcccagccagctggacaacctggttctgattaacaagatcaaggagcagctgatggccgagaagatcaggccgcctcacctgccgcccacgtcggcctcgtcgcagcagccgttgctagtgccgccggcacccgccgagagcagccaggccgtcatgtcgctgcccaagctgcagcaggtgccggggctgcatccacaggcggtgccgcagcccgacgtggcgctgcacgcacggccggccaccagcaccgtcacaggtctggggctgtccacccggaccccgtctgtgagcacttctgagtcaagcgcgggcgcgggcacgggcacgggtaccagcaccccgtccacacccaccaccaccagccagagccgcctcatcgcctcgtcccccaccctcatctcagggatcaccagcccccctctcctggactccatcaagacaatccagggccacggcctgcttggcccccccaagtccgaacgcggccgcaaaaagatcaaggcggagaacccggggggtccgcctgtccttgtagtcccctatcccatcctggcctcgggcgagactgccaaggagggcaagacgtacaggtgtaaggtatgcccactgacctttttcaccaagtcagagatgcagatccactccaagtcgcacacagaggccaagccccacaagtgcccgcactgctccaagtcctttgccaacgcctcctacctggcccagcacctgcgcatccacctgggcgtcaagccctaccactgctcctactgtgataagtccttccggcagctctcccacctccagcagcacaccagaatccacacaggcgacagaccctacaagtgcccacatcctggctgcgagaaggctttcactcagctctccaacctccagtctcaccagcgccagcacaacaaggacaagccctacaagtgtcccaactgctaccgggcctattcggactccgcttctttgcagatccacctctcggcccacgccatcaagcacgccaaggcctactgctgcagcatgtgtgggcgggcctacacctcggagacctacctgatgaagcacatgtccaaacacacggtggtggagcacctggtgagccatcactcgccccagaggacggagtcccccggcatcccggtgcgaatctctctcatctagtaatgaactagtccgtaacttgaaagtatttcgatttcttggctttatatatcttgtggaaaggacgagttgcacgccgcaatggatatgac

SEQ ID NO: 1477 - DNA, 1154 bp, Homo sapiens
  source 1..1154: mol_type = genomic DNA
accgccaccatgatccggggcttcgaggcgcccatggcggagaacccgccgccgccgccgccgcccgtcatcttctgccacgactccccgaagcgggtgctggtgtcggtcatcaggacgaccccgatcaagccaacgtgcggcggtggaggggagccggagccgccgccgccgctcatccccaccagccccggcttcagcgacttcatggtgtacccgtggcgctggggcgagaacgcacacaacgtgacgctcagccctggggccgcgggggccgccgcctcggccgccctgcctgcagccgcagccgccgagcactcggggcttcgtggccggggcgcgcccccgcccgccgcctcggcctccgccgccgcctcgggaggtgaggacgaggaggaagcgagcagcccagacagcggccacctcaaggatggaatccgacgtggtaggcccagagcagatactgtccgcgatttaataaatgaaggagagcattcatccagcagaatccgttgtaacatctgtaatagggtgtttccacgggagaaatcgctccaggctcacaaaaggactcatacaggtgagaggccctatctgtgtgactatccagactgtggaaaagcctttgttcaaagtggacagctcaaaacacatcagcgtcttcacaccggagagaaaccttttgtttgttcagaaaatggctgcctgagcagattcacccatgcaaaccgccactgtccgaagcacccctacgccaggctgaagagagaggagcccacggacacactcagcaaacatcaggctgccgacaacaaggccgcggccgagtggctggcgaggtattgggaaatgagagagcagcgcacccccactttgaaaggcaagctggttcagaaggctgatcaggagcagcaggaccctctggaataccttcagtctgatgaagaggacgacgagaagagaggggcccagcgccggctgcaggagcagcgggagcgcctgcatggagccctcgcgctcatagagcttgccaacctgactggggcgccactccgacagtagtaatgaactagtccgtaacttgaaagtatttcgatttcttggctttatatatcttgtggaaaggacgagcgaactcgaactttcgagtgcta

SEQ ID NO: 1478 - DNA, 2414 bp, Homo sapiens
  source 1..2414: mol_type = genomic DNA
accgccaccatgaaacaattgcctgcggcaacagttcgactcctttcaagttctcagatcatcacttcggtggtcagtgttgtaaaagagcttattgaaaactccttggatgctggtgccacaagcgtagatgttaaactggagaactatggatttgataaaattgaggtgcgagataacggggagggtatcaaggctgttgatgcacctgtaatggcaatgaagtactacacctcaaaaataaatagtcatgaagatcttgaaaatttgacaacttacggttttcgtggagaagccttggggtcaatttgttgtatagctgaggttttaattacaacaagaacggctgctgataattttagcacccagtatgttttagatggcagtggccacatactttctcagaaaccttcacatcttggtcaaggtacaactgtaactgctttaagattatttaagaatctacctgtaagaaagcagttttactcaactgcaaaaaaatgtaaagatgaaataaaaaagatccaagatctcctcatgagctttggtatccttaaacctgacttaaggattgtctttgtacataacaaggcagttatttggcagaaaagcagagtatcagatcacaagatggctctcatgtcagttctggggactgctgttatgaacaatatggaatcctttcagtaccactctgaagaatctcagatttatctcagtggatttcttccaaagtgtgatgcagaccactctttcactagtctttcaacaccagaaagaagtttcatcttcataaacagtcgaccagtacatcaaaaagatatcttaaagttaatccgacatcattacaatctgaaatgcctaaaggaatctactcgtttgtatcctgttttctttctgaaaatcgatgttcctacagctgatgttgatgtaaatttaacaccagataaaagccaagtattattacaaaataaggaatctgttttaattgctcttgaaaatctgatgacgacttgttatggaccattacctagtacaaattcttatgaaaataataaaacagatgtttccgcagctgacatcgttcttagtaaaacagcagaaacagatgtgctttttaataaagtggaatcatctggaaagaattattcaaatgttgatacttcagtcattccattccaaaatgatatgcataatgatgaatctggaaaaaacactgatgattgtttaaatcaccagataagtattggtgactttggttatggtcattgtagtagtgaaatttctaacattgataaaaacactaagaatgcatttcaggacatttcaatgagtaatgtatcatgggagaactctcagacggaatatagtaaaacttgttttataagttccgttaagcacacccagtcagaaaatggcaataaagaccatatagatgagagtggggaaaatgaggaagaagcaggtcttgaaaactcttcggaaatttctgcagatgagtggagcaggggaaatatacttaaaaattcagtgggagagaatattgaacctgtgaaaattttagtgcctgaaaaaagtttaccatgtaaagtaagtaataataattatccaatccctgaacaaatgaatcttaatgaagattcatgtaacaaaaaatcaaatgtaatagataataaatctggaaaagttacagcttatgatttacttagcaatcgagtaatcaagaaacccatgtcagcaagtgctctttttgttcaagatcatcgtcctcagtttctcatagaaaatcctaagactagtttagaggatgcaacactacaaattgaagaactgtggaagacattgagtgaagaggaaaaactgaatctttttaatggatctcattatttagacgttttatataaaatgacagcagatgaccaaagatacagtggatcaacttacctgtctgatcctcgtcttacagcgaatggtttcaagataaaattgataccaggagtttcaattactgaaaattacttggaaatagaaggaatggctaattgtctcccattctatggagtagcagatttaaaagaaattcttaatgctatattaaacagaaatgcaaaggaagtttatgaatgtagacctcgcaaagtgataagttatttagagggagaagcagtgcgtctatccagacaattacccatgtacttatcaaaagaggacatccaagacattatctacagaatgaagcaccagtttggaaatgaaattaaagagtgtgttcatggtcgcccattttttcatcatttaacctatcttccagaaactacatagtaatgaactagtccgtaacttgaaagtatttcgatttcttggctttatatatcttgtggaaaggacgaacgtgttgagcgaactattgtgtg

SEQ ID NO: 1479 - DNA, 599 bp, Homo sapiens
  source 1..599: mol_type = genomic DNA
accgccaccatgaaacaattgcctgcggcaacagttcgactcctttcaagttctcagatcatcacttcggtggtcagtgttgtaaaagagcttattgaaaactccttggatgctggtgccacaagcgtagatgttaaactggagaactatggatttgataaaattgaggtgcgagataacggggagggtatcaaggctgttgatgcacctgtaatggcaatgaagtactacacctcaaaaataaatagtcatgaagatcttgaaaatttgacaacttacggttttcgtggagaagccttggggtcaatttgttgtatagctgaggttttaattacaacaagaacggctgctgataattttagcacccagtatgttttagatggcagtggccacatactttctcagaaaccttcacatcttggtcaagggtctcactctgtcacacaggctggactgcagtggcatcatcttggttcactgcaacctctgcctcccaggctcaagtagtaatgaactagtccgtaacttgaaagtatttcgatttcttggctttatatatcttgtggaaaggacgaatttcgaagctcaattaccacttt

SEQ ID NO: 1480 - DNA, 2372 bp, Homo sapiens
  source 1..2372: mol_type = genomic DNA
accgccaccatgagctttggtatccttaaacctgacttaaggattgtctttgtacataacaaggcagttatttggcagaaaagcagagtatcagatcacaagatggctctcatgtcagttctggggactgctgttatgaacaatatggaatcctttcagtaccactctgaagaatctcagatttatctcagtggatttcttccaaagtgtgatgcagaccactctttcactagtctttcaacaccagaaagaagtttcatcttcataaacagtcgaccagtacatcaaaaagatatcttaaagttaatccgacatcattacaatctgaaatgcctaaaggaatctactcgtttgtatcctgttttctttctgaaaatcgatgttcctacagctgatgttgatgtaaatttaacaccagataaaagccaagtattattacaaaataaggaatctgttttaattgctcttgaaaatctgatgacgacttgttatggaccattacctagtacaaattcttatgaaaataataaaacagatgtttccgcagctgacatcgttcttagtaaaacagcagaaacagatgtgctttttaataaagtggaatcatctggaaagaattattcaaatgttgatacttcagtcattccattccaaaatgatatgcataatgatgaatctggaaaaaacactgatgattgtttaaatcaccagataagtattggtgactttggttatggtcattgtagtagtgaaatttctaacattgataaaaacactaagaatgcatttcaggacatttcaatgagtaatgtatcatgggagaactctcagacggaatatagtaaaacttgttttataagttccgttaagcacacccagtcagaaaatggcaataaagaccatatagatgagagtggggaaaatgaggaagaagcaggtcttgaaaactcttcggaaatttctgcagatgagtggagcaggggaaatatacttaaaaattcagtgggagagaatattgaacctgtgaaaattttagtgcctgaaaaaagtttaccatgtaaagtaagtaataataattatccaatccctgaacaaatgaatcttaatgaagattcatgtaacaaaaaatcaaatgtaatagataataaatctggaaaagttacagcttatgatttacttagcaatcgagtaatcaagaaacccatgtcagcaagtgctctttttgttcaagatcatcgtcctcagtttctcatagaaaatcctaagactagtttagaggatgcaacactacaaattgaagaactgtggaagacattgagtgaagaggaaaaactgaaatatgaagagaaggctactaaagacttggaacgatacaatagtcaaatgaagagagccattgaacaggagtcacaaatgtcactaaaagatggcagaaaaaagataaaacccaccagcgcatggaatttggcccagaagcacaagttaaaaacctcattatctaatcaaccaaaacttgatgaactccttcagtcccaaattgaaaaaagaaggagtcaaaatattaaaatggtacagatccccttttctatgaaaaacttaaaaataaattttaagaaacaaaacaaagttgacttagaagagaaggatgaaccttgcttgatccacaatctcaggtttcctgatgcatggctaatgacatccaaaacagaggtaatgttattaaatccatatagagtagaagaagccctgctatttaaaagacttcttgagaatcataaacttcctgcagagccactggaaaagccaattatgttaacagagagtctttttaatggatctcattatttagacgttttatataaaatgacagcagatgaccaaagatacagtggatcaacttacctgtctgatcctcgtcttacagcgaatggtttcaagataaaattgataccaggagtttcaattactgaaaattacttggaaatagaaggaatggctaattgtctcccattctatggagtagcagatttaaaagaaattcttaatgctatattaaacagaaatgcaaaggaagtttatgaatgtagacctcgcaaagtgataagttatttagagggagaagcagtgcgtctatccagacaattacccatgtacttatcaaaagaggacatccaagacattatctacagaatgaagcaccagtttggaaatgaaattaaagagtgtgttcatggtcgcccattttttcatcatttaacctatcttccagaaactacatagtaatgaactagtccgtaacttgaaagtatttcgatttcttggctttatatatcttgtggaaaggacgagtgtgttcagctaagatacggact

SEQ ID NO: 1481 - DNA, 2900 bp, Homo sapiens
  source 1..2900: mol_type = genomic DNA
accgccaccatgaaacaattgcctgcggcaacagttcgactcctttcaagttctcagatcatcacttcggtggtcagtgttgtaaaagagcttattgaaaactccttggatgctggtgccacaagcgtagatgttaaactggagaactatggatttgataaaattgaggtgcgagataacggggagggtatcaaggctgttgatgcacctgtaatggcaatgaagtactacacctcaaaaataaatagtcatgaagatcttgaaaatttgacaacttacggttttcgtggagaagccttggggtcaatttgttgtatagctgaggttttaattacaacaagaacggctgctgataattttagcacccagtatgttttagatggcagtggccacatactttctcagaaaccttcacatcttggtcaaggtacaactgtaactgctttaagattatttaagaatctacctgtaagaaagcagttttactcaactgcaaaaaaatgtaaagatgaaataaaaaagatccaagatctcctcatgagctttggtatccttaaacctgacttaaggattgtctttgtacataacaaggcagttatttggcagaaaagcagagtatcagatcacaagatggctctcatgtcagttctggggactgctgttatgaacaatatggaatcctttcagtaccactctgaagaatctcagatttatctcagtggatttcttccaaagtgtgatgcagaccactctttcactagtctttcaacaccagaaagaagtttcatcttcataaacagtcgaccagtacatcaaaaagatatcttaaagttaatccgacatcattacaatctgaaatgcctaaaggaatctactcgtttgtatcctgttttctttctgaaaatcgatgttcctacagctgatgttgatgtaaatttaacaccagataaaagccaagtattattacaaaataaggaatctgttttaattgctcttgaaaatctgatgacgacttgttatggaccattacctagtacaaattcttatgaaaataataaaacagatgtttccgcagctgacatcgttcttagtaaaacagcagaaacagatgtgctttttaataaagtggaatcatctggaaagaattattcaaatgttgatacttcagtcattccattccaaaatgatatgcataatgatgaatctggaaaaaacactgatgattgtttaaatcaccagataagtattggtgactttggttatggtcattgtagtagtgaaatttctaacattgataaaaacactaagaatgcatttcaggacatttcaatgagtaatgtatcatgggagaactctcagacggaatatagtaaaacttgttttataagttccgttaagcacacccagtcagaaaatggcaataaagaccatatagatgagagtggggaaaatgaggaagaagcaggtcttgaaaactcttcggaaatttctgcagatgagtggagcaggggaaatatacttaaaaattcagtgggagagaatattgaacctgtgaaaattttagtgcctgaaaaaagtttaccatgtaaagtaagtaataataattatccaatccctgaacaaatgaatcttaatgaagattcatgtaacaaaaaatcaaatgtaatagataataaatctggaaaagttacagcttatgatttacttagcaatcgagtaatcaagaaacccatgtcagcaagtgctctttttgttcaagatcatcgtcctcagtttctcatagaaaatcctaagactagtttagaggatgcaacactacaaattgaagaactgtggaagacattgagtgaagaggaaaaactgaaatatgaagagaaggctactaaagacttggaacgatacaatagtcaaatgaagagagccattgaacaggagtcacaaatgtcactaaaagatggcagaaaaaagataaaacccaccagcgcatggaatttggcccagaagcacaagttaaaaacctcattatctaatcaaccaaaacttgatgaactccttcagtcccaaattgaaaaaagaaggagtcaaaatattaaaatggtacagatccccttttctatgaaaaacttaaaaataaattttaagaaacaaaacaaagttgacttagaagagaaggatgaaccttgcttgatccacaatctcaggtttcctgatgcatggctaatgacatccaaaacagaggtaatgttattaaatccatatagagtagaagaagccctgctatttaaaagacttcttgagaatcataaacttcctgcagagccactggaaaagccaattatgttaacagagagtctttttaatggatctcattatttagacgttttatataaaatgacagcagatgaccaaagatacagtggatcaacttacctgtctgatcctcgtcttacagcgaatggtttcaagataaaattgataccaggagtttcaattactgaaaattacttggaaatagaaggaatggctaattgtctcccattctatggagtagcagatttaaaagaaattcttaatgctatattaaacagaaatgcaaaggaagtttatgaatgtagacctcgcaaagtgataagttatttagagggagaagcagtgcgtctatccagacaattacccatgtacttatcaaaagaggacatccaagacattatctacagaatgaagcaccagtttggaaatgaaattaaagagtgtgttcatggtcgcccattttttcatcatttaacctatcttccagaaactacatagtaatgaactagtccgtaacttgaaagtatttcgatttcttggctttatatatcttgtggaaaggacgaccaatatctgtgcctctctctaaa

SEQ ID NO: 1482 - DNA, 2783 bp, Homo sapiens
  source 1..2783: mol_type = genomic DNA
accgccaccatgaaacaattgcctgcggcaacagttcgactcctttcaagttctcagatcatcacttcggtggtcagtgttgtaaaagagcttattgaaaactccttggatgctggtgccacaagcgtagatgttaaactggagaactatggatttgataaaattgaggtgcgagataacggggagggtatcaaggctgttgatgcacctgtaatggcaatgaagtactacacctcaaaaataaatagtcatgaagatcttgaaaatttgacaacttacggttttcgtggagaagccttggggtcaatttgttgtatagctgaggttttaattacaacaagaacggctgctgataattttagcacccagtatgttttagatggcagtggccacatactttctcagaaaccttcacatcttggtcaaggtacaactgtaactgctttaagattatttaagaatctacctgtaagaaagcagttttactcaactgcaaaaaaatgtaaagatgaaataaaaaagatccaagatctcctcatgagctttggtatccttaaacctgacttaaggattgtctttgtacataacaagatttatctcagtggatttcttccaaagtgtgatgcagaccactctttcactagtctttcaacaccagaaagaagtttcatcttcataaacagtcgaccagtacatcaaaaagatatcttaaagttaatccgacatcattacaatctgaaatgcctaaaggaatctactcgtttgtatcctgttttctttctgaaaatcgatgttcctacagctgatgttgatgtaaatttaacaccagataaaagccaagtattattacaaaataaggaatctgttttaattgctcttgaaaatctgatgacgacttgttatggaccattacctagtacaaattcttatgaaaataataaaacagatgtttccgcagctgacatcgttcttagtaaaacagcagaaacagatgtgctttttaataaagtggaatcatctggaaagaattattcaaatgttgatacttcagtcattccattccaaaatgatatgcataatgatgaatctggaaaaaacactgatgattgtttaaatcaccagataagtattggtgactttggttatggtcattgtagtagtgaaatttctaacattgataaaaacactaagaatgcatttcaggacatttcaatgagtaatgtatcatgggagaactctcagacggaatatagtaaaacttgttttataagttccgttaagcacacccagtcagaaaatggcaataaagaccatatagatgagagtggggaaaatgaggaagaagcaggtcttgaaaactcttcggaaatttctgcagatgagtggagcaggggaaatatacttaaaaattcagtgggagagaatattgaacctgtgaaaattttagtgcctgaaaaaagtttaccatgtaaagtaagtaataataattatccaatccctgaacaaatgaatcttaatgaagattcatgtaacaaaaaatcaaatgtaatagataataaatctggaaaagttacagcttatgatttacttagcaatcgagtaatcaagaaacccatgtcagcaagtgctctttttgttcaagatcatcgtcctcagtttctcatagaaaatcctaagactagtttagaggatgcaacactacaaattgaagaactgtggaagacattgagtgaagaggaaaaactgaaatatgaagagaaggctactaaagacttggaacgatacaatagtcaaatgaagagagccattgaacaggagtcacaaatgtcactaaaagatggcagaaaaaagataaaacccaccagcgcatggaatttggcccagaagcacaagttaaaaacctcattatctaatcaaccaaaacttgatgaactccttcagtcccaaattgaaaaaagaaggagtcaaaatattaaaatggtacagatccccttttctatgaaaaacttaaaaataaattttaagaaacaaaacaaagttgacttagaagagaaggatgaaccttgcttgatccacaatctcaggtttcctgatgcatggctaatgacatccaaaacagaggtaatgttattaaatccatatagagtagaagaagccctgctatttaaaagacttcttgagaatcataaacttcctgcagagccactggaaaagccaattatgttaacagagagtctttttaatggatctcattatttagacgttttatataaaatgacagcagatgaccaaagatacagtggatcaacttacctgtctgatcctcgtcttacagcgaatggtttcaagataaaattgataccaggagtttcaattactgaaaattacttggaaatagaaggaatggctaattgtctcccattctatggagtagcagatttaaaagaaattcttaatgctatattaaacagaaatgcaaaggaagtttatgaatgtagacctcgcaaagtgataagttatttagagggagaagcagtgcgtctatccagacaattacccatgtacttatcaaaagaggacatccaagacattatctacagaatgaagcaccagtttggaaatgaaattaaagagtgtgttcatggtcgcccattttttcatcatttaacctatcttccagaaactacatagtaatgaactagtccgtaacttgaaagtatttcgatttcttggctttatatatcttgtggaaaggacgaggccggatttaactcagtggctcg

SEQ ID NO: 1483 - DNA, 647 bp, Homo sapiens
  source 1..647: mol_type = genomic DNA
accgccaccatgaaacaattgcctgcggcaacagttcgactcctttcaagttctcagatcatcacttcggtggtcagtgttgtaaaagagcttattgaaaactccttggatgctggtgccacaagcgtagatgttaaactggagaactatggatttgataaaattgaggtgcgagataacggggagggtatcaaggctgttgatgcacctgtaatggcaatgaagtactacacctcaaaaataaatagtcatgaagatcttgaaaatttgacaacttacggttttcgtggagaagccttggggtcaatttgttgtatagctgaggttttaattacaacaagaacggctgctgataattttagcacccagtatgttttagatggcagtggccacatactttctcagaaaccttcacatcttggtcaaggtaagaaagtagctttgtatacaaacattctttaccttttctgtcttaattgttggtttaaaaaaaaaaagttactcggtgaatacaaatatattgctttgggcttggtcctgataaaggctagttagtaatgaactagtccgtaacttgaaagtatttcgatttcttggctttatatatcttgtggaaaggacgagttcgcccttaatgcacgtctcgt

SEQ ID NO: 1484 - DNA, 1685 bp, Homo sapiens
  source 1..1685: mol_type = genomic DNA
accgccaccatgagaaaggagcattgtgaatataatgaacctgtgaaatcatatggtaatagctcatcccattttgtcattaccccctttaagtgtaatcattgtggaaaaggcttcaatcagactttggacctcatcagacatctgagaattcatactggagagaagccctatgaatgtagtaactgtagaaaagccttcagtcacaaggaaaaacttattaaacattataaaattcacagtagggagcagtcttacaaatgtaatgaatgtggtaaagctttcattaaaatgtcaaatctcattagacatcaaagaattcatactggagagaagccctatgcatgtaaggaatgtgagaagtccttcagccagaaatcaaatcttattgatcatgaaaaaattcatactggagagaaaccttatgaatgtaatgagtgtggaaaagcattcagccagaagcaaagcctcattgcacatcagaaagttcatactggggagaaaccttatgcatgtaatgaatgtggtaaagccttccctcgaattgcatcccttgctcttcatatgagaagtcatacaggagaaaaaccttataaatgtgataaatgtggtaaagccttctctcagttttccatgcttattatacatgttagaattcatacaggtgaaaaaccctatgaatgtaatgagtgtggaaaagccttctctcaaagctcagcccttactgtacatatgagaagtcacactggtgagaaaccctatgaatgtaaggaatgcagaaaagccttcagccacaagaaaaacttcattacacaccagaaaattcatactagagagaaaccttatgagtgtaatgaatgtgggaaagcttttatacagatgtcaaatcttgttagacaccagagaattcatactggggaaaaaccctatatatgtaaggaatgtgggaaagcctttagccagaaatcaaatctcattgctcatgaaaaaattcattctggagagaaaccctatgaatgcaatgaatgtggtaaagccttcagccaaaagcaaaacttcattacacatcaaaaagttcatactggagagaaaccttatgattgtaatgaatgtggtaaagccttctctcaaattgcatcccttacccttcatttgagaagtcatacaggggaaaagccttatgaatgtgataaatgtggtaaagccttctctcagtgctcactgcttaatttacatatgagaagtcacacaggtgagaagccctatgtatgtaatgaatgtgggaaagccttctctcaaagaacttcccttattgtgcacatgagaggccatacaggtgaaaaaccctatgaatgtaataaatgtggaaaagccttctcccaaagctcatcccttactatacatatacgaggacatacaggtgagaaacccttcgactgtagtaaatgtggaaaagccttctctcaaatctcatctcttacccttcatatgagaaaacatacaggtgagaagccctatcactgtattgagtgtggcaaggctttcagccaaaagtcgcaccttgttagacaccagagaattcatactcattagtaatgaactagtccgtaacttgaaagtatttcgatttcttggctttatatatcttgtggaaaggacgaccaccggccattgaagggtccata

SEQ ID NO: 1485 - DNA, 2162 bp, Homo sapiens
  source 1..2162: mol_type = genomic DNA
accgccaccatgactgagtcccagggaacagtaacattcaaagatgtggctatcgacttcactcaggaggagtggaagagattggatcctgctcagagaaaactgtaccggaatgtgatgctagaaaactataacaacttaatcacagtaggctatccgttcaccaaacctgatgtgattttcaaattggagcaagaagaagaaccatgggtgatggaggaagaagtattaaggagacactggcaaggagaaatatggggagttgatgagcatcagaaaaaccaggacagacttttgagacaagttgaagttaaattccagaaaacactgactgaagaaaaaggcaatgaatgtcaaaagaaatttgcaaatgtatttcctctgaactctgattttttcccttccagacacaatctctatgagtatgacttatttggaaagtgtttagaacataattttgactgtcataataatgtgaaatgccttatgagaaaggagcattgtgaatataatgaacctgtgaaatcatatggtaatagctcatcccattttgtcattaccccctttaagtgtaatcattgtggaaaaggcttcaatcagactttggacctcatcagacatctgagaattcatactggagagaagccctatgaatgtagtaactgtagaaaagccttcagtcacaaggaaaaacttattaaacattataaaattcacagtagggagcagtcttacaaatgtaatgaatgtggtaaagctttcattaaaatgtcaaatctcattagacatcaaagaattcatactggagagaagccctatgcatgtaaggaatgtgagaagtccttcagccagaaatcaaatcttattgatcatgaaaaaattcatactggagagaaaccttatgaatgtaatgagtgtggaaaagcattcagccagaagcaaagcctcattgcacatcagaaagttcatactggggagaaaccttatgcatgtaatgaatgtggtaaagccttccctcgaattgcatcccttgctcttcatatgagaagtcatacaggagaaaaaccttataaatgtgataaatgtggtaaagccttctctcagttttccatgcttattatacatgttagaattcatacaggtgaaaaaccctatgaatgtaatgagtgtggaaaagccttctctcaaagctcagcccttactgtacatatgagaagtcacactggtgagaaaccctatgaatgtaaggaatgcagaaaagccttcagccacaagaaaaacttcattacacaccagaaaattcatactagagagaaaccttatgagtgtaatgaatgtgggaaagcttttatacagatgtcaaatcttgttagacaccagagaattcatactggggaaaaaccctatatatgtaaggaatgtgggaaagcctttagccagaaatcaaatctcattgctcatgaaaaaattcattctggagagaaaccctatgaatgcaatgaatgtggtaaagccttcagccaaaagcaaaacttcattacacatcaaaaagttcatactggagagaaaccttatgattgtaatgaatgtggtaaagccttctctcaaattgcatcccttacccttcatttgagaagtcatacaggggaaaagccttatgaatgtgataaatgtggtaaagccttctctcagtgctcactgcttaatttacatatgagaagtcacacaggtgagaagccctatgtatgtaatgaatgtgggaaagccttctctcaaagaacttcccttattgtgcacatgagaggccatacaggtgaaaaaccctatgaatgtaataaatgtggaaaagccttctcccaaagctcatcccttactatacatatacgaggacatacaggtgagaaacccttcgactgtagtaaatgtggaaaagccttctctcaaatctcatctcttacccttcatatgagaaaacatacaggtgagaagccctatcactgtattgagtgtggcaaggctttcagccaaaagtcgcaccttgttagacaccagagaattcatactcattagtaatgaactagtccgtaacttgaaagtatttcgatttcttggctttatatatcttgtggaaaggacgatctgtgcgttgacgcgagcacaag

SEQ ID NO: 1486 - DNA, 2036 bp, Homo sapiens
  source 1..2036: mol_type = genomic DNA
accgccaccatgacatctcaatcttcagtgatcagcaatagctgtgtgacaatggagcgtttgagccacatgatggaaaggaaagcttggtgttctcaagagtctgccctttccgaggaagaagaggatacaaccaggcctcttgaaacagtgacatttaaggatgtggctgttgaccttacccaggaggagtgggagcaaatgaaacctgctcaaagaaacttgtatcgagatgtgatgctggagaactacagcaacctagtcacagtgggctgtcaagtcaccaaaccggatgtgatattcaagttggagcaagaagaggagccctgggtgatggaggaagaaatgtttgggaggcactgtccagaagtttgggaagttgatgaacagatcaagaagcaacaggaaacacttgtgaggaaagtcacatccatctccaagaaaattctgataaaggaaaaagtcattgaatgtaaaaaagttgcgaaaatatttcctctgagttcagacattgttacttcaagacaaagcttctatgactgtgactcacttgataagggtttggaacataatttagacttacttagatatgagaaaggctgtgtaagagagaaacagagtaatgagtttgggaaaccattttaccattgtgcatcctatgttgtaaccccctttaagtgtaatcagtgtggacaagacttcagtcataaatttgacctcattagacatgagcgaattcatgctggagagaaaccttacgaatgtaaagaatgtggaaaagccttcagtaggaaggaaaatcttattacacatcagaaaattcatactggggaaaaaccgtataagtgtaatgaatgtggaaaagctttcattcagatgtcaaaccttattagacaccacagaattcatactggggagaaaccttatgcatgtaaggattgttggaaagccttcagtcagaaatcaaatctcattgaacatgagcgaattcacactggagagaaaccctatgaatgtaaggaatgtgggaaatccttcagccagaagcaaaatcttattgagcacgagaaaattcatactggggagaaaccttatgcatgtaatgaatgtggtagagctttttctcgaatgtcatctgttacgctacatatgagaagtcacacaggggagaaaccctataaatgtaataaatgtggaaaagctttctctcaatgctcagtatttattatacatatgagaagtcacactggtgagaaaccctatgtatgtagtgaatgtgggaaagccttctctcagagttcatccctaaccgtacatatgcgaaatcatacagctgagaaaccctatgaatgtaaggaatgtggaaaagccttcagcaggaaagaaaatctcattacacatcagaaaattcacactggagagaaaccttatgaatgcagtgaatgtgggaaagcttttattcagatgtcaaacctcattcgacaccagagaattcatacgggtgagaaaccctatgcatgtacagtatgtggaaaagcctttagtcagaaatcaaacctcactgaacatgagaaaattcatactggagagaaaccttatcattgtaatcaatgtgggaaagctttcagtcagagacaaaatcttcttgagcatgaaaaaattcatactggagagaaaccattcaaatgtaatgaatgtggtaaagccttctctcgaatctcatccctcactcttcatgtgagaagtcacacaggggagaaaccctatgaatgtaataaatgtgggaaagccttttctcagtgctcattacttattatacatatgagaagtcatactggtgagaaaccctttgaatgtaatgaatgtgggaaagcattctctcaaagagcatccctttctatacataagagaggtcatacaggtgagagacaccaagtatattagtaatgaactagtccgtaacttgaaagtatttcgatttcttggctttatatatcttgtggaaaggacgattggacccaaactgcgattcactc

SEQ ID NO: 1487 - DNA, 1844 bp, Homo sapiens
  source 1..1844: mol_type = genomic DNA
accgccaccatgaaacctgctcaaagaaacttgtatcgagatgtgatgctggagaactacagcaacctagtcacagtgggctgtcaagtcaccaaaccggatgtgatattcaagttggagcaagaagaggagccctgggtgatggaggaagaaatgtttgggaggcactgtccagaagtttgggaagttgatgaacagatcaagaagcaacaggaaacacttgtgaggaaagtcacatccatctccaagaaaattctgataaaggaaaaagtcattgaatgtaaaaaagttgcgaaaatatttcctctgagttcagacattgttacttcaagacaaagcttctatgactgtgactcacttgataagggtttggaacataatttagacttacttagatatgagaaaggctgtgtaagagagaaacagagtaatgagtttgggaaaccattttaccattgtgcatcctatgttgtaaccccctttaagtgtaatcagtgtggacaagacttcagtcataaatttgacctcattagacatgagcgaattcatgctggagagaaaccttacgaatgtaaagaatgtggaaaagccttcagtaggaaggaaaatcttattacacatcagaaaattcatactggggaaaaaccgtataagtgtaatgaatgtggaaaagctttcattcagatgtcaaaccttattagacaccacagaattcatactggggagaaaccttatgcatgtaaggattgttggaaagccttcagtcagaaatcaaatctcattgaacatgagcgaattcacactggagagaaaccctatgaatgtaaggaatgtgggaaatccttcagccagaagcaaaatcttattgagcacgagaaaattcatactggggagaaaccttatgcatgtaatgaatgtggtagagctttttctcgaatgtcatctgttacgctacatatgagaagtcacacaggggagaaaccctataaatgtaataaatgtggaaaagctttctctcaatgctcagtatttattatacatatgagaagtcacactggtgagaaaccctatgtatgtagtgaatgtgggaaagccttctctcagagttcatccctaaccgtacatatgcgaaatcatacagctgagaaaccctatgaatgtaaggaatgtggaaaagccttcagcaggaaagaaaatctcattacacatcagaaaattcacactggagagaaaccttatgaatgcagtgaatgtgggaaagcttttattcagatgtcaaacctcattcgacaccagagaattcatacgggtgagaaaccctatgcatgtacagtatgtggaaaagcctttagtcagaaatcaaacctcactgaacatgagaaaattcatactggagagaaaccttatcattgtaatcaatgtgggaaagctttcagtcagagacaaaatcttcttgagcatgaaaaaattcatactggagagaaaccattcaaatgtaatgaatgtggtaaagccttctctcgaatctcatccctcactcttcatgtgagaagtcacacaggggagaaaccctatgaatgtaataaatgtgggaaagccttttctcagtgctcattacttattatacatatgagaagtcatactggtgagaaaccctttgaatgtaatgaatgtgggaaagcattctctcaaagagcatccctttctatacataagagaggtcatacaggtgagagacaccaagtatattagtaatgaactagtccgtaacttgaaagtatttcgatttcttggctttatatatcttgtggaaaggacgaacgccctgacgctgcaaggatttg

SEQ ID NO: 1488 - DNA, 1817 bp, Homo sapiens
  source 1..1817: mol_type = genomic DNA
accgccaccatgaaacctgctcaaagaaacttgtatcgagatgtgatgctggagaactacagcaacctagtcacagtgggctgtcaagtcaccaaaccggatgtgatattcaagttggagcaagaagaggagccctgggtgatggaggaagaaatgtttgggaggcactgtccagaacccagaagaggagagaactgctgtgcgtctgaagtgatggcggagggcttgaagttcaaagatgtggtcatttacttctctcaaaaggagtgggaatgcttgcactctgctcagaaggatttgtaccgagatgtaatgttggaaaattacggcaacctggtcttactggggctttctgatactaagccaaatgtgatctccttattggagcagaagaaagagccctggatggttaagaggaaggagacaaaagaatggtgtccagattgggagtttggaagagaaaccaagaatttatctccaaaggaaaacatttatgaaattagatcaccacaacaggagaaggccagagttatcagagaaatcagatgccaggtggagagacaacagggtcatcaggagggacatttcagaccagctgtaataccatttacttccatgcagtgcacagcccatagagaatatcagtggcttcatactggagagaaatcctgtgaatgcaggaaatgtaagaatgcttttaggtaccagtcatgtcctattcaacatgaaataattcataataaggaaaaagaacctgaatgtggagaatgtaggaaaatctttaatagtggatcagacttgattaagcatcagacgcttcatgaaagcaaaaaacatagtgaaaataacaaatgtgcctttaatcatgattctggaattactcaacctcagagcattaatactggagagaaacctcataaatgtaaggaatgtgggaaagcctttcgttccagctcacaaattagtcagcatcagaggatgcatcttggtgagaaaccctataagtgtagggagtgtgggaaagcctttccatccactgcacagcttaatctacatcagaggatccatactgatgagaaatactatgaaagtaaggcgtgtgggaaggcctttacccgtccctcacacctttttcgacatcaaagaatccatacgggtgagaaaccccataaatgtaaggaatgtggaaaggcttttcgttatgacacacagctgagccttcatcagataatccatactggtgaaagacgctatgaatgcagggagtgtggaaaggtgtacagttgtgcctcacagctgagtctacatcaaagaattcatactggtgagaaaccccatgaatgtaaggaatgtgggaaagcctttatctctgattcacatcttattcgacatcagagtgtccatactggggagaaaccctgtaagtgtaaggaatgtgggaagtcctttcgtcgtggctcagaacttacccgacatcagagagctcatactggtgaaaaaccctatgagtgtaaggaatgtgaaaaggcctttacttgtagcacagaacttgttcgacatcaaaaagttcacactggggagagaccccataagtgtaaggaatgtgggaaggctttcattcgaaggtcagaactcacacatcatgagagaagtcacactggtgagaaaccctacgagtgtaaggagtgtgggaagccctttggtggtggctcagaacttagttagtaatgaactagtccgtaacttgaaagtatttcgatttcttggctttatatatcttgtggaaaggacgatgttcgtcgtgagaagtgtccggt

SEQ ID NO: 1489 - DNA, 2009 bp, Homo sapiens
  source 1..2009: mol_type = genomic DNA
accgccaccatgacatctcaatcttcagtgatcagcaatagctgtgtgacaatggagcgtttgagccacatgatggaaaggaaagcttggtgttctcaagagtctgccctttccgaggaagaagaggatacaaccaggcctcttgaaacagtgacatttaaggatgtggctgttgaccttacccaggaggagtgggagcaaatgaaacctgctcaaagaaacttgtatcgagatgtgatgctggagaactacagcaacctagtcacagtgggctgtcaagtcaccaaaccggatgtgatattcaagttggagcaagaagaggagccctgggtgatggaggaagaaatgtttgggaggcactgtccagaacccagaagaggagagaactgctgtgcgtctgaagtgatggcggagggcttgaagttcaaagatgtggtcatttacttctctcaaaaggagtgggaatgcttgcactctgctcagaaggatttgtaccgagatgtaatgttggaaaattacggcaacctggtcttactggggctttctgatactaagccaaatgtgatctccttattggagcagaagaaagagccctggatggttaagaggaaggagacaaaagaatggtgtccagattgggagtttggaagagaaaccaagaatttatctccaaaggaaaacatttatgaaattagatcaccacaacaggagaaggccagagttatcagagaaatcagatgccaggtggagagacaacagggtcatcaggagggacatttcagaccagctgtaataccatttacttccatgcagtgcacagcccatagagaatatcagtggcttcatactggagagaaatcctgtgaatgcaggaaatgtaagaatgcttttaggtaccagtcatgtcctattcaacatgaaataattcataataaggaaaaagaacctgaatgtggagaatgtaggaaaatctttaatagtggatcagacttgattaagcatcagacgcttcatgaaagcaaaaaacatagtgaaaataacaaatgtgcctttaatcatgattctggaattactcaacctcagagcattaatactggagagaaacctcataaatgtaaggaatgtgggaaagcctttcgttccagctcacaaattagtcagcatcagaggatgcatcttggtgagaaaccctataagtgtagggagtgtgggaaagcctttccatccactgcacagcttaatctacatcagaggatccatactgatgagaaatactatgaaagtaaggcgtgtgggaaggcctttacccgtccctcacacctttttcgacatcaaagaatccatacgggtgagaaaccccataaatgtaaggaatgtggaaaggcttttcgttatgacacacagctgagccttcatcagataatccatactggtgaaagacgctatgaatgcagggagtgtggaaaggtgtacagttgtgcctcacagctgagtctacatcaaagaattcatactggtgagaaaccccatgaatgtaaggaatgtgggaaagcctttatctctgattcacatcttattcgacatcagagtgtccatactggggagaaaccctgtaagtgtaaggaatgtgggaagtcctttcgtcgtggctcagaacttacccgacatcagagagctcatactggtgaaaaaccctatgagtgtaaggaatgtgaaaaggcctttacttgtagcacagaacttgttcgacatcaaaaagttcacactggggagagaccccataagtgtaaggaatgtgggaaggctttcattcgaaggtcagaactcacacatcatgagagaagtcacactggtgagaaaccctacgagtgtaaggagtgtgggaagccctttggtggtggctcagaacttagttagtaatgaactagtccgtaacttgaaagtatttcgatttcttggctttatatatcttgtggaaaggacgaccgaattgttgacaaagggcggtc

SEQ ID NO: 1490 - DNA, 1952 bp, Homo sapiens
  source 1..1952: mol_type = genomic DNA
accgccaccatggatgtgatgttggaaaactattgccacctcatctctgtggggtgtcacatgaccaaacctgatgtgatcctcaagttggaacgaggagaagagccatggacatcatttgcaggtcatacctgcttggaagaaaactggaaagctgaagactttttagtgaaattcaaggaacaccaagagaagtattctagatcagttgtaagcatcaaccacaaaaaactggtgaaggagaagagtaaaatatatgaaaagacatttactctaggcaaaaaccctgtgaattcaaaaaatctacctcctgaatatgatactcatggaaggattttgaaaaatgtttcagaattaatcatcagtaatctaaatcctgcaagaaagagacttagtgagtataatggatatgggaaatcactcctgagtactaaacaagagactactcatcctgaagtcaaatcccataatcaaagtgccagagctttcagtcataatgaagttcttatgcagtatcagaaaacggaaactccagcacagtcatttggatataatgactgtgagaaatcattccttcaaaggggaggcctgattacacatagtagaccttacaaaggagaaaacccatctgtatataataaaaaaagaagagcaaccaatattgaaaaaaaacatacatgcaatgaatgtgggaaatctttctgcaggaaatcagtattgattctgcatcagggaattcactcagaagaaaaaccctatcaatgtcatcaatgtggaaatgcatttagaaggaaatcatatctcattgatcatcagagaactcacacaggagagaaaccctttgtttgcaatgaatgtggtaagtccttccgcctcaagacagccctcactgatcatcagagaacacacacaggggagaaatcgtatgaatgtctgcaatgtaggaatgccttcagattgaagtcacacctcattcgtcatcagagaactcacacgggagagaaaccatatgagtgtaatgactgtgggaagtccttccgccagaagacaacactctctctacatcagagaatccatacaggtgagaaaccctacatttgtaaagaatgtgggaagtcctttcaccagaaggcaaatcttactgtacatcagagaactcatacaggggaaaagccctatatttgtaatgaatgtgggaaatccttctcccagaagacaacccttgctcttcatgagaaaactcataatgaggagaaaccctatatttgtagtgaatgtggaaagtccttccgccagaagacaacccttgtagcacatcagagaacacatacaggggagaaatcttatgaatgtcctcactgtgggaaggcctttagaatgaagtcatacctcattgatcatcaccgaactcacacaggagagaaaccatatgaatgtaatgaatgtggtaaatcattcagtcaaaagacaaatctcaatctacatcagagaattcatacaggggagaaaccctatgtttgtaatgaatgtgggaagtcctttcgccagaaagcaaccctcactgtacatcagaaaatacataccggccagaaatcctatgaatgtcctcagtgtgggaaagcctttagcaggaagtcatatctcattcatcatcaaagaactcatacgggagagaaaccatataaatgtagtgaatgtggaaagtgcttccgccagaagacaaatcttattgtacatcagagaactcacacaggtgagaaaccctatgtttgtaatgagtgtggtaagtctttcagttataagagaaacctcattgtccatcaaagaactcacaagggagaaaacattgaaatgcaatagtaatgaactagtccgtaacttgaaagtatttcgatttcttggctttatatatcttgtggaaaggacgaccatcacggactagctccaatgat

SEQ ID NO: 1491 - DNA, 2045 bp, Homo sapiens
  source 1..2045: mol_type = genomic DNA
accgccaccatggctcagggatcagtgtctttcaatgatgtgactgtggacttcactcaggaggagtggcagcacctggatcatgctcagaagactctatatatggatgtgatgttggaaaactattgccacctcatctctgtggggtgtcacatgaccaaacctgatgtgatcctcaagttggaacgaggagaagagccatggacatcatttgcaggtcatacctgcttggaagaaaactggaaagctgaagactttttagtgaaattcaaggaacaccaagagaagtattctagatcagttgtaagcatcaaccacaaaaaactggtgaaggagaagagtaaaatatatgaaaagacatttactctaggcaaaaaccctgtgaattcaaaaaatctacctcctgaatatgatactcatggaaggattttgaaaaatgtttcagaattaatcatcagtaatctaaatcctgcaagaaagagacttagtgagtataatggatatgggaaatcactcctgagtactaaacaagagactactcatcctgaagtcaaatcccataatcaaagtgccagagctttcagtcataatgaagttcttatgcagtatcagaaaacggaaactccagcacagtcatttggatataatgactgtgagaaatcattccttcaaaggggaggcctgattacacatagtagaccttacaaaggagaaaacccatctgtatataataaaaaaagaagagcaaccaatattgaaaaaaaacatacatgcaatgaatgtgggaaatctttctgcaggaaatcagtattgattctgcatcagggaattcactcagaagaaaaaccctatcaatgtcatcaatgtggaaatgcatttagaaggaaatcatatctcattgatcatcagagaactcacacaggagagaaaccctttgtttgcaatgaatgtggtaagtccttccgcctcaagacagccctcactgatcatcagagaacacacacaggggagaaatcgtatgaatgtctgcaatgtaggaatgccttcagattgaagtcacacctcattcgtcatcagagaactcacacgggagagaaaccatatgagtgtaatgactgtgggaagtccttccgccagaagacaacactctctctacatcagagaatccatacaggtgagaaaccctacatttgtaaagaatgtgggaagtcctttcaccagaaggcaaatcttactgtacatcagagaactcatacaggggaaaagccctatatttgtaatgaatgtgggaaatccttctcccagaagacaacccttgctcttcatgagaaaactcataatgaggagaaaccctatatttgtagtgaatgtggaaagtccttccgccagaagacaacccttgtagcacatcagagaacacatacaggggagaaatcttatgaatgtcctcactgtgggaaggcctttagaatgaagtcatacctcattgatcatcaccgaactcacacaggagagaaaccatatgaatgtaatgaatgtggtaaatcattcagtcaaaagacaaatctcaatctacatcagagaattcatacaggggagaaaccctatgtttgtaatgaatgtgggaagtcctttcgccagaaagcaaccctcactgtacatcagaaaatacataccggccagaaatcctatgaatgtcctcagtgtgggaaagcctttagcaggaagtcatatctcattcatcatcaaagaactcatacgggagagaaaccatataaatgtagtgaatgtggaaagtgcttccgccagaagacaaatcttattgtacatcagagaactcacacaggtgagaaaccctatgtttgtaatgagtgtggtaagtctttcagttataagagaaacctcattgtccatcaaagaactcacaagggagaaaacattgaaatgcaatagtaatgaactagtccgtaacttgaaagtatttcgatttcttggctttatatatcttgtggaaaggacgatgtctctagtcgaataattaacag

SEQ ID NO: 1492 - DNA, 1880 bp, Homo sapiens
  source 1..1880: mol_type = genomic DNA
accgccaccatggatgtgatgttggaaaactattgccacctcatctctgtggggtgtcacatgaccaaacctgatgtgatcctcaagttggaacgaggagaagagccatggacatcatttgcaggtcatacctgcttggaagaaaactggaaagctgaagactttttagtgaaattcaaggaacaccaagagaagtattctagatcagttgtaagcatcaaccacaaaaaactggtgaaggagaagagtaaaatatatgaaaagacatttactctaggcaaaaaccctgtgaattcaaaaaatctacctcctgaatatgatactcatggaaggattttgaaaaatgtttcagaattaatcatcagtaatctaaatcctgcaagaaagagacttagtgagtataatggatatgggaaatcactcctgagtactaaacaagagactactcatcctgaagtcaaatcccataatcaaagtgccagagctttcagtcataatgaagttcttatgcagtatcagaaaacggaaactccagcacagtcatttggatataatgactgtgagaaatcattccttcaaaggggaggcctgattacacatagtagaccttacaaaggagaaaacccatctgtatataataaaaaaagaagagcaaccaatattgaaaaaaaacatacatgcaatgaatgtgggaaatctttctgcaggaaatcagtattgattctgcatcagggaattcactcagaagaaaaaccctatcaatgtcatcaatgtggaaatgcatttagaaggaaatcatatctcattgatcatcagagaactcacacaggagagaaaccctttgtttgcaatgaatgtggtaagtccttccgcctcaagacagccctcactgatcatcagagaacacacacaggggagaaatcgtatgaatgtctgcaatgtaggaatgccttcagattgaagtcacacctcattcgtcatcagagaactcacacgggagagaaaccatatgagtgtaatgactgtgggaagtccttccgccagaagacaacactctctctacatcagagaatccatacaggtgagaaaccctacatttgtaaagaatgtgggaagtcctttcaccagaaggcaaatcttactgtacatcagagaactcatacaggggaaaagccctatatttgtaatgaatgtgggaaatccttctcccagaagacaacccttgctcttcatgagaaaactcataatgaggagaaaccctatatttgtagtgaatgtggaaagtccttccgccagaagacaacccttgtagcacatcagagaacacatacaggggagaaatcttatgaatgtcctcactgtgggaaggcctttagaatgaagtcatacctcattgatcatcaccgaactcacacaggagagaaaccatatgaatgtaatgaatgtggtaaatcattcagtcaaaagacaaatctcaatctacatcagagaattcatacaggggagaaaccctatgtttgtaatgaatgtgggaagtcctttcgccagaaagcaaccctcactgtacatcagaaaatacataccggccagaaatcctatgaatgtcctcagtgtgggaaagcctttagcaggaagtcatatctcattcatcatcaaagaactcatacgggagagaaaccatataaatgtagtgaatgtggaaagtgcttccgccagaagacaaatcttattgtacatcagagaactcacacaggtggagaggatggcctaactggatgtttatcctagtaatgaactagtccgtaacttgaaagtatttcgatttcttggctttatatatcttgtggaaaggacgacaccaacccatcatactactatcg

SEQ ID NO: 1493 - DNA, 1046 bp, Homo sapiens
  source 1..1046: mol_type = genomic DNA
accgccaccatggaaaaactcacaagacgtgattttcagtgctccagtttcagagatgattgggaatgtaatcggcagtttaagaaagaactcggctctcaggggggacatttcaatcaattggtattcactcatgaagatctgcccactttgagtcaccatccatccttcacattacagcaaatcattaacagtaaaaagaaattctgtgcatctaaagaatataggaaaacctttagacatggctcacagtttgctacacatgagataattcataccattgagaagccttatgaatgtaaggaatgtggaaagtcctttagacatccctcaagactcactcatcatcagaaaattcatactggcaagaaaccctttgaatgtaaggaatgtggaaaaacctttatttgtggctcagaccttactcgacatcacagaattcacactggtgagaaaccctatgaatgtaaggaatgtgggaaagcctttagtagtggttcaaacttcactcgacatcagagaattcacacaggtgagaagccttatgaatgcaaagaatgcgggaaggcctttagtagtggctcaaactttactcaacatcagagaattcatactggggaaaaaccctatgaatgtaaggaatgtggcaatgcctttagtcagagctcacaacttattaaacatcaaagaatccatacaggtgagaaaccttacgaatgtaaggaatgtgaaaaggcttttcgttctggctcagaccttactagacatcagagaattcatactggggagaaaccctatgaatgtaagatatgtgggaaggcttattctcagagttcacagcttattagtcatcatagaattcatactagtgagaaaccctatgaatatagggaatgtggaaagaactttaattatgacccacaacttattcagcatcaaaatttgtactggtagtaatgaactagtccgtaacttgaaagtatttcgatttcttggctttatatatcttgtggaaaggacgacttaaacaccgggcctatccattc

SEQ ID NO: 1494 - DNA, 1361 bp, Homo sapiens
  source 1..1361: mol_type = genomic DNA
accgccaccatggctcaggagtcagtgatgttcagtgatgtgtccgtagacttctctcaggaggagtgggaatgcctgaatgatgatcagagagatttatacagagatgtgatgttggagaattacagcaacctggtttcaatggcagggcattctatttctaaaccaaatgtgatctcctacttggagcaagggaaggagccctggttggctgacagagagctaacaagaggccagtggccagtcctggaatcaagatgtgagaccaagaaattatttctgaagaaagaaatttatgaaatagaatcaacccagtgggaaataatggaaaaactcacaagacgtgattttcagtgctccagtttcagagatgattgggaatgtaatcggcagtttaagaaagaactcggctctcaggggggacatttcaatcaattggtattcactcatgaagatctgcccactttgagtcaccatccatccttcacattacagcaaatcattaacagtaaaaagaaattctgtgcatctaaagaatataggaaaacctttagacatggctcacagtttgctacacatgagataattcataccattgagaagccttatgaatgtaaggaatgtggaaagtcctttagacatccctcaagactcactcatcatcagaaaattcatactggcaagaaaccctttgaatgtaaggaatgtggaaaaacctttatttgtggctcagaccttactcgacatcacagaattcacactggtgagaaaccctatgaatgtaaggaatgtgggaaagcctttagtagtggttcaaacttcactcgacatcagagaattcacacaggtgagaagccttatgaatgcaaagaatgcgggaaggcctttagtagtggctcaaactttactcaacatcagagaattcatactggggaaaaaccctatgaatgtaaggaatgtggcaatgcctttagtcagagctcacaacttattaaacatcaaagaatccatacaggtgagaaaccttacgaatgtaaggaatgtgaaaaggcttttcgttctggctcagaccttactagacatcagagaattcatactggggagaaaccctatgaatgtaagatatgtgggaaggcttattctcagagttcacagcttattagtcatcatagaattcatactagtgagaaaccctatgaatatagggaatgtggaaagaactttaattatgacccacaacttattcagcatcaaaatttgtactggtagtaatgaactagtccgtaacttgaaagtatttcgatttcttggctttatatatcttgtggaaaggacgaacaacggtgtgaagacacgtgagc

SEQ ID NO: 1495 - DNA, 1358 bp, Homo sapiens
  source 1..1358: mol_type = genomic DNA
accgccaccatggctcaggagtcagtgatgttcagtgatgtgtccgtagacttctctcaggaggagtgggaatgcctgaatgatgatcagagagatttatacagagatgtgatgttggagaattacagcaacctggtttcaatggggcattctatttctaaaccaaatgtgatctcctacttggagcaagggaaggagccctggttggctgacagagagctaacaagaggccagtggccagtcctggaatcaagatgtgagaccaagaaattatttctgaagaaagaaatttatgaaatagaatcaacccagtgggaaataatggaaaaactcacaagacgtgattttcagtgctccagtttcagagatgattgggaatgtaatcggcagtttaagaaagaactcggctctcaggggggacatttcaatcaattggtattcactcatgaagatctgcccactttgagtcaccatccatccttcacattacagcaaatcattaacagtaaaaagaaattctgtgcatctaaagaatataggaaaacctttagacatggctcacagtttgctacacatgagataattcataccattgagaagccttatgaatgtaaggaatgtggaaagtcctttagacatccctcaagactcactcatcatcagaaaattcatactggcaagaaaccctttgaatgtaaggaatgtggaaaaacctttatttgtggctcagaccttactcgacatcacagaattcacactggtgagaaaccctatgaatgtaaggaatgtgggaaagcctttagtagtggttcaaacttcactcgacatcagagaattcacacaggtgagaagccttatgaatgcaaagaatgcgggaaggcctttagtagtggctcaaactttactcaacatcagagaattcatactggggaaaaaccctatgaatgtaaggaatgtggcaatgcctttagtcagagctcacaacttattaaacatcaaagaatccatacaggtgagaaaccttacgaatgtaaggaatgtgaaaaggcttttcgttctggctcagaccttactagacatcagagaattcatactggggagaaaccctatgaatgtaagatatgtgggaaggcttattctcagagttcacagcttattagtcatcatagaattcatactagtgagaaaccctatgaatatagggaatgtggaaagaactttaattatgacccacaacttattcagcatcaaaatttgtactggtagtaatgaactagtccgtaacttgaaagtatttcgatttcttggctttatatatcttgtggaaaggacgagggtgccgtgggaagatgaaacga

SEQ ID NO: 1496 - DNA, 1601 bp, Homo sapiens
  source 1..1601: mol_type = genomic DNA
accgccaccatggcccagggactggtgacattcagggacgtggccatagagttctctctggaagaatggaagtgcctggaacctgctcagagggacttgtacagggaggtgactctggagaactttggtcacttggcctcactaggactctccatttctaagcctgatgtcgtctccttattggagcaagggaaagagccctggatgattgcaaatgatgtgacaggaccatggtgcccagacttggagtccaggtgtgagaaatttctacaaaaagacatttttgaaatcggggcattcaactgggagataatggaaagccttaaatgcagtgacctggagggctccgattttagagctgactgggaatgcgaaggccagtttgagagacaagtcaatgaagagtgctattttaagcaagtgaacgtcacctatggacatatgcccgtgttccagcatcacacgtctcacactgtacgtcagagcagggagactggtgagaaactgatggaatgtcatgaatgtgggaaagcatttagccgtggctcacaccttattcaacatcagaaaattcacactggtgaaaaaccctttggatgtaaggaatgtgggaaggccttcagccgtgcctcacaccttgttcagcatcagagaattcacacgggtgagaaaccttatgactgtaaggactgtgggaaggcctttggtcgtacatcagaacttattctacatcagagacttcatactggtgtcaaaccttatgaatgtaaagaatgtgggaagacctttaggcagcattcacagctgattctgcatcaaagaactcacacaggcgagaaaccctacgtatgtaaagactgtggcaaggctttcattcgtggctcccaactcactgtgcatcggagaatccacacaggggccagaccctatgagtgtaaagaatgcgggaaagcctttagacagcactcacagctgactgtacaccagcgaatccacactggtgagaaaccctacgagtgtaaggaatgcggaaagggctttattcacagctcagaagttactcgacatcaaagaattcattctggggagaaaccctatgagtgtaaggaatgtgggaaggccttcagacagcacgcacagctcacacgacatcagagagtccatactggcgacagaccctatgaatgtaaggactgcgggaaggcatttagtcgtagctcatacctcattcaacatcaaagaattcatacaggtgacaaaccctacgaatgtaaggaatgtgggaaggcctttattcgtgtttcacaactgactcatcatcagcgaattcacacttgtgagaaaccctatgaatgcagggagtgtggaatggcctttattcgtagttcacaacttaccgaacatcagagaattcatcctggtatcaaaccttacgaatgtagagagtgtgggcaggcatttattcttggctcacaactcattgaacactacagaattcatactggttagtaatgaactagtccgtaacttgaaagtatttcgatttcttggctttatatatcttgtggaaaggacgacgaacaacctctgcacacatctgg

SEQ ID NO: 1497 - DNA, 440 bp, Homo sapiens
  source 1..440: mol_type = genomic DNA
accgccaccatgctggccattggtctttccctttgtgatcatctttctcaagatgttttctgtcttcatgagtcaaaatttgaagaggaaaggatggtggctgggtggttgacaaattactctcaggactcagtgacctttgaggatgtggctgtggacttcacccaggaggagtggactttgctggatcaaactcagagaaacttatacagagatgtgatgctggagaactataagaatctagttgcagtagattgggagagtcatattaataccaaatggtcagcacctcagcagaattttttgcaggggaaaacatccagtgtggtggaaatgaattcagagtagtaatgaactagtccgtaacttgaaagtatttcgatttcttggctttatatatcttgtggaaaggacgacgggtggcctgggtcccttcgagt

SEQ ID NO: 1498 - DNA, 1910 bp, Homo sapiens
  source 1..1910: mol_type = genomic DNA
accgccaccatgcgcataacggccgccatcttaacagcgcgttcccgttggcgtctgaggaacagcatctctgccttcctgttcacggtgaccttcgcttggtgtcctcctggcctcagcaacctgacaattctgtcgtgtcccgatcatctttctcaagatgttttctgtcttcatgagtcaaaatttgaagaggaaaggatggtggctgggtggttgacaaattactctcaggactcagtgacctttgaggatgtggctgtggacttcacccaggaggagtggactttgctggatcaaactcagagaaacttatacagagatgtgatgctggagaactataagaatctagttgcagtagattgggagagtcatattaataccaaatggtcagcacctcagcagaattttttgcaggggaaaacatccagtgtggtggaaatggagagaaaccattttggagaggaactgtttgactttaaccaatgtgaaaaagccttgagtgaacactcatgccttaagactcacaggagaacttactttagaaagaaaacctgtgagtgtaatcaatgtgaaaaagccttcagaaaaccctctatctttactttacacaagaaaactgatatcggagaggaacttcctaactgtaatcaatgtgaaacagccttcagccaacatctacatcttgtttgcaagaaaactagccaaaatctacatcttgtttgcaagaaaactcacactcaagagaaaccatataaatgcagtgactgtgaaaaaggcttaccttcctcctcacacctcagagaatgtgtaagaatttatggtggagagagaccatatactcataaggagtatgtcgaaaccttttctcattctacagccctttttgtacacatgcaaactcaagatggagaaaaattctatgaatgtaaagcatgtgggaaacccttcactgagtcgtcatatcttactcaacatttaagaactcatagtagagtgttacctatagaacataagaaatttggcaaagcctttgctttttccccagatcttgctaaacatataagacttagaactagaggaaaacactatgtttgtaatgaatgtggcaaagaatttacttgtttctcaaaactcaacattcacataagggttcacactggagaaaaaccgtatgagtgcaacaaatgtgggaaagccttcactgattcatcaggtcttataaaacacaggcgaactcacactggagaaaagccttatgaatgtaaggaatgtgggaaagcttttgctaactcttcacatcttactgtacatatgagaactcacactggtgagaagccttatcaatgtaaggaatgtggaaaagcctttattaattcctcttcctttaaaagtcacatgcagactcatcctggtgtaaaaccctatgactgtcaacagtgtgggaaagccttcattcgatcctcatttcttattcgacatttgagaagtcacagtgcagaaaggccttttgaatgtgaggaatgtgggaaagcctttagatactcctcgcaccttagtcaacataaaagaatacatacaggggagaggccatataaatgtcaaaagtgtgggcaagccttcagtatctcatcaggccttacagtacacatgagaactcacactggtgaacggccctttgaatgtcaggaatgtgggaaagcctttactcggtccacatatcttattcgacatctaagaagtcatagtgtggagaaaccatataaggaatgtgggcaaacctttagtaattcctcatgccttactgaatgtgtgtagtaatgaactagtccgtaacttgaaagtatttcgatttcttggctttatatatcttgtggaaaggacgaaagttaccagaaggctcacatcct

SEQ ID NO: 1499 - DNA, 356 bp, Homo sapiens
  source 1..356: mol_type = genomic DNA
accgccaccatggtggctgggtggttgacaaattactctcaggactcagtgacctttgaggatgtggctgtggacttcacccaggaggagtggactttgctggatcaaactcagagaaacttatacagagatgtgatgctggagaactataagaatctagttgcagtagattgggagagtcatattaataccaaatggtcagcacctcagcagaattttttgcaggggaaaacatccagtgtggtggaaatgaattcagagtagtaatgaactagtccgtaacttgaaagtatttcgatttcttggctttatatatcttgtggaaaggacgatccagagccttcacgacgatcagt

SEQ ID NO: 1500 - DNA, 1112 bp, Homo sapiens
  source 1..1112: mol_type = genomic DNA
accgccaccatgtctcaggctgtgcagacaaacggaactcaaccattaagcaaaacatgggaactcagtttatatgagttacaacgaacacctcaggaggcaataacagatggcttagaaattgtggtttcacctcgaagtctacacagtgaattaatgtgcccaatttgtttggatatgttgaagaacaccatgactacaaaggagtgtttacatcgtttttgtgcagactgcatcatcacagcccttagaagtggcaacaaagaatgtcctacctgtcggaaaaaactagtttccaaaagatcactaaggccagacccaaactttgatgcactcatcagcaaaatttatccaagtcgtgatgagtatgaagctcatcaagagagagtattagccaggatcaacaagcacaataatcagcaagcactcagtcacagcattgaggaaggactgaagatacaggccatgaacagactgcagcgaggcaagaaacaacagattgaaaatggtagtggagcagaagataatggtgacagttcacactgcagtaatgcatccacacatagcaatcaggaagcaggccctagtaacaaacggaccaaaacatctgatgattctgggctagagcttgataataacaatgcagcaatggcaattgatccagtaatggatggtgctagtgaaattgaattagtattcaggcctcatcccacacttatggaaaaagatgacagtgcacagacgagatacataaagacttctggtaacgccactgttgatcacttatccaagtatctggctgtgaggttagctttagaagaacttcgaagcaaaggtgaatcaaaccagatgaaccttgatacagccagtgagaagcagtataccatttatatagcaacagccagtggccagttcactgtattaaatggctctttttctttggaattggtcagtgagaaatactggaaagtgaacaaacccatggaactttattacgcacctacaaaggagcacaaatagtaatgaactagtccgtaacttgaaagtatttcgatttcttggctttatatatcttgtggaaaggacgagagggaggtcaggctagacccata

SEQ ID NO: 1501 - DNA, 1379 bp, Homo sapiens
  source 1..1379: mol_type = genomic DNA
accgccaccatgtcagcctttgatatgtcccatgggttttttcccagggaaccaatctgtccttttgaagaaaagacaaagataggaacgatggtagaggaccaccggtcaaattcttaccaggattcagtgacgtttgatgatgtggctgtggagttcaccccagaggagtgggctttactggacacaactcagaaatacctctacagagatgtgatgctggagaactacatgaacctggcctctgtggatttctttttctgcttaacttcagaatgggaaatacaacctagaaccaaacggtcatcacttcagcagggttttttgaagaatcaaatattcactgggatacaaatgacaagaagctacagtggatggaaactctgtgagaattgtggagaggtcttcagtgaacagttttgccttaagacacacatgagagctcagaatggagggaacacttttgagggtaattgttatggaaaagacagcatcagtgtgcacaaggaagcctctattggacaagaactttccaaatttaatccatgtggaaaagtcttcaccttaactccaggccttgctgtgcatcttgaaattctcaatggaagacaaccctacaaatgtaaggaatgtggaaaaggctttaagtattttgcaagccttgataatcacatgggaatccacattggagagaaactctgtgaatttcaggaatgtgagagagccatcacaacttcctcacacttaaagcagtgtgtagcagttcatactggaaagaaatccgaaaagactaagaactgtgggaaatccttcactaatttttctcaactttctgcacatgcaaaaactcataaaggagagaagtcctttgaatgtaaagaatgtggaagatcctttagaaattcctcatcctttaatgttcacattcaaattcacactggaataaaaccacacaaatgtacggaatgtgggaaagccttcactagatcaactcaccttactcaacatgtaagaactcacactggaataaaaccctatgaatgtaaggaatgtggccaagccttcactcagtacacgggccttgctatacacatacgaaatcacactggagagaaaccctatcagtgtaaggaatgtgggaaagccttcaatagatcttcaacgcttactcaacatagaagaattcacacaggagagaagccttatgaatgtgttgaatgtgggaagaccttcattacttcttcccatcgtagtaaacatttgaaaactcacagtggagaaaggtagtaatgaactagtccgtaacttgaaagtatttcgatttcttggctttatatatcttgtggaaaggacgaacgctcatatgcggacccaccttc

SEQ ID NO: 1502 - DNA, 1166 bp, Homo sapiens
  source 1..1166: mol_type = genomic DNA
accgccaccatgtcagcctttgatatgtcccatgatttctttttctgcttaacttcagaatgggaaatacaacctagaaccaaacggtcatcacttcagcagggttttttgaagaatcaaatattcactgggatacaaatgcagacaagaagctacagtggatggaaactctgtgagaattgtggagaggtcttcagtgaacagttttgccttaagacacacatgagagctcagaatggagggaacacttttgagggtaattgttatggaaaagacagcatcagtgtgcacaaggaagcctctattggacaagaactttccaaatttaatccatgtggaaaagtcttcaccttaactccaggccttgctgtgcatcttgaaattctcaatggaagacaaccctacaaatgtaaggaatgtggaaaaggctttaagtattttgcaagccttgataatcacatgggaatccacattggagagaaactctgtgaatttcaggaatgtgagagagccatcacaacttcctcacacttaaagcagtgtgtagcagttcatactggaaagaaatccgaaaagactaagaactgtgggaaatccttcactaatttttctcaactttctgcacatgcaaaaactcataaaggagagaagtcctttgaatgtaaagaatgtggaagatcctttagaaattcctcatcctttaatgttcacattcaaattcacactggaataaaaccacacaaatgtacggaatgtgggaaagccttcactagatcaactcaccttactcaacatgtaagaactcacactggaataaaaccctatgaatgtaaggaatgtggccaagccttcactcagtacacgggccttgctatacacatacgaaatcacactggagagaaaccctatcagtgtaaggaatgtgggaaagccttcaatagatcttcaacgcttactcaacatagaagaattcacacaggagagaagccttatgaatgtgttgaatgtgggaagaccttcattacttcttcccatcgtagtaaacatttgaaaactcacagtggagaaaggtagtaatgaactagtccgtaacttgaaagtatttcgatttcttggctttatatatcttgtggaaaggacgatattgtacgtatactcctggaagt

SEQ ID NO: 1503 - DNA, 1355 bp, Homo sapiens
  source 1..1355: mol_type = genomic DNA
accgccaccatgctggagaactacatgaacctggcctctgtggaatgggaaatacaacctagaaccaaacggtcatcacttcagcagggttttttgaagaatcaaatattcagtgggatacaaatgacaagaggctacagtggatggaaactctgtgactgtaagaattgtggagaggtcttcagggaacagttttgccttaagacacacatgagagttcagaatggagggaatacttctgagggtaattgttatggaaaagacaccctcagtgtgcacaaggaagcctctactggacaggaactttccaaatttaatccatgtggaaaagtctttactctaactccaggtcttgctgtacatcttgaagttctcaatgcaagacaaccctacaaatgtaaggaatgtggaaaaggctttaagtattttgcaagccttgataatcatatgggaatccacactgatgagaaactctgtgaatttcaggaatatgggagagctgtcacagcttcttcacacctaaagcagtgtgtagcagttcatacaggaaagaaatccaaaaagactaagaaatgtgggaaatccttcactaatttttctcaactttatgcacctgtgaaaactcataaaggagagaagtcctttgaatgtaaagaatgtggaagatcctttagaaattcctcatgccttaatgatcacattcaaattcacactggaataaaaccacacaagtgtacttactgtgggaaagccttcactagatcaactcaacttactgaacatgtaagaactcacactggaataaaaccctatgaatgtaaggaatgtggccaagcctttgctcagtactcgggcctttctatacacatacgaagtcacagtggaaagaaaccctatcagtgtaaggaatgtgggaaagccttcactacatccacaagtcttattcagcatacaagaattcacacaggagagaagccttatgaatgtgttgaatgtgggaagaccttcattacttcttcccgtcgtagtaaacatttgaaaactcatagtggagaaaagccctttgtatgcaagatatgtgggaaagcatttctatattcctcacgccttaatgttcacctgcgaactcataccggagagaaacccttcgtatgtaaagaatgtgggaaagcatttgctgtttcctcacgcctaagtagacatgaaagaattcacactggggagaaaccctatgaatgcaaggatatgagtgttaccatttagtaatgaactagtccgtaacttgaaagtatttcgatttcttggctttatatatcttgtggaaaggacgaactatgtctcggtggaccatatta

SEQ ID NO: 1504 - DNA, 1562 bp, Homo sapiens
  source 1..1562: mol_type = genomic DNA
accgccaccatggcagccatttatttgtcccgtgggtttttttccagggaaccaatctgcccttttgaagaaaagacaaaggtagaaaggatggtggaggactacctggcaagtggttatcaggattcagtgacgtttgatgatgtggctgtggacttcaccccagaggagtgggctttactggacacaactgagaaatacctctacagagatgtgatgctggagaactacatgaacctggcctctgtggaatgggaaatacaacctagaaccaaacggtcatcacttcagcagggttttttgaagaatcaaatattcagtgggatacaaatgacaagaggctacagtggatggaaactctgtgactgtaagaattgtggagaggtcttcagggaacagttttgccttaagacacacatgagagttcagaatggagggaatacttctgagggtaattgttatggaaaagacaccctcagtgtgcacaaggaagcctctactggacaggaactttccaaatttaatccatgtggaaaagtctttactctaactccaggtcttgctgtacatcttgaagttctcaatgcaagacaaccctacaaatgtaaggaatgtggaaaaggctttaagtattttgcaagccttgataatcatatgggaatccacactgatgagaaactctgtgaatttcaggaatatgggagagctgtcacagcttcttcacacctaaagcagtgtgtagcagttcatacaggaaagaaatccaaaaagactaagaaatgtgggaaatccttcactaatttttctcaactttatgcacctgtgaaaactcataaaggagagaagtcctttgaatgtaaagaatgtggaagatcctttagaaattcctcatgccttaatgatcacattcaaattcacactggaataaaaccacacaagtgtacttactgtgggaaagccttcactagatcaactcaacttactgaacatgtaagaactcacactggaataaaaccctatgaatgtaaggaatgtggccaagcctttgctcagtactcgggcctttctatacacatacgaagtcacagtggaaagaaaccctatcagtgtaaggaatgtgggaaagccttcactacatccacaagtcttattcagcatacaagaattcacacaggagagaagccttatgaatgtgttgaatgtgggaagaccttcattacttcttcccgtcgtagtaaacatttgaaaactcatagtggagaaaagccctttgtatgcaagatatgtgggaaagcatttctatattcctcacgccttaatgttcacctgcgaactcataccggagagaaacccttcgtatgtaaagaatgtgggaaagcatttgctgtttcctcacgcctaagtagacatgaaagaattcacactggggagaaaccctatgaatgcaaggatatgagtgttaccatttagtaatgaactagtccgtaacttgaaagtatttcgatttcttggctttatatatcttgtggaaaggacgaggcccattgcgaggcccagctgta

SEQ ID NO: 1505 - DNA, 2474 bp, Homo sapiens
  source 1..2474: mol_type = genomic DNA
accgccaccatggcttactgcctgacaaattgttatcagtactccgtgacctttgaggatacagctgtggacttcacccaggaggagtggattttactggacccagttcagagaaacttatacagagatgtgatgctggagaattatgagaacgtggccaaagtaggatttcagctctttaaacccagtgtcatctcttggttggaagaagaagagttgagaaccttgcagcaaggagttctccaagactgggcaataaaacatcaaaccagtgtttcagcactgcagcaggagttttggaaaatacaaacttctaatgggatacaaatggacctggtaacctttgacagtgtggctgtggagttcacccaggaagagtggactttactggacccagctcagagaaacctgtacagtgatgtgatgctggagaactacaagaacctgtcctcagtaggttaccagctcttcaaacccagtctgatctcttggctggaggaagaggaagagttgagcacactgccaagagttctccaagaatggaaaatgtgcctgaaaaccaaagggccagccctttggcaagataatttttgtttaaaaacattaaatgggatacagttggcaagaaaccaaaatggagaggaactctatgactgtaagcaatgtgaagatgtcttctgtaaacatccatgccttaagaccaacatgagtactcaaaatagaggcaacacgtctgaatgtattcagtatgcaaaagacctcctttctctatacaataaaacctctaccataaggaaagtttctgtgttcagtaagcatggaaaatctttccgcctgattttaaatgttcaggtccagagaaagtgtacacaagataaatcctttgaaggcactgactatgggaaagccttcatttatcagtcataccttgaagcacacaggaaaactcagagtggagaaaaactcaatgaatggaagcaatgtggggaagcatttactcactccacaagccatgctgtaaatgttgaaacacacattattaaaaacccctatgaatgtaaggaatgtggaaaagattttagataccctacccaccttaataatcacatgcaaacccacattgggataaaaccttataaatgtaagcactgtggcaaaaccttcactgtgccgtcaggctttcttgaacatgtacgaactcacactggagagaagccctatgggtgtaaggaatgtggtaaagcctttggtacatctgcaggccttattgaacatataagatgtcacgccagagagaaaacctttaaatgtgaccactgtgggaaagcctttatttcttacccatctctttttggacatttgagagttcataatggagagaagccatatgagcataaggaatatgggaaggcctttggtacatcctcaggtgttattgaagatagaagaagtaacacaggacagaaacgctttgattgtgaccagtgtgggaaagtctttgtttctttctcatctctttttgctcatttgagaactcacactggtgagaagccctttaagtgttacaaatgtgggaaaccatttacctcttctgcctgtcttcgtattcacatgcgaactcacacagaagagagactctatcaatgtaagaaatgtggtaaagctttcactaagtgctcatatcttaccaaacatttacgaacacacgctggagagaaaccctatgaatgtatgaaatgtgggaaagccttcactgagcgctcataccttactaaacatttacgaagacacagtggagagaagccatatgaatgtaagaaatgtggaaaagccttcacagaacgctcagatcttactaaacatttacgaagacacactggagataagccctatgaatataaggactgtgggaaagcctttgttgtctcctccagtctagttgatcatttaagaactcacactggatataaaccctataaatgtaatgcatgtgaaaaagcttacagtaggtcttgtgtactaactcaacacttaaaaactcatgcagcagagaagacctctgaatgtaacgcatgtggaaattcctttcgaaattccatgtgctttcatgatcgcttaaaaactctcaccaaaataaaaccctataaatgtaaggactgtgggaaagccttcacttgtcattcagatcttactaatcatgtgcgaattcacactggagagaagccctataaatgtaaggaatgtgggaaggccttccgtacatcctcaggacgtattcaacatttaagaactcatatgggagagaaaccctttgaatgtgaccagtgtgggaaagcctttgcttctttctcagctcgtattgcacatttgaaaacacactagtaatgaactagtccgtaacttgaaagtatttcgatttcttggctttatatatcttgtggaaaggacgataacacagccaagcacggtggtga

SEQ ID NO: 1506 - DNA, 1655 bp, Homo sapiens
  source 1..1655: mol_type = genomic DNA
accgccaccatgcagcctctgagcaagttgatggctatctcaaaacctcgaaacctgtctctacgtgaacaaagagaggttctgagagcagatatgtcttggcagcaggaaaccaaccccgtcgtggagacacatgactctgaggcatctcgtcaaaagttcagacatttccagtatttgaaagtgtctgggccccatgaagccctgagccaactctgggagctctgtcttcaatggctgagaccagagattcatacaaagaagcagattatagaactgttggtgctggaacaattcctggcaatcctgcctgaagaagtcaggacttgggtgaatttacaacatccaaacaacagtaaagatatggtgaccctcatagaagatgtgattgaaatgcttgaagatgaagatatgccctgcaaggactctgccctgcagatggggagcatcaaggagaaaatgaaagctggctcacgaacaggcaaaccacaggaaccagtgacattcaaagatgtggttgtggaattcagcaaggaagagtgggggcaactggactctgctgtaaagaacctgtacaggaatgtgatgctggaaaactttaggaacctgaattcattgcgtaaagcacatctactttccaaaccatttgagagccttaagttggagagtaagaaaaaaagatggataatggagaaagaaataccaaggaagactatttttgacatgaagagtatttctggagaagaatcatcccatggagtgattatgacaaggcttaccgaaagtggacacccttcttcagatgcctggaaaggtgagaattggttatataggaaccagaaaaaatgggacataaatttgccacaagaggctttcattcctgagacaatttacactgaggaggaagattttgaatgtagtgaaaataagaaaagctttgatattaattcagttagctcaatttgtgctatacaagtgggaattccttcaagaaaggggtctccaaaatgtgataagtttaaaacttacttcaaatttaatttagactcagtaggtaagcaacattcagaatatgaatatgggaatgacttgagtttgagtacagatattcgacaccaaaaaagtcatactacaatgaattcctatgaatgttatcaatgtgggaaagccttctgccgaagttcatcccttattcgacatcagatcattcacacaggagagaaaccctataaatgcagtgaatgtgggagattcttcaaccgacgtacaaaccttactaagcatcaaaaacttcatgctgaagcaaaggcctgcacaagcaataaatgtggaaaggccttcagtaaaagtgaagacagtaataatccaacactccattttggaaacaatttctatcaatgtgttaactgtggaaaatccttcaaccggagctcctctcttattcgacaccaaatgattcacacgggagagaaaccattcaaatgtaaggaatgtagtaaagccttcaacaggagttcaaaccttgttaaacatcaaaaactgcatactcgagataagtcctagtaatgaactagtccgtaacttgaaagtatttcgatttcttggctttatatatcttgtggaaaggacgatatgagtataggtggaactcatcg

SEQ ID NO: 1507 - DNA, 1922 bp, Homo sapiens
  source 1..1922: mol_type = genomic DNA
accgccaccatggcagtaacatttgaagatgtgactattatttttacatgggaggagtggaaattcctggattcttctcaaaaaagactctacagggaggtcatgtgggagaactacacaaatgtcatgtcagtagaaaactggaatgagagctacaaatcccaagaagaaaaattcagatacttagaatatgaaaatttttcctactggcaaggctggtggaatgctggcgcccagatgtatgagaatcagaactatggggaaactgttcaagggacagattccaaagacctcacacagcaagatcgttcccagtgtcaggaatggttaatactctccacacaagtaccagggtatgggaactatgaactgacttttgaaagcaaaagtctcaggaacttaaaatataaaaattttatgccttggcagtccttagaaacaaaaaccactcaagactatggtagagaaatctacatgagtggttcacatggttttcaagggggcagataccgtcttggcatatccaggaaaaacctctccatggaaaaagaacagaagctcatagttcagcattcttatatcccagtggaggaagcccttccacagtatgttggggtgatatgtcaagaagacctactgagagattcaatggaagaaaagtactgtggatgtaataaatgtaaaggaatttattattggaactcacggtgtgttttccacaagagaaatcaacctggagaaaacctctgtcaatgctccatctgtaaagcatgcttctctcagagatcagacttgtatagacatccaagaaaccacataggtaagaagctgtacggatgtgatgaagttgacggtaactttcatcagagctccggagttcactttcatcagagagttcacataggggaggtaccttatagctgtaatgcatgtggtaagagcttcagccagatctctagtcttcacaatcatcaaagagtccacacagaagagaaattctataaaattgagtgtgataaagacctcagtagaaattcattacttcacattcaccagagacttcacataggagagaagccttttaaatgtaatcagtgtggtaagagttttaatcggagttcagtacttcatgttcatcagagagtccacacaggagaaaaaccatataagtgtgatgagtgtggtaagggtttcagccagagctcaaatcttcgaattcatcagttagtacacacaggagagaagtcttataaatgtgaagactgtggtaaaggctttacccagcgctcaaatcttcaaattcatcagagagtgcatacaggagagaaaccttataaatgtgatgactgtggaaaggactttagtcacagctcagatcttcgcattcatcagagagtccatacaggggagaaaccctatacttgtcctgaatgtgggaagggcttcagtaagagttcaaagcttcacactcatcaaagagtacatactggagagaaaccctacaaatgtgaagagtgtggcaagggattcagtcagcgttcacatcttctcattcatcagagagtccatacaggagaaaagccctataaatgtcatgattgtggaaagggttttagtcacagttctaatcttcacattcatcagagggtccatacaggagagaagccttatcaatgtgctaagtgtggtaaaggtttcagtcatagctcagctcttcgaattcatcaaagagtccatgcaggagagaaaccttacaaatgccgtgaatattataagggatttgatcataattcacatcttcacaataatcatagaagaggaaacttatagtaatgaactagtccgtaacttgaaagtatttcgatttcttggctttatatatcttgtggaaaggacgacggctcgatgctcgccacaggagg

SEQ ID NO: 1508 - DNA, 3248 bp, Homo sapiens
  source 1..3248: mol_type = genomic DNA
accgccaccatgcaatcgaaagtgacaggaaacatgccaactcaatccctcttaatgtacatggatgggccagaagtgattggcagctctcttggcagtccgatggagatggaggatgccttgtcaatgaaagggaccgctgttgttccattccgagctacacaagaaaaaaatgtcatccaaatcgaggggtatatgcccttggattgcatgttctgcagccagaccttcacacattcagaagaccttaataaacatgtcttaatgcaacaccggcctaccctctgtgaaccagcagttcttcgggttgaagcagagtatctcagtccgcttgataaaagtcaagtgcgaacagaacctcccaaggaaaagaattgcaaggaaaatgaatttagctgtgaggtatgtgggcagacatttagagtcgcttttgatgttgagatccacatgagaacacacaaagattctttcacttacgggtgtaacatgtgcggaagaagattcaaggagccttggtttcttaaaaatcacatgcggacacataatggcaaatcgggggccagaagcaaactgcagcaaggcttggagagtagtccagcaacgatcaacgaggtcgtccaggtgcacgcggccgagagcatctcctctccttacaaaatctgcatggtttgtggcttcctatttccaaataaagaaagtctaattgagcaccgcaaggtgcacaccaaaaaaactgctttcggtaccagcagcgcgcagacagactctccacaaggaggaatgccgtcctcgagggaggacttcctgcagttgttcaacttgagaccaaaatctcaccctgaaacggggaagaagcctgtcagatgcatccctcagctcgatccgttcaccaccttccaggcttggcagctggctaccaaaggaaaagttgccatttgccaagaagtgaaggaatcggggcaagaagggagcaccgacaacgacgattcgagttccgagaaggagcttggagaaacaaataagggcagttgtgcaggcctctcgcaagagaaagagaagtgcaaacactcccacggcgaagcgccctccgtggacgcggatcccaagttacccagtagcaaggagaagcccactcactgctccgagtgcggcaaagctttcagaacctaccaccagctggtcttgcactccagggtccacaagaaggaccggagggccggcgcggagtcgcccaccatgtctgtggacgggaggcagccggggacgtgttctcctgacctcgccgcccctctggatgaaaatggagccgtggatcgaggggaaggtggttctgaagacggatctgaggatgggcttcccgaaggaatccatctggataaaaatgatgatggaggaaaaataaaacatcttacatcttcaagagagtgtagttattgtggaaagtttttccgttcaaattattacctcaatattcatctcagaacgcatacaggtgaaaaaccatacaaatgtgaattttgtgaatatgctgcagcccagaagacatctctgaggtatcacttggagagacatcacaaggaaaaacaaaccgatgttgctgctgaagtcaagaacgatggtaaaaatcaggacactgaagatgcactattaaccgctgacagtgcgcaaaccaaaaatttgaaaagattttttgatggtgccaaagatgttacaggcagtccacctgcaaagcagcttaaggagatgccttctgtttttcagaatgttctgggcagcgctgtcctctcaccagcacacaaagatactcaggatttccataaaaatgcagctgatgacagtgctgataaagtgaataaaaaccctacccctgcttacctggacctgttaaaaaagagatcagcagttgaaactcaggcaaataacctcatctgtagaaccaaggcggatgttactcctcctccggatggcagtaccacccataaccttgaagttagccccaaagagaagcaaacggagaccgcagctgactgcagatacaggccaagtgtggattgtcacgaaaaacctttaaatttatccgtgggggctcttcacaattgcccggcaatttctttgagtaaaagtttgattccaagtatcacctgtccattttgtaccttcaagacattttatccagaagttttaatgatgcaccagagactggagcataaatacaatcctgacgttcataaaaactgtcgaaacaagtccttgcttagaagtcgacgtaccggatgcccgccagcgttgctgggaaaagatgtgcctcccctctctagtttctgtaaacccaagcccaagtctgctttcccggcgcagtccaaatccctgccatctgcgaaggggaagcagagccctcctgggccaggcaaggcccctctgacttcagggatagactctagcactttagccccaagtaacctgaagtcccacagaccacagcagaatgtgggggtccaaggggccgccaccaggcaacagcaatctgagatgtttcctaaaaccagtgtttcccctgcaccggataagacaaaaagacccgagacaaaattgaaacctcttccagtagctccttctcagcccaccctcggcagcagtaacatcaatggttccatcgactaccccgccaagaacgacagcccgtgggcacctccgggaagagactatttctgtaatcggagtgccagcaatactgcagcagaatttggtgagccccttccaaaaagactgaagtccagcgtggttgcccttgacgttgaccagcccggggccaattacagaagaggctatgaccttcccaagtaccatatggtcagaggcatcacatcactgttaccgcaggactgtgtgtatccgtcgcaggcgctgcctcccaaaccaaggttcctgagctccagcgaggtcgattctccaaatgtgctgactgttcagaagccctatggtggctccgggccactttacacttgtgtgcctgctggtagtccagcatccagctcgacgttagaaggaaaaaggcctgtgtcatatcaacacttatctaacagcatggcacaaaagagaaactatgagaattttattgggaatgcacattatcgaccaaatgacaaaaaaacttagtaatgaactagtccgtaacttgaaagtatttcgatttcttggctttatatatcttgtggaaaggacgaatgatttatcgataatacgagaac

SEQ ID NO: 1509 - DNA, 1535 bp, Homo sapiens
  source 1..1535: mol_type = genomic DNA
accgccaccatggagtggaggaataagaaaaggagcgattggctgtcgatggtgctcagaactgctggagtggaggaagcctttgggtctgaagtgtctgtgagacctcacagaagagcacccctgggctccacttacctgccccctgctccttcagggatggaggcaatggcggccagcacttccctgcctgaccctggagactttgaccggaacgtgccccggatctgtggggtgtgtggagaccgagccactggctttcacttcaatgctatgacctgtgaaggctgcaaaggcttcttcaggcgaagcatgaagcggaaggcactattcacctgccccttcaacggggactgccgcatcaccaaggacaaccgacgccactgccaggcctgccggctcaaacgctgtgtggacatcggcatgatgaaggagttcattctgacagatgaggaagtgcagaggaagcgggagatgatcctgaagcggaaggaggaggaggccttgaaggacagtctgcggcccaagctgtctgaggagcagcagcgcatcattgccatactgctggacgcccaccataagacctacgaccccacctactccgacttctgccagttccggcctccagttcgtgtgaatgatggtggagggagccatccttccaggcccaactccagacacactcccagcttctctggggactcctcctcctcctgctcagatcactgtatcacctcttcagacatgatggactcgtccagcttctccaatctggatctgagtgaagaagattcagatgacccttctgtgaccctagagctgtcccagctctccatgctgccccacctggctgacctggtcagttacagcatccaaaaggtcattggctttgctaagatgataccaggattcagagacctcacctctgaggaccagatcgtactgctgaagtcaagtgccattgaggtcatcatgttgcgctccaatgagtccttcaccatggacgacatgtcctggacctgtggcaaccaagactacaagtaccgcgtcagtgacgtgaccaaagccggacacagcctggagctgattgagcccctcatcaagttccaggtgggactgaagaagctgaacttgcatgaggaggagcatgtcctgctcatggccatctgcatcgtctccccagatcgtcctggggtgcaggacgccgcgctgattgaggccatccaggaccgcctgtccaacacactgcagacgtacatccgctgccgccacccgcccccgggcagccacctgctctatgccaagatgatccagaagctagccgacctgcgcagcctcaatgaggagcactccaagcagtaccgctgcctctccttccagcctgagtgcagcatgaagctaacgccccttgtgctcgaagtgtttggcaatgagatctcctagtaatgaactagtccgtaacttgaaagtatttcgatttcttggctttatatatcttgtggaaaggacgataatgctttgagtctgggtgtgac

SEQ ID NO: 1510 - DNA, 1835 bp, Homo sapiens
  source 1..1835: mol_type = genomic DNA
accgccaccatgctcgggttccccccgggtcgcccgcagctcccggtccagctccgcccacagactcggatggcgaccgcactgagggacccggcttcggttcccatagctacagaggtgcttttcaaacttacacagggaagtgtgacctttgaagatgtggccgtgtacttctcctgggaggaatgggatctccttgatgaggctcagaaacacctgtacttcgatgtgatgctggagaactttgcacttacgtcctccctgggttgttggtgtggagtggaacatgaggaaacaccttctgaacagagaatttctggagaaagagtgccacagttcaggacttccaaagaaggttcatcttcccagaatgccgactcctgtgaaatatgttgcctggtcttgagagatattttgcacttggctgaacaccaaggaacaaactgcgggcagaaactacacacatgtggaaaacaattctacatcagtgcaaatcttcaacagcaccagaggcagcacattacagaggcacctttcagaagttatgtggacactgcctcgtttacacagagttgcatagtccatgtgtcggagaaaccctttacctgcagggagatcaggaaagacttcctggccaacatgaggtttctccatcaagacgccactcaaacaggggagaagccaaataacagtaacaagtgtgcggtggccttttacagtggaaaaagtcatcacaactggggaaaatgcagtaaagcctttagccacatagacacacttgttcaggaccagagaatcctcactagagaaggactttttgagtgcagtaaatgtgggaaagcatgtacgcgaagatgtaacctcattcagcaccagaaagtccacagtgaagaaaggccttatgaatgcaatgaatgtggaaaattctttacctactactccagtttcattatacatcagagagttcatactggagaaaggccttatgcgtgccctgaatgtgggaaatcgtttagtcagatatacagcctcaatagccataggaaagttcacactggagaaaggccttatgaatgtggggaatgtgggaaatcttttagccaaaggtccaacctcatgcagcatcgcagagttcacactggagaaaggccttatgaatgcagcgaatgtgggaaatcttttagccaaaactttagcctgatctaccaccagagagttcacactggagaaagacctcatgagtgcaatgaatgtggaaaatcctttagccgaagctccagcctcattcaccaccggagacttcacactggagaaagaccctatgagtgcagtaaatgtgggaagtcatttaagcaaagctccagcttcagttcacatcggaaagtccacacaggggaaaggccttatgtgtgtggggaatgtgggaaatcctttagccatagctccaaccttaagaaccaccagagagttcacactggagaaagacctgttgagtgcagtgaatgtagcaaatcctttagctgtaaatctaacctcattaaacacctgagagttcacactggagaaaggccttatgagtgcagtgaatgtgggaaatcctttagccaaagttctagcctcattcaacaccgcagagttcacacgggaaaaaggccttatcagtgcagtcaatgtgggaaatcctttggctgcaaatctgtcctcattcaacaccagagagttcacattggagaaaagccttagtaatgaactagtccgtaacttgaaagtatttcgatttcttggctttatatatcttgtggaaaggacgaggtcgccctcggaagtcaagctta

SEQ ID NO: 1511 - DNA, 1769 bp, Homo sapiens
  source 1..1769: mol_type = genomic DNA
accgccaccatgctggagaactttgcacttacgtcctccctgggacttatatcatcctggtctcatgtagttgctcaactagggctaggggaagtgccctctgttcttcacaggatgttcatgactccagcctcagcaagatgggatcagagagggcctggcctacatgaatggcacttgggaaaaggcatgtcatcaggttgttggtgtggagtggaacatgaggaaacaccttctgaacagagaatttctggagaaagagtgccacagttcaggacttccaaagaaggttcatcttcccagaatgccgactcctgtgaaatatgttgcctggtcttgagagatattttgcacttggctgaacaccaaggaacaaactgcgggcagaaactacacacatgtggaaaacaattctacatcagtgcaaatcttcaacagcaccagaggcagcacattacagaggcacctttcagaagttatgtggacactgcctcgtttacacagagttgcatagtccatgtgtcggagaaaccctttacctgcagggagatcaggaaagacttcctggccaacatgaggtttctccatcaagacgccactcaaacaggggagaagccaaataacagtaacaagtgtgcggtggccttttacagtggaaaaagtcatcacaactggggaaaatgcagtaaagcctttagccacatagacacacttgttcaggaccagagaatcctcactagagaaggactttttgagtgcagtaaatgtgggaaagcatgtacgcgaagatgtaacctcattcagcaccagaaagtccacagtgaagaaaggccttatgaatgcaatgaatgtggaaaattctttacctactactccagtttcattatacatcagagagttcatactggagaaaggccttatgcgtgccctgaatgtgggaaatcgtttagtcagatatacagcctcaatagccataggaaagttcacactggagaaaggccttatgaatgtggggaatgtgggaaatcttttagccaaaggtccaacctcatgcagcatcgcagagttcacactggagaaaggccttatgaatgcagcgaatgtgggaaatcttttagccaaaactttagcctgatctaccaccagagagttcacactggagaaagacctcatgagtgcaatgaatgtggaaaatcctttagccgaagctccagcctcattcaccaccggagacttcacactggagaaagaccctatgagtgcagtaaatgtgggaagtcatttaagcaaagctccagcttcagttcacatcggaaagtccacacaggggaaaggccttatgtgtgtggggaatgtgggaaatcctttagccatagctccaaccttaagaaccaccagagagttcacactggagaaagacctgttgagtgcagtgaatgtagcaaatcctttagctgtaaatctaacctcattaaacacctgagagttcacactggagaaaggccttatgagtgcagtgaatgtgggaaatcctttagccaaagttctagcctcattcaacaccgcagagttcacacgggaaaaaggccttatcagtgcagtcaatgtgggaaatcctttggctgcaaatctgtcctcattcaacaccagagagttcacattggagaaaagccttagtaatgaactagtccgtaacttgaaagtatttcgatttcttggctttatatatcttgtggaaaggacgatgctcactcataagtgttatcaac

SEQ ID NO: 1512 - DNA, 1613 bp, Homo sapiens
  source 1..1613: mol_type = genomic DNA
accgccaccatgctggagaactttgcacttacgtcctccctgggttgttggtgtggagtggaacatgaggaaacaccttctgaacagagaatttctggagaaagagtgccacagttcaggacttccaaagaaggttcatcttcccagaatgccgactcctgtgaaatatgttgcctggtcttgagagatattttgcacttggctgaacaccaaggaacaaactgcgggcagaaactacacacatgtggaaaacaattctacatcagtgcaaatcttcaacagcaccagaggcagcacattacagaggcacctttcagaagttatgtggacactgcctcgtttacacagagttgcatagtccatgtgtcggagaaaccctttacctgcagggagatcaggaaagacttcctggccaacatgaggtttctccatcaagacgccactcaaacaggggagaagccaaataacagtaacaagtgtgcggtggccttttacagtggaaaaagtcatcacaactggggaaaatgcagtaaagcctttagccacatagacacacttgttcaggaccagagaatcctcactagagaaggactttttgagtgcagtaaatgtgggaaagcatgtacgcgaagatgtaacctcattcagcaccagaaagtccacagtgaagaaaggccttatgaatgcaatgaatgtggaaaattctttacctactactccagtttcattatacatcagagagttcatactggagaaaggccttatgcgtgccctgaatgtgggaaatcgtttagtcagatatacagcctcaatagccataggaaagttcacactggagaaaggccttatgaatgtggggaatgtgggaaatcttttagccaaaggtccaacctcatgcagcatcgcagagttcacactggagaaaggccttatgaatgcagcgaatgtgggaaatcttttagccaaaactttagcctgatctaccaccagagagttcacactggagaaagacctcatgagtgcaatgaatgtggaaaatcctttagccgaagctccagcctcattcaccaccggagacttcacactggagaaagaccctatgagtgcagtaaatgtgggaagtcatttaagcaaagctccagcttcagttcacatcggaaagtccacacaggggaaaggccttatgtgtgtggggaatgtgggaaatcctttagccatagctccaaccttaagaaccaccagagagttcacactggagaaagacctgttgagtgcagtgaatgtagcaaatcctttagctgtaaatctaacctcattaaacacctgagagttcacactggagaaaggccttatgagtgcagtgaatgtgggaaatcctttagccaaagttctagcctcattcaacaccgcagagttcacacgggaaaaaggccttatcagtgcagtcaatgtgggaaatcctttggctgcaaatctgtcctcattcaacaccagagagttcacattggagaaaagccttagtaatgaactagtccgtaacttgaaagtatttcgatttcttggctttatatatcttgtggaaaggacgacgccaatgcttctttggctagtac

SEQ ID NO: 1513 - DNA, 1991 bp, Homo sapiens
  source 1..1991: mol_type = genomic DNA
accgccaccatgctcgggttccccccgggtcgcccgcagctcccggtccagctccgcccacagactcggatggcgaccgcactgagggacccggcttcggttcccatagctacagaggtgcttttcaaacttacacagggaagtgtgacctttgaagatgtggccgtgtacttctcctgggaggaatgggatctccttgatgaggctcagaaacacctgtacttcgatgtgatgctggagaactttgcacttacgtcctccctgggacttatatcatcctggtctcatgtagttgctcaactagggctaggggaagtgccctctgttcttcacaggatgttcatgactccagcctcagcaagatgggatcagagagggcctggcctacatgaatggcacttgggaaaaggcatgtcatcaggttgttggtgtggagtggaacatgaggaaacaccttctgaacagagaatttctggagaaagagtgccacagttcaggacttccaaagaaggttcatcttcccagaatgccgactcctgtgaaatatgttgcctggtcttgagagatattttgcacttggctgaacaccaaggaacaaactgcgggcagaaactacacacatgtggaaaacaattctacatcagtgcaaatcttcaacagcaccagaggcagcacattacagaggcacctttcagaagttatgtggacactgcctcgtttacacagagttgcatagtccatgtgtcggagaaaccctttacctgcagggagatcaggaaagacttcctggccaacatgaggtttctccatcaagacgccactcaaacaggggagaagccaaataacagtaacaagtgtgcggtggccttttacagtggaaaaagtcatcacaactggggaaaatgcagtaaagcctttagccacatagacacacttgttcaggaccagagaatcctcactagagaaggactttttgagtgcagtaaatgtgggaaagcatgtacgcgaagatgtaacctcattcagcaccagaaagtccacagtgaagaaaggccttatgaatgcaatgaatgtggaaaattctttacctactactccagtttcattatacatcagagagttcatactggagaaaggccttatgcgtgccctgaatgtgggaaatcgtttagtcagatatacagcctcaatagccataggaaagttcacactggagaaaggccttatgaatgtggggaatgtgggaaatcttttagccaaaggtccaacctcatgcagcatcgcagagttcacactggagaaaggccttatgaatgcagcgaatgtgggaaatcttttagccaaaactttagcctgatctaccaccagagagttcacactggagaaagacctcatgagtgcaatgaatgtggaaaatcctttagccgaagctccagcctcattcaccaccggagacttcacactggagaaagaccctatgagtgcagtaaatgtgggaagtcatttaagcaaagctccagcttcagttcacatcggaaagtccacacaggggaaaggccttatgtgtgtggggaatgtgggaaatcctttagccatagctccaaccttaagaaccaccagagagttcacactggagaaagacctgttgagtgcagtgaatgtagcaaatcctttagctgtaaatctaacctcattaaacacctgagagttcacactggagaaaggccttatgagtgcagtgaatgtgggaaatcctttagccaaagttctagcctcattcaacaccgcagagttcacacgggaaaaaggccttatcagtgcagtcaatgtgggaaatcctttggctgcaaatctgtcctcattcaacaccagagagttcacattggagaaaagccttagtaatgaactagtccgtaacttgaaagtatttcgatttcttggctttatatatcttgtggaaaggacgatcattcacctctcggtcaacatag

SEQ ID NO: 1514 - DNA, 1952 bp, Homo sapiens
  source 1..1952: mol_type = genomic DNA
accgccaccatgctcgggttccccccgggtcgcccgcagctcccggtccagctccgcccacagactcggatggcgaccgcactgagggacccggcttcgggaagtgtgacctttgaagatgtggccgtgtacttctcctgggaggaatgggatctccttgatgaggctcagaaacacctgtacttcgatgtgatgctggagaactttgcacttacgtcctccctgggacttatatcatcctggtctcatgtagttgctcaactagggctaggggaagtgccctctgttcttcacaggatgttcatgactccagcctcagcaagatgggatcagagagggcctggcctacatgaatggcacttgggaaaaggcatgtcatcaggttgttggtgtggagtggaacatgaggaaacaccttctgaacagagaatttctggagaaagagtgccacagttcaggacttccaaagaaggttcatcttcccagaatgccgactcctgtgaaatatgttgcctggtcttgagagatattttgcacttggctgaacaccaaggaacaaactgcgggcagaaactacacacatgtggaaaacaattctacatcagtgcaaatcttcaacagcaccagaggcagcacattacagaggcacctttcagaagttatgtggacactgcctcgtttacacagagttgcatagtccatgtgtcggagaaaccctttacctgcagggagatcaggaaagacttcctggccaacatgaggtttctccatcaagacgccactcaaacaggggagaagccaaataacagtaacaagtgtgcggtggccttttacagtggaaaaagtcatcacaactggggaaaatgcagtaaagcctttagccacatagacacacttgttcaggaccagagaatcctcactagagaaggactttttgagtgcagtaaatgtgggaaagcatgtacgcgaagatgtaacctcattcagcaccagaaagtccacagtgaagaaaggccttatgaatgcaatgaatgtggaaaattctttacctactactccagtttcattatacatcagagagttcatactggagaaaggccttatgcgtgccctgaatgtgggaaatcgtttagtcagatatacagcctcaatagccataggaaagttcacactggagaaaggccttatgaatgtggggaatgtgggaaatcttttagccaaaggtccaacctcatgcagcatcgcagagttcacactggagaaaggccttatgaatgcagcgaatgtgggaaatcttttagccaaaactttagcctgatctaccaccagagagttcacactggagaaagacctcatgagtgcaatgaatgtggaaaatcctttagccgaagctccagcctcattcaccaccggagacttcacactggagaaagaccctatgagtgcagtaaatgtgggaagtcatttaagcaaagctccagcttcagttcacatcggaaagtccacacaggggaaaggccttatgtgtgtggggaatgtgggaaatcctttagccatagctccaaccttaagaaccaccagagagttcacactggagaaagacctgttgagtgcagtgaatgtagcaaatcctttagctgtaaatctaacctcattaaacacctgagagttcacactggagaaaggccttatgagtgcagtgaatgtgggaaatcctttagccaaagttctagcctcattcaacaccgcagagttcacacgggaaaaaggccttatcagtgcagtcaatgtgggaaatcctttggctgcaaatctgtcctcattcaacaccagagagttcacattggagaaaagccttagtaatgaactagtccgtaacttgaaagtatttcgatttcttggctttatatatcttgtggaaaggacgacatggtggtggcccgcctgtatca

SEQ ID NO: 1515 - DNA, 1796 bp, Homo sapiens
  source 1..1796: mol_type = genomic DNA
accgccaccatgctcgggttccccccgggtcgcccgcagctcccggtccagctccgcccacagactcggatggcgaccgcactgagggacccggcttcgggaagtgtgacctttgaagatgtggccgtgtacttctcctgggaggaatgggatctccttgatgaggctcagaaacacctgtacttcgatgtgatgctggagaactttgcacttacgtcctccctgggttgttggtgtggagtggaacatgaggaaacaccttctgaacagagaatttctggagaaagagtgccacagttcaggacttccaaagaaggttcatcttcccagaatgccgactcctgtgaaatatgttgcctggtcttgagagatattttgcacttggctgaacaccaaggaacaaactgcgggcagaaactacacacatgtggaaaacaattctacatcagtgcaaatcttcaacagcaccagaggcagcacattacagaggcacctttcagaagttatgtggacactgcctcgtttacacagagttgcatagtccatgtgtcggagaaaccctttacctgcagggagatcaggaaagacttcctggccaacatgaggtttctccatcaagacgccactcaaacaggggagaagccaaataacagtaacaagtgtgcggtggccttttacagtggaaaaagtcatcacaactggggaaaatgcagtaaagcctttagccacatagacacacttgttcaggaccagagaatcctcactagagaaggactttttgagtgcagtaaatgtgggaaagcatgtacgcgaagatgtaacctcattcagcaccagaaagtccacagtgaagaaaggccttatgaatgcaatgaatgtggaaaattctttacctactactccagtttcattatacatcagagagttcatactggagaaaggccttatgcgtgccctgaatgtgggaaatcgtttagtcagatatacagcctcaatagccataggaaagttcacactggagaaaggccttatgaatgtggggaatgtgggaaatcttttagccaaaggtccaacctcatgcagcatcgcagagttcacactggagaaaggccttatgaatgcagcgaatgtgggaaatcttttagccaaaactttagcctgatctaccaccagagagttcacactggagaaagacctcatgagtgcaatgaatgtggaaaatcctttagccgaagctccagcctcattcaccaccggagacttcacactggagaaagaccctatgagtgcagtaaatgtgggaagtcatttaagcaaagctccagcttcagttcacatcggaaagtccacacaggggaaaggccttatgtgtgtggggaatgtgggaaatcctttagccatagctccaaccttaagaaccaccagagagttcacactggagaaagacctgttgagtgcagtgaatgtagcaaatcctttagctgtaaatctaacctcattaaacacctgagagttcacactggagaaaggccttatgagtgcagtgaatgtgggaaatcctttagccaaagttctagcctcattcaacaccgcagagttcacacgggaaaaaggccttatcagtgcagtcaatgtgggaaatcctttggctgcaaatctgtcctcattcaacaccagagagttcacattggagaaaagccttagtaatgaactagtccgtaacttgaaagtatttcgatttcttggctttatatatcttgtggaaaggacgagtgtcctaaccatttgcgttgaca

SEQ ID NO: 1516 - DNA, 2084 bp, Homo sapiens
  source 1..2084: mol_type = genomic DNA
accgccaccatggcggcggccgcggcggcgctctcgggcgcgggcacgccacccgcgggcggcggggccgggggcggcggggccgggggcggcgggtccccgccgggcggctgggccgtggcgcgcctggagggccgcgagttcgagtatctgatgaagaagcgctcggtgaccatcggccgcaactcgtcgcagggctcggtggacgtgagcatgggccactcgagcttcatctcccggcgccacctcgagatcttcacgcccccgggcggcggcggccatggcggggccgctccggagctgccgcccgcgcagcccaggcccgacgccggcggcgacttctacctgcgctgcttgggcaagaacggggtattcgtggacggcgtgttccagaggcgcggggcgccgccgctgcagctgccgcgcgtgtgcacattcaggttcccgagcacaaacatcaagataacgttcactgccctgtccagcgagaagagagagaagcaggaggcgtctgagtctccagtgaaggccgtacagccacacatctcgcccctgaccatcaacattccagacaccatggcccacctcatcagccctctgccctcccccacgggaaccatcagcgctgcaaactcctgcccctccagcccccggggagcggggtcttcagggtacaaggtgggccgagtgatgccatctgacctcaatttaatggctgacaactcacagcctgaaaatgaaaaggaagcttcaggtggagacagcccgaaggatgattcaaagccgccttactcctacgcgcagctgatagttcaggcgattacgatggctcccgacaaacagctcaccctgaacgggatttatacacacatcactaaaaattatccctactacaggactgcggacaagggctggcagaattcaattcgccacaatctctctctgaatcgttatttcatcaaagtgccgcgttcccaggaagaaccaggcaaaggctcgttctggaggatagacccagcctctgaaagcaaattaatagaacaggcttttaggaaacgacggcctaggggcgtgccctgctttagaacccctctgggaccgctctcttctaggagtgccccagcctctcccaatcacgcgggagtgctgtctgctcactctagtggcgcccagacccctgagagcctgtcgagggaaggttcgccggcccccctggagcctgagcctggcgctgcacagcccaaactcgctgtcatccaggaagcccggtttgcccagagcgccccagggtcacctctgtccagtcagccagtcttaatcaccgtccagcggcagctaccacaggccatcaagcctgtcacctacactgtggccaccccagtgaccacctcgacctcccagccacccgtcgtgcagacggttcacgtcgtccaccagatcccagcggtgtcggtcaccagtgtggccggactggccccagcgaacacgtacactgtctctggacaagctgtggtcaccccggcagccgtgctggcccctcctaaggcagaggcccaggagaatggagaccacagggaagtcaaagtgaaagtagagcctattcccgccattggccacgccacgctcggcactgccagccggatcattcagacggcacagaccaccccggtccagacggtgaccatagtacaacaggcacctctaggtcaacaccagctaccaataaaaactgtaacacaaaacggcactcacgtggcatcagtccccactgcggtccacggccaggtgaacaatgccgcggcgagtcctttgcacatgttggcaacacacgcatccgcatcggcctccctgcccacaaagcgccacaacggtgaccagccggagcagccggagctgaagcggatcaagacagaagacggcgagggcatcgtcattgccctgagcgtggacacgccaccggcagccgtaagggaaaagggtgtccagaactagtaatgaactagtccgtaacttgaaagtatttcgatttcttggctttatatatcttgtggaaaggacgagtcaacagattcgctacccgacga

SEQ ID NO: 1517 - DNA, 2303 bp, Homo sapiens
  source 1..2303: mol_type = genomic DNA
accgccaccatggccgaagtcggcgaggacagcggcgcccgcgccctgctcgcgctgcgctcggcgccctgcagcccagtgctgtgcgccgcagccgccgccgccgccttccccgcggccgcacccccgccggcccccgcgcagccccagcctccgcccgggccgccgccgccgccgccaccgccgctgcctccgggcgcgatcgcgggcgcgggctcctccgggggctcctccggggtatccggggactccgcggtcgcgggcgcggcgccggccctggtggccgcggcggccgcctcggtacggcagagcccggggccggcgctggcgcggctggagggccgcgagttcgagttcctcatgcgccagcccagcgtcaccatcggccgcaactcgtcgcagggctcggtggacttgagcatgggcctgtccagcttcatctcgcggcgccacctgcagctcagcttccaggagccgcacttctacctgcgctgcctcggcaagaacggcgtcttcgtggacggggccttccagagacgcggcgcgcccgccctgcagctgcccaagcagtgtaccttccggtttcccagcacggccatcaagatccagttcacgtcgctctatcacaaagaagaggccccagcctccccgctgcggccactgtacccccagatctcccctctgaagatccacatcccggagccggacctccggagcatggtcagccccgtcccctccccgacgggcaccatcagtgtccccaactcctgcccagccagtccacgcggtgccggctcctccagttaccgctttgtgcagaacgtgacctcggacctgcagctggcagcagagtttgcagcaaaggccgcgtcggagcagcaggcagacacgtctggaggagacagccccaaggatgagtcaaagccgccgttctcctacgcgcagctgatcgtgcaggccatctcctccgcccaggaccggcagctgaccctgagcgggatctacgcccacatcaccaagcattacccctactaccggacggccgacaaaggctggcagaattctatccggcacaacctctctttgaaccgttactttatcaaagtcccacgttcccaggaggagcctgggaaggggtccttttggcgaatagaccctgcctctgaagccaagctcgtggaacaggcattccggaaacggaggcagaggggtgtctcctgcttccgcacccccttcgggcctctgtcctcaaggagcgctccagcttcgcccacacaccccgggctgatgtcccctcgctccggcggcctgcagaccccagagtgcctgtctcgggagggctcccccattccacacgaccctgagtttgggtccaagttagcttctgtcccagagtaccggtattcccaaagcgcacccggctcccccgtcagcgcccagccagtgatcatggccgtgcctccccgaccgtccagcctcgtggccaagcccgtggcctacatgcccgcctccatcgtaacctcacagcagcccgcgggccacgccatccacgtcgtgcagcaggcccccaccgtcaccatggtcagggtggtcaccacatctgccaactcggccaacggatacatcctcaccagccagggcgcggcggggggctcccatgatgcggcgggcgcagccgtgctggacctgggcagcgaggccagaggcctggaggagaaacccaccattgcgtttgccacaatccccgcggctggtggagtcatccagacggtggccagccagatggcccccggggtccccggacacacggtcaccatcctgcagcccgccacacccgtgaccctcgggcagcaccaccttccagtccgggccgtgacccagaacggaaagcatgcggttcccacgaacagtttagccggcaacgcttacgccctcaccagccctttgcagctccttgcgacccaagcgagttcatccgcgccggtggtggtcacccgggtgtgcgaggtggggcccaaggagccagcagcagccgtcgcggccacggccaccaccaccccagccactgccaccaccgcctctgcctccgcctcttccactggagagcccgaggtcaaaaggtcccgggtggaggagcccagtggtgctgtaaccacaccggctggagtgatcgcagctgccggcccccaggggccaggcaccggggagtagtaatgaactagtccgtaacttgaaagtatttcgatttcttggctttatatatcttgtggaaaggacgactgatgactcctgttggtctacgc

SEQ ID NO: 1518 - DNA, 2705 bp, Homo sapiens
  source 1..2705: mol_type = genomic DNA
accgccaccatggagaccaaaggctaccacagtctccctgaaggtctagatatggaaagacggtggggtcaagtttctcaggctgtggagcgttcttccctgggacctacagagaggaccgatgagaataactacatggagattgtcaacgtaagctgtgtttccggtgctattccaaacaacagtactcaaggaagcagcaaagaaaaacaagaactactcccttgccttcagcaagacaataatcggcctgggattttaacatctgatattaaaactgagctggaatctaaggaactttcagcaactgtagctgagtccatgggtttatatatggattctgtaagagatgctgactattcctatgagcagcagaaccaacaaggaagcatgagtccagctaagatttatcagaatgttgaacagctggtgaaattttacaaaggaaatggccatcgtccttccactctaagttgtgtgaacacgcccttgagatcatttatgtctgactctgggagctccgtgaatggtggcgtcatgcgcgccgttgttaaaagccctatcatgtgtcatgagaaaagcccgtctgtttgcagccctctgaacatgacatcttcggtttgcagccctgctggaatcaactctgtgtcctccaccacagccagctttggcagttttccagtgcacagcccaatcacccagggaactcctctgacatgctcccctaatgttgaaaatcgaggctccaggtcgcacagccctgcacatgctagcaatgtgggctctcctctctcaagtccgttaagtagcatgaaatcctcaatttccagccctccaagtcactgcagtgtaaaatctccagtctccagtcccaataatgtcactctgagatcctctgtgtctagccctgcaaatattaacaactcaaggtgctctgtttccagcccttcgaacactaataacagatccacgctttccagtccggcagccagtactgtgggatctatctgtagccctgtaaacaatgccttcagctacactgcttctggcacctctgctggatccagtacattgcgggatgtggttcccagtccagacacgcaggagaaaggtgctcaagaggtcccttttcctaagactgaggaagtagagagtgccatctcaaatggtgtgactggccagcttaatattgtccagtacataaaaccagaaccagatggagcttttagcagctcatgtctaggaggaaatagcaaaataaattcggattcttcattctcagtaccaataaagcaagaatcaaccaagcattcatgttcaggcacctcttttaaagggaatccaacagtaaacccgtttccatttatggatggctcgtatttttcctttatggatgataaagactattattccctatcaggaattttaggaccacctgtgcccggctttgatggtaactgtgaaggcagcggattcccagtgggtattaaacaagaaccagatgatgggagctattacccagaggccagcatcccttcctctgctattgttggggtgaattcaggtggacagtccttccactacaggattggtgctcaaggtacaatatctttatcacgatcggctagagaccaatctttccaacacctgagttcctttcctcctgtcaatactttagtggagtcatggaaatcacacggcgacctgtcgtctagaagaagtgatgggtatccggtcttagaatacattccagaaaatgtatcaagctctactttacgaagtgtttctactggatcttcaagaccttcaaaaatatgtttggtgtgtggggatgaggcttcaggatgccattatggggtagtcacctgtggcagctgcaaagttttcttcaaaagagcagtggaagggcaacacaactatttatgtgctggaagaaatgattgcatcattgataagattcgacgaaagaattgtcctgcttgcagacttcagaaatgtcttcaagctggaatgaatttaggaggatttaaaaacttgcctcttgaggaccaaattaccctaatccagtattcttggatgtgtctatcatcatttgccttgagctggagatcgtacaaacatacgaacagccaatttctctattttgcaccagacctagtctttaatgaagagaagatgcatcagtctgccatgtatgaactatgccaggggatgcaccaaatcagccttcagttcgttcgactgcagctcacctttgaagaatacaccatcatgaaagttttgctgctactaagcacaattccaaaggatggcctcaaaagccaggctgcatttgaagaaatgaggacaaattacatcaaagaactgaggaagatggtaactaagtgtcccaacaattctgggcagagctggcagaggttctaccaactgaccaagctgctggactccatgcatgacctggtgagcgacctgctggaattctgcttctacaccttccgagagtcccatgcgctgaaggtagagttccccgcaatgctggtggagatcatcagcgaccagctgcccaaggtggagtcggggaacgccaagccgctctacttccaccggaagtagtaatgaactagtccgtaacttgaaagtatttcgatttcttggctttatatatcttgtggaaaggacgaagagggagtatgttatcctcgcgt

SEQ ID NO: 1519 - DNA, 3068 bp, Homo sapiens
  source 1..3068: mol_type = genomic DNA
accgccaccatggagaccaaaggctaccacagtctccctgaaggtctagatatggaaagacggtggggtcaagtttctcaggctgtggagcgttcttccctgggacctacagagaggaccgatgagaataactacatggagattgtcaacgtaagctgtgtttccggtgctattccaaacaacagtactcaaggaagcagcaaagaaaaacaagaactactcccttgccttcagcaagacaataatcggcctgggattttaacatctgatattaaaactgagctggaatctaaggaactttcagcaactgtagctgagtccatgggtttatatatggattctgtaagagatgctgactattcctatgagcagcagaaccaacaaggaagcatgagtccagctaagatttatcagaatgttgaacagctggtgaaattttacaaaggaaatggccatcgtccttccactctaagttgtgtgaacacgcccttgagatcatttatgtctgactctgggagctccgtgaatggtggcgtcatgcgcgccgttgttaaaagccctatcatgtgtcatgagaaaagcccgtctgtttgcagccctctgaacatgacatcttcggtttgcagccctgctggaatcaactctgtgtcctccaccacagccagctttggcagttttccagtgcacagcccaatcacccagggaactcctctgacatgctcccctaatgttgaaaatcgaggctccaggtcgcacagccctgcacatgctagcaatgtgggctctcctctctcaagtccgttaagtagcatgaaatcctcaatttccagccctccaagtcactgcagtgtaaaatctccagtctccagtcccaataatgtcactctgagatcctctgtgtctagccctgcaaatattaacaactcaaggtgctctgtttccagcccttcgaacactaataacagatccacgctttccagtccggcagccagtactgtgggatctatctgtagccctgtaaacaatgccttcagctacactgcttctggcacctctgctggatccagtacattgcgggatgtggttcccagtccagacacgcaggagaaaggtgctcaagaggtcccttttcctaagactgaggaagtagagagtgccatctcaaatggtgtgactggccagcttaatattgtccagtacataaaaccagaaccagatggagcttttagcagctcatgtctaggaggaaatagcaaaataaattcggattcttcattctcagtaccaataaagcaagaatcaaccaagcattcatgttcaggcacctcttttaaagggaatccaacagtaaacccgtttccatttatggatggctcgtatttttcctttatggatgataaagactattattccctatcaggaattttaggaccacctgtgcccggctttgatggtaactgtgaaggcagcggattcccagtgggtattaaacaagaaccagatgatgggagctattacccagaggccagcatcccttcctctgctattgttggggtgaattcaggtggacagtccttccactacaggattggtgctcaaggtacaatatctttatcacgatcggctagagaccaatctttccaacacctgagttcctttcctcctgtcaatactttagtggagtcatggaaatcacacggcgacctgtcgtctagaagaagtgatgggtatccggtcttagaatacattccagaaaatgtatcaagctctactttacgaagtgtttctactggatcttcaagaccttcaaaaatatgtttggtgtgtggggatgaggcttcaggatgccattatggggtagtcacctgtggcagctgcaaagttttcttcaaaagagcagtggaaggtaaatgttcatggcaacacaactatttatgtgctggaagaaatgattgcatcattgataagattcgacgaaagaattgtcctgcttgcagacttcagaaatgtcttcaagctggaatgaatttaggagcacgaaagtcaaagaagttgggaaagttaaaagggattcacgaggagcagccacagcagcagcagcccccacccccacccccacccccgcaaagcccagaggaagggacaacgtacatcgctcctgcaaaagaaccctcggtcaacacagcactggttcctcagctctccacaatctcacgagcgctcacaccttcccccgttatggtccttgaaaacattgaacctgaaattgtatatgcaggctatgacagctcaaaaccagatacagccgaaaatctgctctccacgctcaaccgcttagcaggcaaacagatgatccaagtcgtgaagtgggcaaaggtacttccaggatttaaaaacttgcctcttgaggaccaaattaccctaatccagtattcttggatgtgtctatcatcatttgccttgagctggagatcgtacaaacatacgaacagccaatttctctattttgcaccagacctagtctttaatgaagagaagatgcatcagtctgccatgtatgaactatgccaggggatgcaccaaatcagccttcagttcgttcgactgcagctcacctttgaagaatacaccatcatgaaagttttgctgctactaagcacaattccaaaggatggcctcaaaagccaggctgcatttgaagaaatgaggacaaattacatcaaagaactgaggaagatggtaactaagtgtcccaacaattctgggcagagctggcagaggttctaccaactgaccaagctgctggactccatgcatgacctggtgagcgacctgctggaattctgcttctacaccttccgagagtcccatgcgctgaaggtagagttccccgcaatgctggtggagatcatcagcgaccagctgcccaaggtggagtcggggaacgccaagccgctctacttccaccggaagtagtaatgaactagtccgtaacttgaaagtatttcgatttcttggctttatatatcttgtggaaaggacgaaatctcagtcttagtcggcggaga

SEQ ID NO: 1520 - DNA, 914 bp, Homo sapiens
  source 1..914: mol_type = genomic DNA
accgccaccatggacctgcagaatgacctaggccagacagccctgcacctggcagccatcctgggggagacatccacggtggagaagctgtacgcagcaggcgccgggctgtgtgtggcggagcgtaggggccacacggcgctgcacctggcctgccgtgtgggggcacacgcctgtgcccgtgccctgcttcagccccgcccccggcgccccagggaagcccccgacacctacctcgctcagggccctgaccgtactcccgacaccaaccatacccctgtcgccttgtaccccgattccgacttggagaaggaagaagaggagagtgaggaggactggaagctgcagctggaggctgaaaactacgagggccacaccccactccacgtggccgttatccacaaagatgtggagatggtccggctgctccgagatgctggagctgaccttgacaaaccggagcccacgtgcggccggagcccccttcatttggcagtggaggcccaggcagccgatgtgctggagcttctcctgagggcaggcgcgaaccctgctgcccgcatgtacggtggccgcaccccactcggcagtgccatgctccggcccaaccccatcctcgcccgcctcctccgtgcacacggagcccctgagcccgagggcgaggacgagaaatccggcccctgcagcagcagtagcgacagcgacagcggagacgagggcgatgaatacgacgacattgtggttcacagcagccgcagccaaacccggctgcctcccaccccagcctcaaaacctcttcctgacgacccccgccccgtgtagtaatgaactagtccgtaacttgaaagtatttcgatttcttggctttatatatcttgtggaaaggacgatgttaccactgtcgagggtaacgc

SEQ ID NO: 1521 - DNA, 2270 bp, Homo sapiens
  source 1..2270: mol_type = genomic DNA
accgccaccatggagggctcacgtccccgcgccccgagcggccacttagcgccgtcgccgccggctttcgacggcgagctggatctgcagcgatactccaacgggccagccgtgagcgcagggtcgctcgggatgggagcggtgagctggtctgagagtcgtgcaggcgaacggcgcttcccctgccctgtatgcgggaagcgcttccgcttcaactctatccttgctttgcacctgcgggcgcacccaggagcccaggccttccagtgccctcactgcggccaccgcgcggcgcagcgggctctgctgcgctcgcacctgcgcacacaccagcccgagcgcccacgtagtcctgctgcacgcctgttgctggagttggaagagcgcgcgctactacgcgaggcccgactggggagagcccgaagctcagggggcatgcaggccacccctgccactgagggtctggcgcggccccaggctccttcatcgtccgccttccgttgcccctactgcaaaggcaagtttcgcacctcggcggagcgcgaacgccacctgcacatcctgcataggccctggaagtgcggcctgtgcagtttcggctccagccaggaggaggagctgctgcaccacagcctgacggcccacggggctcccgagcgtcccctggcggccacctccgctgcgcctccgcctcagcctcagcctcagcctccaccccagcccgaacccagatcagtcccccagccggagccggagccggagcccgaacgtgaggcaaccccgaccccagctcctgccgctcccgaggagcccccagcgcctccggagttccgctgccaagtgtgcggccagagctttacacagtcttggtttctcaagggccacatgcgtaagcacaaggcctccttcgatcatgcgtgtccggtgtgcggccgctgcttcaaggagccctggttccttaagaaccacatgaaggtgcacgccagcaagctgggcccactgcgtgccccggggcctgcctccgggcctgcccgcgccccccagcctcctgacctcggcctgctggcctatgagccgttgggcccagcgctcctcttggccccggctcccaccccggccgagcgccgtgagcccccgagcctcttgggctacctgagcctgcgagctggcgagggccggcccaacggcgagggtgctgagcccggtcccggccgcagcttcggaggcttccgcccgctgtcctctgctctcccggcccgggctcgccggcaccgtgcggaggagcctgaggaagaagaggaggtggtggaggccgaggaggaaacctgggcccggggcaggtcgctgggctctctggcttccctgcacccgcgcccgggtgagggaccggggcactctgcctctgctgctggggcccaggcaagatcgaccgccacgcaggaagagaatgggctgttggttggagggacccggcctgaagggggccggggcgccaccggcaaggattgtcctttctgcggaaaatctttccgctcagcacatcacctcaaagtgcatctgcgagtgcacacaggcgagcggccctacaagtgtccgcactgcgactacgcgggcacccagtccggctcgctcaagtatcacctacagcgccaccaccgggagcagaggagcggggccggccccgggccacccccggagccaccgcctccttcccagcggggttcggccccgcaatctggagccaagccgtctccgcagcctgcgacctgggtggagggcgcctcaagtccccggcctccttctagcggtgctgggccggggtcccgtcggaagcccgccagccctgggaggaccctgcgcaacgggcgaggcggtgaggccgaacccctggacctgtccttgcgggcagggccgggaggcgaggccgggcctgggggtgccctccaccgctgcctcttctgcccgttcgccactggagccccagagctcatggccttgcaccttcaagtgcaccacagccgccgggctaggggccgccggccaccccaggctgacgcgtccccgccctatgcccgagtaccatcaggagagacccctcccagtccttcgcaggaaggggaggagggctccgggctgtccagacccggagaggcagggctgggggggcaagaacggtagtaatgaactagtccgtaacttgaaagtatttcgatttcttggctttatatatcttgtggaaaggacgagccatggagcgtaccggaggttcc

SEQ ID NO: 1522 - DNA, 2438 bp, Homo sapiens
  source 1..2438: mol_type = genomic DNA
accgccaccatggactccaaagaatcattaactcctggtagagaagaaaaccccagcagtgtgcttgctcaggagaggggagatgtgatggacttctataaaaccctaagaggaggagctactgtgaaggtttctgcgtcttcaccctcactggctgtcgcttctcaatcagactccaagcagcgaagacttttggttgattttccaaaaggctcagtaagcaatgcgcagcagccagatctgtccaaagcagtttcactctcaatgggactgtatatgggagagacagaaacaaaagtgatgggaaatgacctgggattcccacagcagggccaaatcagcctttcctcgggggaaacagacttaaagcttttggaagaaagcattgcaaacctcaataggtcgaccagtgttccagagaaccccaagagttcagcatccactgctgtgtctgctgcccccacagagaaggagtttccaaaaactcactctgatgtatcttcagaacagcaacatttgaagggccagactggcaccaacggtggcaatgtgaaattgtataccacagaccaaagcacctttgacattttgcaggatttggagttttcttctgggtccccaggtaaagagacgaatgagagtccttggagatcagacctgttgatagatgaaaactgtttgctttctcctctggcgggagaagacgattcattccttttggaaggaaactcgaatgaggactgcaagcctctcattttaccggacactaaacccaaaattaaggataatggagatctggttttgtcaagccccagtaatgtaacactgccccaagtgaaaacagaaaaagaagatttcatcgaactctgcacccctggggtaattaagcaagagaaactgggcacagtttactgtcaggcaagctttcctggagcaaatataattggtaataaaatgtctgccatttctgttcatggtgtgagtacctctggaggacagatgtaccactatgacatgaatacagcatccctttctcaacagcaggatcagaagcctatttttaatgtcattccaccaattcccgttggttccgaaaattggaataggtgccaaggatctggagatgacaacttgacttctctggggactctgaacttccctggtcgaacagttttttctaatggctattcaagccccagcatgagaccagatgtaagctctcctccatccagctcctcaacagcaacaacaggaccacctcccaaactctgcctggtgtgctctgatgaagcttcaggatgtcattatggagtcttaacttgtggaagctgtaaagttttcttcaaaagagcagtggaaggtagacagcacaattacctatgtgctggaaggaatgattgcatcatcgataaaattcgaagaaaaaactgcccagcatgccgctatcgaaaatgtcttcaggctggaatgaacctggaagctcgaaaaacaaagaaaaaaataaaaggaattcagcaggccactacaggagtctcacaagaaacctctgaaaatcctggtaacaaaacaatagttcctgcaacgttaccacaactcacccctaccctggtgtcactgttggaggttattgaacctgaagtgttatatgcaggatatgatagctctgttccagactcaacttggaggatcatgactacgctcaacatgttaggagggcggcaagtgattgcagcagtgaaatgggcaaaggcaataccaggtttcaggaacttacacctggatgaccaaatgaccctactgcagtactcctggatgtttcttatggcatttgctctggggtggagatcatatagacaatcaagtgcaaacctgctgtgttttgctcctgatctgattattaatgagcagagaatgactctaccctgcatgtacgaccaatgtaaacacatgctgtatgtttcctctgagttacacaggcttcaggtatcttatgaagagtatctctgtatgaaaaccttactgcttctctcttcagttcctaaggacggtctgaagagccaagagctatttgatgaaattagaatgacctacatcaaagagctaggaaaagccattgtcaagagggaaggaaactccagccagaactggcagcggttttatcaactgacaaaactcttggattctatgcatgaagtggttgaaaatctccttaactattgcttccaaacatttttggataagaccatgagtattgaattccccgagatgttagctgaaatcatcaccaatcagataccaaaatattcaaatggaaatatcaaaaaacttctgtttcatcaaaagtagtaatgaactagtccgtaacttgaaagtatttcgatttcttggctttatatatcttgtggaaaggacgagccctttgttggaagttagaattt

SEQ ID NO: 1523 - DNA, 2330 bp, Homo sapiens
  source 1..2330: mol_type = genomic DNA
accgccaccatggactccaaagaatcattaactcctggtagagaagaaaaccccagcagtgtgcttgctcaggagaggggagatgtgatggacttctataaaaccctaagaggaggagctactgtgaaggtttctgcgtcttcaccctcactggctgtcgcttctcaatcagactccaagcagcgaagacttttggttgattttccaaaaggctcagtaagcaatgcgcagcagccagatctgtccaaagcagtttcactctcaatgggactgtatatgggagagacagaaacaaaagtgatgggaaatgacctgggattcccacagcagggccaaatcagcctttcctcgggggaaacagacttaaagcttttggaagaaagcattgcaaacctcaataggtcgaccagtgttccagagaaccccaagagttcagcatccactgctgtgtctgctgcccccacagagaaggagtttccaaaaactcactctgatgtatcttcagaacagcaacatttgaagggccagactggcaccaacggtggcaatgtgaaattgtataccacagaccaaagcacctttgacattttgcaggatttggagttttcttctgggtccccaggtaaagagacgaatgagagtccttggagatcagacctgttgatagatgaaaactgtttgctttctcctctggcgggagaagacgattcattccttttggaaggaaactcgaatgaggactgcaagcctctcattttaccggacactaaacccaaaattaaggataatggagatctggttttgtcaagccccagtaatgtaacactgccccaagtgaaaacagaaaaagaagatttcatcgaactctgcacccctggggtaattaagcaagagaaactgggcacagtttactgtcaggcaagctttcctggagcaaatataattggtaataaaatgtctgccatttctgttcatggtgtgagtacctctggaggacagatgtaccactatgacatgaatacagcatccctttctcaacagcaggatcagaagcctatttttaatgtcattccaccaattcccgttggttccgaaaattggaataggtgccaaggatctggagatgacaacttgacttctctggggactctgaacttccctggtcgaacagttttttctaatggctattcaagccccagcatgagaccagatgtaagctctcctccatccagctcctcaacagcaacaacaggaccacctcccaaactctgcctggtgtgctctgatgaagcttcaggatgtcattatggagtcttaacttgtggaagctgtaaagttttcttcaaaagagcagtggaaggacagcacaattacctatgtgctggaaggaatgattgcatcatcgataaaattcgaagaaaaaactgcccagcatgccgctatcgaaaatgtcttcaggctggaatgaacctggaagctcgaaaaacaaagaaaaaaataaaaggaattcagcaggccactacaggagtctcacaagaaacctctgaaaatcctggtaacaaaacaatagttcctgcaacgttaccacaactcacccctaccctggtgtcactgttggaggttattgaacctgaagtgttatatgcaggatatgatagctctgttccagactcaacttggaggatcatgactacgctcaacatgttaggagggcggcaagtgattgcagcagtgaaatgggcaaaggcaataccaggtttcaggaacttacacctggatgaccaaatgaccctactgcagtactcctggatgtttcttatggcatttgctctggggtggagatcatatagacaatcaagtgcaaacctgctgtgttttgctcctgatctgattattaatgagcagagaatgactctaccctgcatgtacgaccaatgtaaacacatgctgtatgtttcctctgagttacacaggcttcaggtatcttatgaagagtatctctgtatgaaaaccttactgcttctctcttcagttcctaaggacggtctgaagagccaagagctatttgatgaaattagaatgacctacatcaaagagctaggaaaagccattgtcaagagggaaggaaactccagccagaactggcagcggttttatcaactgacaaaactcttggattctatgcatgaaaatgttatgtggttaaaaccagaaagcacatctcacacattaatctagtaatgaactagtccgtaacttgaaagtatttcgatttcttggctttatatatcttgtggaaaggacgaatatcaaacttcaccaacaacgtc

SEQ ID NO: 1524 - DNA, 1499 bp, Homo sapiens
  source 1..1499: mol_type = genomic DNA
accgccaccatgtgggtgtgtttgagagggatcctagacagccaagccttctggcatgaaacgctgagaagatgggagtgtctgctggcagagatgaaagtgagcaggggtgagcgcagccactgcccaacgcaaaccgtgaagaagcttctggaagagcagaggcgccgccagcagcagcagcccgacgctggcggggtgcagggacaatttctccctcccccagagcagcccctgaccccatctgtgaatgaggctgtgactggccaccctcccttcccagcacactcggagactgtgggttctggacctagcagcctgggctttccagactgggaccccaacacgcatgctgcctacactgacagcccctactcttgccctgcttctgctgccgaaaatttcctgcctcctgacttctacccaccctcggacccagggcagccgtgcccatttccccagggcatggaggctggaccctggagagtttctgcacccccttcaggacccccacagttccccgctgtggtccctggaccatcgctggaggtggcccgagctcacatgctggctttggggccacagcagctgctggcccaggatgaggagggggacacgctccttcacctgtttgcggctcgggggctgcgctgggcggcatatgctgcggctgaggtgctccaggtgtaccggcgtcttgacattcgtgagcataagggcaagacccctctcctggtggcggctgctgccaaccagcccctgattgtggaggatctgttgaacctgggagcagagcccaatgccgctgaccatcagggacgttcggtcttgcacgtggccgctacctacgggctcccaggagttctcttggctgtgcttaactctggggtccaggttgacctggaagccagagacttcgagggcctcaccccgctccacacggccatcctggcccttaacgttgctatgcgcccttccgacctctgtccccgggtgctgagcacacaggcccgagacaggctggattgtgtccacatgttgctgcaaatgggtgctaatcacaccagccaggagatcaagagcaacaagacagttctgcacttggccgtgcaggctgccaaccccactctggttcagctgctgctggagctgccccggggagacctgcggacctttgtcaacatgaaggcccacgggaacacagccctccacatggcggctgccctgccccctgggccggcccaggaggccatcgtgcggcacctgttggcagctggggcggaccccacactgcgcaacctggagaatgagcagcccgttcacctgctgcggcccgggccgggccctgaggggctccggcagctgttgaagaggagccgtgtggcgccgccaggcctgtcctcttagtaatgaactagtccgtaacttgaaagtatttcgatttcttggctttatatatcttgtggaaaggacgacaactagttgtttcaagcaaacga

SEQ ID NO: 1525 - DNA, 1604 bp, Homo sapiens
  source 1..1604: mol_type = genomic DNA
accgccaccatgaatcaacgaaggagtgagtcaaggcccgggaaccacagactccaagcctacgcagagcccgggaagggggattccggaggggcggggcctctttccggaagcgcccgccgggggcggggagggggcggggccatccgcgtgaggcgaccctgttggtccggaggggcggggcgaggaggaggacccgcttgggcggttcggctgcccacagtaaccgctgggtggacctggccagcgctccgaaccttgtcctcgctgcgcgccggcccctcggagccccacagcccgggaaggaggccgccgcgggccgggcgcccgctctgccaagcggacccgcaacccggaaaggcggcgcggcggagcctggagccggatcctgctcagaccgggccccggccggccagagccgcgggcatgtcggaggcgcggaaggggccggacgaggcggaggagagccagtacgactctggcattgagtctctgcgctctctgcgctccctacccgagtccacctcggctccagcctccgggccctcggacggcagcccccagccctgcacccatcctccgggacccgtcaaggaaccacaggagaaggaagacgcggatggggagcgggctgattccacctatggctcctcctcgctcacctacaccctgtccttgctggggggccccgaggctgaggacccggccccacgcctgccactcccccacgtgggggcgctgagccctcagcagctggaagcactcacttacatctccgaggacggagacacgctggtccacctggcagtgattcatgaggccccagcggtgctgctctgttgcctggctttgctgccccaggaggtcctggacattcaaaataacctttaccagacagcactccatctggctgtacatctggaccaaccgggcgcagttcgggcactggtgctgaagggggccagccgggcactacaggaccggcatggtgacacagcccttcatgtggcctgccagcgccagcacttggcctgtgcccgctgcctgctggaagggcggccagagccaggcagaggaacatctcactctctggacctccagctgcaaaactggcaaggtctggcttgtctccacattgccacccttcagaagaaccaaccactcatggaattgctgcttcggaatggagctgacattgatgtgcaggagggcaccagtggtaagacagcgctgcacctggctgtggaaacccaagagcggggcctggtacagttcctgctccaggctggtgcccaggtagatgcccgcatgctgaacgggtgcacacccctgcacctggcagctggccggggtctcatgggcatctcatccactctgtgcaaggcgggtgctgactccctgctgcggaatgtggaggatgagacgccccaggacctgactgaggaatcccttgtccttttgccctttgatgacctgaagatctcagggaaactgctgctgtgtaccgactagtaatgaactagtccgtaacttgaaagtatttcgatttcttggctttatatatcttgtggaaaggacgacagcttaagtgtgacattgagtcc

SEQ ID NO: 1526 - DNA, 2258 bp, Homo sapiens
  source 1..2258: mol_type = genomic DNA
accgccaccatgattgtggacaagctgctggacgacagccgcggcggagaggggctgcgggacgcggcgggcggctgcggcctcatgaccagcccgctcaacctgagctacttctacggcgcgtcgccgcccgccgccgccccgggcgcctgcgacgccagctgctcggtcttgggcccctcggcgcccggctcgcccggctccgactcctccgacttctcctctgcctcgtcggtgtcctcctgcggcgccgtggagtcccggtcgagaggcggcgcccgcgccgagcgccagccagttgagccccatatgggggttggcaggcagcagagaggcccctttcaaggtgttcgggtaaagaactcagtgaaggaactcctgttgcacatccgaagtcataaacagaaggcttctggccaagctgtggatgattttaagacacaaggtgtgaacatagaacagttcagagaattgaagaacacagtatcatacagtgggaaaaggaaagggcccgattcgttgtctgatggacctgcttgcaaaaggccagctctgttgcattcccaatttttgacaccacctcaaacaccaacgcccggggagagcatggaagatgttcatctcaatgaacccaaacaggagagcagtgctgatctgcttcagaacattatcaacattaagaatgaatgcagccccgtttccctgaacacagttcaagttagctggctgaaccccgtggtggtccctcagagctcccccgcagagcagtgtcaggacttccatggagggcaggtcttttctccacctcagaaatgccaaccattccaagtcaggggctcccaacaaatgatagaccaggcttccctgtaccagtattctccacagaaccagcatgtagagcagcagccacactacacccacaaaccaactctggaatacagtccttttcccatacctccccagtcccccgcttatgaaccaaacctctttgatggtccagaatcacagttttgcccaaaccaaagcttagtttcccttcttggtgatcaaagggaatctgagaatattgctaatcccatgcagacttcctccagtgttcagcagcaaaatgatgctcacttgcacagcttcagcatgatgcccagcagcgcctgtgaggccatggtggggcacgagatggcctctgactcttcaaacacttcactgccattctcaaacatgggaaatccaatgaacaccacacagttagggaaatcactttttcagtggcaggtggagcaggaagaaagcaaattggcaaatatttcccaagaccagtttctttcaaaggatgcagatggtgacacgttccttcatattgctgttgcccaagggagaagggcactttcctatgttcttgcaagaaagatgaatgcacttcacatgctggatattaaagagcacaatggacagagtgcctttcaggtggcagtggctgccaatcagcatctcattgtgcaggatctggtgaacatcggggcacaggtgaacaccacagactgctggggaagaacacctctgcatgtgtgtgctgagaagggccactcccaggtgcttcaggcgattcagaagggagcagtgggaagtaatcagtttgtggatcttgaggcaactaactatgatggcctgactccccttcactgtgcagtcatagcccacaatgctgtggtccatgaactccagagaaatcaacagcctcattcacctgaagttcaggagcttttactgaagaataagagtctggttgataccattaagtgcctaattcaaatgggagcagcggtggaagcgaaggatcgcaaaagtggccgcacagccctgcatttggcagctgaagaagcaaatctggaactcattcgcctctttttggagctgcccagttgcctgtcttttgtgaatgcaaaggcttacaatggcaacactgccctccatgttgctgccagcttgcagtatcggttgacacaattagatgctgtccgcctgttgatgaggaagggagcagacccaagtactcggaacttggagaacgaacagccagtgcatttggttcccgatggccctgtgggagaacagatccgacgtatcctgaagggaaagtccattcagcagagagctccaccgtattagtaatgaactagtccgtaacttgaaagtatttcgatttcttggctttatatatcttgtggaaaggacgaggcagtggtacgacacgcacaaga

SEQ ID NO: 1527 - DNA, 1958 bp, Homo sapiens
  source 1..1958: mol_type = genomic DNA
accgccaccatgggggttggcaggcagcagagaggcccctttcaaggtgttcgggtaaagaactcagtgaaggaactcctgttgcacatccgaagtcataaacagaaggcttctggccaagctgtggatgattttaagacacaaggtgtgaacatagaacagttcagagaattgaagaacacagtatcatacagtgggaaaaggaaagggcccgattcgttgtctgatggacctgcttgcaaaaggccagctctgttgcattcccaatttttgacaccacctcaaacaccaacgcccggggagagcatggaagatgttcatctcaatgaacccaaacaggagagcagtgctgatctgcttcagaacattatcaacattaagaatgaatgcagccccgtttccctgaacacagttcaagttagctggctgaaccccgtggtggtccctcagagctcccccgcagagcagtgtcaggacttccatggagggcaggtcttttctccacctcagaaatgccaaccattccaagtcaggggctcccaacaaatgatagaccaggcttccctgtaccagtattctccacagaaccagcatgtagagcagcagccacactacacccacaaaccaactctggaatacagtccttttcccatacctccccagtcccccgcttatgaaccaaacctctttgatggtccagaatcacagttttgcccaaaccaaagcttagtttcccttcttggtgatcaaagggaatctgagaatattgctaatcccatgcagacttcctccagtgttcagcagcaaaatgatgctcacttgcacagcttcagcatgatgcccagcagcgcctgtgaggccatggtggggcacgagatggcctctgactcttcaaacacttcactgccattctcaaacatgggaaatccaatgaacaccacacagttagggaaatcactttttcagtggcaggtggagcaggaagaaagcaaattggcaaatatttcccaagaccagtttctttcaaaggatgcagatggtgacacgttccttcatattgctgttgcccaagggagaagggcactttcctatgttcttgcaagaaagatgaatgcacttcacatgctggatattaaagagcacaatggacagagtgcctttcaggtggcagtggctgccaatcagcatctcattgtgcaggatctggtgaacatcggggcacaggtgaacaccacagactgctggggaagaacacctctgcatgtgtgtgctgagaagggccactcccaggtgcttcaggcgattcagaagggagcagtgggaagtaatcagtttgtggatcttgaggcaactaactatgatggcctgactccccttcactgtgcagtcatagcccacaatgctgtggtccatgaactccagagaaatcaacagcctcattcacctgaagttcaggagcttttactgaagaataagagtctggttgataccattaagtgcctaattcaaatgggagcagcggtggaagcgaaggatcgcaaaagtggccgcacagccctgcatttggcagctgaagaagcaaatctggaactcattcgcctctttttggagctgcccagttgcctgtcttttgtgaatgcaaaggcttacaatggcaacactgccctccatgttgctgccagcttgcagtatcggttgacacaattagatgctgtccgcctgttgatgaggaagggagcagacccaagtactcggaacttggagaacgaacagccagtgcatttggttcccgatggccctgtgggagaacagatccgacgtatcctgaagggaaagtccattcagcagagagctccaccgtattagtaatgaactagtccgtaacttgaaagtatttcgatttcttggctttatatatcttgtggaaaggacgacattggacaatccagcgtccttat

SEQ ID NO: 1528 - DNA, 9473 bp, Homo sapiens
  source 1..9473: mol_type = genomic DNA
accgccaccatgcaccatggcactggcccccagaacgtccagcatcagctgcagaggtccagggcctgccctggcagcgagggtgaggagcagccggcccaccccaacccacccccgtcccccgcagctcccttcgctccctcagcaagcccgtcggcaccccagtctcccagttatcaaatacagcagctgatgaataggagccctgcaaccgggcagaacgtgaacatcaccctgcagagcgtgggccctgtcgtcgggggaaaccagcagatcacactggccccactgccgctccccagccccacctctccaggcttccagttcagcgctcagcctcggcggtttgagcatgggtctccatcatacattcaggtcacgtcccccttgtcccagcaggtccagacccagagtcccacgcagcccagtccggggccggggcaggccttgcagaatgtgcgtgcaggtgcccctggccctgggctgggcctctgcagcagcagccctacagggggcttcgtggatgccagcgtgctggtgaggcagatcagcttgagcccctccagtggtggacactttgtgtttcaggatgggtcagggctcacccagatcgcccagggagcccaggttcagctccagcacccgggtacgcccatcacagtccgagagcggagaccctcccagccccacacacagtcagggggcaccatccaccacctgggaccccagagccctgcagccgcgggtggggccggcctgcagcccctggccagcccaagccacatcaccacggctaacttgccaccgcagatcagcagcatcatccagggccagctggttcagcagcagcaggtgctgcaggggccgccgctgccccggcccctgggcttcgagaggacacccggcgtgctgctccccggggctgggggcgcagcggggtttgggatgacgtccccacccccgcccaccagcccttccaggactgccgtgcccccaggcctttccagcctcccactcacgtctgtggggaacacgggaatgaagaaggttcccaagaagttagaggagattcccccagcctctccggagatggcacagatgaggaagcagtgcctggactatcattaccaggagatgcaggctctgaaggaggtcttcaaggagtatttgattgaactgtttttcttgcaacactttcaagggaacatgatggatttcttagctttcaagaagaaacattatgccccattacaagcatatcttaggcagaatgatttggacattgaagaagaggaggaggaggaggaagaggaggaagaaaaatctgaggttatcaatgacgagcagcaagccctcgcagggagcctggtagcaggggccggaagcacagtagagacggacctgtttaagaggcagcaggcgatgccctccacaggtatggcagagcagtctaagaggcctcgccttgaagtgggtcaccaaggggtagttttccagcacccaggggcggacgcaggcgttcctctccagcaactaatgccgaccgcacaaggaggaatgccccccacgccgcaggccgcgcagctcgctggacagaggcagagtcagcagcagtatgacccctccacggggcctcccgtgcagaacgctgccagcttgcacaccccactgccgcagctgcccgggaggctgcccccagccggtgttcccactgcagccctctcctctgcgctgcagtttgcacagcagccgcaagtggtagaggcccagacacagctccaaatcccggtgaagactcagcagcccaatgttcccatccctgcaccgcccagcagccaactccccatccctccctcgcagcctgcacagctggccctccacgttcccacacctggaaaggtgcaggtgcaggcctctcagctttcctccctgccacagatggtagcatcgacaaggctccctgtggaccctgccccgccctgcccacggcctctgcccacctcttctacctcgtccctcgcgcctgtgagtggctccggcccaggaccctcccctgctcgatcctctccagtaaatagaccttcctcagccaccaataaggcactatctccagtcacttcccggaccccaggggtggtggcatctgcccccaccaaaccacagagtcctgctcagaatgccacctcgtcccaagacagttctcaggatacgctgacagaacaaataactctggagaaccaggtgcatcagcgcattgcggagctgaggaaagcaggtctgtggtcccagaggcgtctgccaaagctgcaggaggccccacgccccaagtcccactgggactatctgctggaggagatgcagtggatggccacagactttgcccaggagaggaggtggaaggtggctgctgcgaagaagctcgttagaactgtggtgcgccatcacgaggagaagcagctccgtgaagaaagggggaagaaggaagagcagagcagactgaggcggatagccgcctccacggcccgggagatagagtgcttttggtcgaatattgaacaggttgtggaaataaaactacgagtagaattagaagaaaaaaggaagaaggccttaaatttacagaaagtttccaggagagggaaagaattgagacctaaaggatttgacgcattacaggaaagttctctggattcaggaatgtctggaagaaaaagaaaagctagcatatctttgactgatgacgaagtggacgatgaagaggaaacaattgaagaggaggaagcaaatgaaggcgttgtggaccaccaaacagaactttctaatttagccaaggaagctgagctgcccctcctggacctgatgaagctgtacgaaggcgccttcctgccgagttctcagtggccccggccgaagcctgatggggaggacacaagcggagaggaagatgcagatgactgtccaggcgacagggagagtcgcaaggacttggttctcatcgactcgcttttcatcatggatcagttcaaagctgccgagaggatgaatatcgggaagccaaacgccaaggacattgcggacgtcactgcggtggctgaagccatcctgccgaagggcagtgctcgggtcacaacctcggtcaagtttaatgctccatctttgttgtatggggctctcagagattatcagaagattggcctggactggctggccaaactttacaggaagaatctcaatggcatattggcagatgaagctgggctgggtaaaacagtgcagatcattgctttttttgcccacctagcttgtaacgaaggtaattggggcccccatcttgttgttgtgagaagttgtaacatactcaagtgggagcttgaattgaaacgttggtgtcccggactcaaaatcctctcatatattggcagccacagagaactcaaagcaaagagacaggagtgggccgaacccaacagcttccacgtctgcatcacgtcctacactcagttcttccggggcctcaccgccttcacacgagtgcgctggaagtgcctggtcattgatgagatgcagcgcgtgaagggcatgaccgagaggcactgggaagcggttttcaccctgcagagccaacaacgtctgcttctgatcgactcgccgctgcacaataccttcctggagctctggaccatggtgcacttcctggtcccagggatctccaggccctacctgagctcccctctgagggcccccagtgaagagagccaggattactaccataaagtggtcataaggttacacagggtgacacagccatttattttgaggagaactaagagagatgtggaaaagcaactaacaaagaaatatgagcatgttttgaagtgtcgcctttctaaccgacaaaaagccttatacgaggacgttatcctgcaacctggcactcaggaggccttgaagagcgggcactttgtcaacgtcctgagcatccttgtgcggctgcagcgcatctgcaaccaccctgggctcgtcgagccccggcacccaggctcttcctacgtggcggggccactggagtatccgtccgcatctctaatcctgaaggcactggagagagatttctggaaggaagcagatctttctatgtttgatctcatcggcttagaaaataaaatcactcgtcacgaggcagagttgctgtctaagaaaaagataccgcggaaactcatggaggaaatctccacttcagcagccccagcagcccgaccagcagcagcaaagctgaaggccagcaggttgtttcagcctgtgcagtatggccagaagcccgagggtcgcaccgtggctttccccagcactcacccgccccggacggcagcccccaccacggcctctgctgctccacagggcccgcttcgaggacggccgcccatcgccacgttctctgccaatccggaggcaaaagcagcagcagccccgtttcagacctctcaggcttccgccagtgctccacgacaccagcccgcctcggcctccagcacagccgctagcccggcccatcctgcgaaactgcgggcccagaccacagcacaggcctccaccccaggccagcccccgccccagccccaggccccctcgcacgcggccgggcagagcgcgctgcctcagaggctggtgctcccctcgcaggcccaggcccgcttgcccagtggagaggtagtgaaaatagctcagctggcatccatcacaggaccacagagccgcgtggctcagccagagacgccggtgacactgcagttccagggcagcaagttcaccctgtcacacagccagctccggcagctcacagcgggccagccgctgcagctgcaaggcagcgtcctccagatcgtgtccgcccccgggcagccctaccttcgagcccctggccctgtggtgatgcagaccgtgtctcaggcgggcgctgtgcacggcgccctgggaagcaagcccccggccggcggtcccagccctgcacccttgaccccacaagttggcgttccgggccgcgtggcggtgaatgccttggctgtaggagaacccggaacggcctccaaaccagcttctcccattggagggccgacccaggaggaaaagaccagactcttgaaagagcgcctggatcagatttatttagtcaacgagcggcgctgttctcaagctccagtctatggcagagacttgctaaggatttgtgccctgcctagccatggaagggtacagtggcgtgggtccctggatggccgtcgtgggaaggaggccgggccagcgcacagttacacttcatcctcagaaagtccaagtgagctgatgttgacgctttgtcggtgtggagagtctctgcaggatgttattgacagggtggcctttgtgattcctccggtggtggcagcacccccgtccctacgggtgccgcggccgccacccctgtacagccacagaatgaggatcttgaggcagggcctgagagagcacgctgcgccgtacttccagcagctgcggcagaccacggctccacgcctgctgcagttccctgagctgaggctggtgcagttcgactcagggaagttggaagctttagctatcttgcttcagaaattgaaatctgaaggacgtcgggtgctgattttatcacagatgattcttatgttggacattttagagatgttcttgaacttccattacctcacctatgtaagaatcgatgaaaatgccagcagtgagcaacggcaggaactgatgaggagtttcaacagagacaggcggattttttgtgccattctctccactcacagccgtaccacaggtataaaccttgtagaggcggacaccgtcgtgttttatgacaatgacctgaatccagtgatggatgccaaagctcaggagtggtgcgataggatcgggagatgcaaagacatccacatatacaggcttgtgagtggcaattccattgaagagaaattgttgaaaaatggaactaaagatctgatccgagaagtggctgctcagggaaatgactactccatggctttcttaactcagcgaaccatccaggagctgtttgaagtttattctcccatggatgatgctggcttcccggtcaaagctgaggagtttgtggtgctttctcaggaaccttctgtcacggaaaccattgcacccaaaattgcaagacctttcatagaggccctcaagagtattgagtatctggaggaggatgcccagaagtccgcacaggagggggtgctgggaccacacactgatgctctgtcatcagactctgagaacatgccgtgtgatgaagaaccatcccaattagaggagctagctgacttcatggagcagcttacaccaattgaaaaatatgctttaaattacctggaattattccatacttctattgagcaagaaaaggagagaaacagtgaggacgcagtgatgactgcagtgagggcatgggagttctggaacctgaagaccctgcaggagagggaggcccggctgcggctggagcaggaggaggcggagctcctgacctacacgcgagaggatgcctacagcatggagtatgtctacgaagatgtcgatgggcagacagaagtcatgccgctctggaccccacccaccccgccgcaggacgacagcgacatctacctcgactcggtcatgtgtctcatgtatgaagccactcccatcccagaggctaagctgccccctgtgtacgtgaggaaggagcggaagcgacacaaaacagacccctcagctgcaggcaggaagaagaagcagcgtcacggggaggcggtcgtccctcctcggtccctgtttgaccgcgcaacaccaggacttctgaaaattcgcagagagggcaaggagcagaagaagaatattctgctgaagcagcaggtgccattcgccaagcccctgccaacttttgccaaacccacagctgagcctggtcaagacaaccccgagtggctcatcagtgaggactgggcgctgctgcaggctgtaaagcagttactggagctgcctttgaacctcacaatcgtgtcacctgctcacacacctaattgggatcttgtcagtgacgttgttaactcctgtagccgaatctaccgctcttccaaacagtgccggaatcgctacgagaatgtcatcattccacgagaggaggggaagagtaaaaacaaccgtcctctccgtacgagccagatctatgcccaggatgagaatgccacacacacccagctgtacacgagccactttgacttaatgaaaatgactgctggcaagaggagtcccccaatcaaacctctgcttggcatgaatccctttcagaagaaccccaagcacgcgtctgtgttggcagaaagtggaatcaactatgacaagccgctgcctcccatccaggtggcatctctccgtgcagagcgaatcgcaaaagagaaaaaggctctggctgatcagcagaaggcacagcagccggccgtggcccagccacccccgccccagccgcagcccccaccacccccgcagcagccaccgccaccgctgccacaaccacaggcagcgggcagccagccgccagcagggccaccagctgtccagccccaaccccagccacagccccagacccagccacagcctgtgcaggccccagcgaaggcgcagcccgcaatcacgacggggggcagtgcagccgtactggcaggaaccattaaaacatcagttactgggacgagcatgcccactggtgccgtgagtggaaatgtgatcgtgaacaccatcgcaggggtcccagctgccaccttccagtccatcaacaagcgcctggcgtcgccagtggctcctggggccttgactacgccgggaggctctgctcccgcccaggtggtgcacacccagcccccgccacgggcagtcggctccccagccacggcgacccctgacctggtgtccatggcaacgactcagggtgttcgagcggtcacttctgtgacagcctcggccgtggtcactaccaacctgaccccagtgcagaccccggcacggtctttggtgccccaagtgtcccaagccacaggagttcagctccctggaaaaaccatcacacctgcacatttccagcttctcaggcagcagcagcagcagcagcaacaacagcagcagcagcagcagcagcagcagcagcagcagcagcagcaacagcagcagcagcaacagacgacgacgacctctcaggtgcaagttccacagatccagggccaggcccagtccccagcacagatcaaagctgtgggcaagctgacgccggaacacctcatcaaaatgcagaagcagaaactgcagatgcccccgcagcccccaccgccacaggcccagtctgcgcccccgcagccaacagcccaagtgcaagtgcagacctcgcagccgccgcagcagcagagcccccagctcacgacggtcacggccccaaggcctggtgccctgctgacgggcaccaccgtggccaacctccaggtggcccggctcacccgggttcccacttctcagctgcaggcgcaagggcagatgcagacccaggcaccccagccagcccaggtggccttggcgaagcctccggtggtgtccgtcccggcagctgtggtctcctcaccgggagtcaccaccctgcccatgaacgtcgcggggatcagcgtggcgatcggtcagccacagaaggcagcaggacagaccgtggtggcccagcccgtgcacatgcagcagctgctgaagctgaagcagcaggccgtccagcagcagaaggccatccagccccaggctgcacagggcccggcagccgtccagcagaagatcaccgcacagcagatcaccacccctggcgcgcagcagaaggttgcctacgccgcgcagccggcccttaagacccagtttcttaccacacccatctcccaggcccagaaactggccggggcccagcaagtgcagacccagatccaggttgcaaaacttcctcaagttgttcaacagcaaacacccgtggccagcatccagcaagttgcctctgcttcccagcaggcttctccacagactgtggcgctcacgcaggcgacggcggccgggcagcaggtgcagatgatccctgcagtgaccgcgactgcccaggtggttcagcagaaactcattcagcagcaggtggtgaccacggcgtcggccccgctccagactccaggcgctcccaacccagcccaggtgcccgccagctccgacagcccaagccagcagcccaagttacagatgagggtccctgctgtcaggctaaagacacctactaagcctccgtgccagtagtaatgaactagtccgtaacttgaaagtatttcgatttcttggctttatatatcttgtggaaaggacgatgcggtgagaggtatcttcattgc

SEQ ID NO: 1529 - DNA, 1703 bp, Homo sapiens
  source 1..1703: mol_type = genomic DNA
accgccaccatggattcttctcagcacttagtgacctttgaggatgtggctgtggactttacccaggaggagtggactttgttggatcaagcccagagagatctctacagagatgtgatgttggagaactacaagaatctcattatactagcagggtctgaattattcaaacgtagtctcatgtctggattggaacaaatggaagagctgaggacaggagtgacaggagttctgcaggaattggatttgcaactcaaaaccaaaggctccccactgctgcaagatatttctgcagaaagatcaccaaatggagtacaattggagagaagcaatactgcagagaaactgtatgactctaaccattctggaaaagtcttcaatgaacacccatttcttatgactcacatgataactcacattggagagaaaacttctgaggataatcagagtggaaaagccttaagaaagaactttcctcatagtttttacaagaaaagtcatgctgaggggaaaatgcctaagtgtgttaaacatgaaaaagccttcaaccagtttccaaatcttactaggcagaataaaactcacacacaagagaaattgtgtgaatgcaaagactgttggagaacttttcttaatcagtcatcccttaagttacatataagatctcacaatggagacaaacactatgtatgtaaggaatgtgggaaagccttcagtaattcctcacaccttataggacatggaagaattcacagtggagagaagccctatgtctgtaaagaatgtggtaaagctttcactcaatccacaggacttaaattacacatcagaactcacagtggagaaaaaccatataaatgtaaagagtgtgggaaagccttcacccattcttcataccttactgatcatacaagaatccacagtggaaagaagccctatgtatgtatggaatgtggaaaagccttcactagatccacaggacttattttacacatgcgaattcacactggagaaaagccatatgaatgtaaggagtgtggaaaagcttttattcattcctcataccttacaaaacatgtaaggattcacagtggagagaagctgtatttatgtaaggcatgtgggaaagcttttactcgttcctcaggacttgttttacacatgagaacacatactggagaaaagccctatgaatgtaaagaatgtgggaaagcctttaataattcctcaatgcttagtcaacatgtaaggattcacactggagagaagccatatgaatgcaaagaatgtgggaaagctttcactcaatcctcgggccttagtacccatttaagaactcacactggagaaaaggcctgtgaatgtaaggaatgcggtaaagcatttgctcgttccacaaatcttaatatgcacatgcgaacgcacacaggagaaaagccttatgcatgtaaagaatgtgggaaagccttcaggtattccacataccttaacgttcacacacgaactcacactggagcaaaaccatatgaatgtaagaaatgtgggaaaaacttcactcaatcttcagcacttgctaaacatctaagaactaaggcatgtgaaaaaacctagtaatgaactagtccgtaacttgaaagtatttcgatttcttggctttatatatcttgtggaaaggacgagccctccggaaagggactgtgtgt

SEQ ID NO: 1530 - DNA, 3875 bp, Homo sapiens
  source 1..3875: mol_type = genomic DNA
accgccaccatgaaggcggcagatgagcctgcctacctgacagtgggaaccgatgtcagtgccaagtaccgaggtgccttctgtgaggcaaagattaagactgtgaaaaggctggtgaaagttaaggtactcctgaaacaggataataccacacaattggtacaagatgaccaagtaaagggtcctttaagagttggagctattgttgaaacaaggacatctgatggatcttttcaggaagctattatcagcaagttgacagatgctagttggtataccgtggtgtttgatgatggtgatgagcgaacattgagacgtacctcactttgtctgaaaggagagagacattttgcagagagtgagacacttgaccagcttccattaacaaatccagagcattttggaactccagtaattgcaaagaagacgaacagaggaaggagatcttctcttcctgttactgaagatgaaaaggaagaagaaagcagtgaagaggaagatgaagacaagcgccgtctcaatgatgaattactaggaaaagttgtaagtgtggtgtctgcaacggagaggactgaatggtatcctgctttggtaatatctcccagctgtaatgatgacatcacagtgaaaaaggatcagtgtttagttcgatcatttattgattctaaattttactctatagcaagaaaggacattaaggaagtagacattctcaatctaccggaatctgagctctccactaaaccagggcttcagaaagcaagcatcttcttaaaaactagagttgttcctgataattggaaaatggatataagtgaaatccttgagtcatccagtagtgatgatgaagatggcccagctgaagaaaatgatgaagagaaggaaaaggaggccaaaaagacagaagaagaggtgcctgaggaagaacttgatcctgaagagagggacaacttcctccagcagctttataagtttatggaagacagaggtactccaatcaacaaaccacctgttttgggctataaagatctcaatctcttcaaactcttcagactggtttatcatcagggtggatgtgacaatattgatagtggtgctgtatggaagcaaatttatatggaccttggcattcctattttgaattcagctgcttcctacaatgtaaaaactgcttatagaaagtatctctatggttttgaggagtactgccgttcggcaaatattcagttcagaactgttcatcaccatgaaccaaaagtaaaagaggaaaaaaaagacttagaagaatcaatggaagaggctctcaaattagatcaagaaatgcctttaacagaagtgaagagtgaacctgaggaaaatatcgattcaaacagtgaaagtgaaagagaagagatagaattaaaatctccgaggggacgaaggagaattgctcgagatgtaaattctattaaaaaggaaattgaagaagagaaaacagaagacaaattaaaagataatgatacagaaaataaggatgtagatgatgactatgaaactgcagagaaaaaagaaaatgagctactactggggagaaaaaatacaccaaagcaaaaagagaagaaaattaaaaaacaggaggattctgacaaagactcagatgaagaggaagagaaaagccaagagagggaagaaactgaaagcaaatgtgactctgaaggagaggaagatgaggaagacatggaaccctgcctaacaggaaccaaagtgaaagtaaaatatggacgagggaagactcagaaaatttatgaagccagtattaaaagcactgaaattgatgacggagaagttttatatttggtacattactatggatggaatgtcaggtatgatgagtgggtgaaggctgacaggataatctggcctttggacaaaggtggaccaaagaaaaaacagaagaaaaaagctaaaaataaagaagatagtgaaaaggacgaaaagagagatgaggagaggcagaagtcaaaacggggacgacctcctttaaaatcaaccctctcatcaaacatgccgtatggcttatctaagacagcaaacagtgaaggaaaatcagactcttgttcatctgatagtgaaacagaagatgctttagaaaagaatttaataaatgaagaactttctcttaaagatgaactagaaaaaaatgaaaatttgaatgatgataagctagatgaagaaaatccaaagatttctgcacatatattaaaagaaaatgataggactcaaatgcagcctttagaaaccctgaagttagaagttggagagaatgaacaaatagtacagatttttgggaacaaaatggaaaaaacagaagaagttaagaaagaagccgaaaaatctccaaaaggaaagggaagacgaagcaagacaaaagatctttctttagaaattataaagatttcatcatttggccagaatgaagcaggaagtgaacctcatatagaagctcatagtcttgaattgtcttcattagacaataaaaacttttcttctgctacagaagatgaaattgaccaatgtgtgaaagaaaagaagttgaaacggaaaatactaggacaatcatcgccagagaaaaaaataagaattgagaatggaatggaaatgacaaatactgtatctcaagaaaggaccagtgattgtattggatctgagggaatgaaaaacttaaattttgaacagcactttgaaagagaaaatgaaggaatgccatcattgatagcagagtcaaaccaatgcatccaacaactgactagtgaaagatttgatagtccagctgaagaaactgtaaatattccactaaaagaagatgaggatgcaatgcctctgatcgggcctgaaaccttggtttgccatgaagtagatttggatgatttggatgaaaaggataagaccagcattgaggatgtagcagttgaaagctctgagtctaactctcttgtttctattccacctgccctacctcctgtagtccaacataacttttcagtagcttcaccacttactcttagtcaagatgagtctcgaagcgtaaaaagtgagagtgatataacgattgaagttgatagtattgctgaagaatctcaagaaggtctctgtgagagggaatcggcaaatggatttgaaactaatgttgcctctggtacctgtagtataattgtacaagagagagagagcagagagaagggtcagaagaggccaagtgatggaaatagtggattaatggcaaaaaagcaaaagcgtaccccaaagcgaacaagtgctgcagccaaaaatgaaaagaatggaacaggacaaagcagtgatagtgaagatcttcctgtcctagacaattcaagtaaatgtaccccagtaaagcatcttaatgtatctaagccacagaaacttgcacgatctcctgcaagaatatccccgcacatcaaagatggagagaaagataaacacagagaaaaacatccgaattcatcccctaggacatataaatggagctttcagctcaatgaattagataatatgaacagtacagagagaatctcatttctccaagaaaaactacaggaaatcagaaaatattatatgtctttgaagtctgaagttgcaaccatagacaggaggagaaaaagattaaaaaagaaagacagggaagtgtctcatgcgggagcctccatgtcatctgcttcatcagacactggaatgagtccctcatcatcatctcccccacaaaatgtacttgctgtagaatgcaggtagtaatgaactagtccgtaacttgaaagtatttcgatttcttggctttatatatcttgtggaaaggacgaaaactaacttcgggcgcgtctcga

SEQ ID NO: 1531 - DNA, 3668 bp, Homo sapiens
  source 1..3668: mol_type = genomic DNA
accgccaccatgaaggcggcagatgagcctgcctacctgacagtgggaaccgatgtcagtgccaagtaccgaggtgccttctgtgaggcaaagattaagactgtgaaaaggctggtgaaagttaaggtactcctgaaacaggataataccacacaattggtacaagatgaccaagtaaagggtcctttaagagttggagctattgttgaaacaaggacatctgatggatcttttcaggaagctattatcagcaagttgacagatgctagttggtataccgtggtgtttgatgatggtgatgagcgaacattgagacgtacctcactttgtctgaaaggagagagacattttgcagagagtgagacacttgaccagcttccattaacaaatccagagcattttggaactccagtaattgcaaagaagacgaacagaggaaggagatcttctcttcctgttactgaagatgaaaaggaagaagaaagcagtgaagaggaagatgaagacaagcgccgtctcaatgatgaattactaggaaaagttgtaagtgtggtgtctgcaacggagaggactgaatggtatcctgctttggtaatatctcccagctgtaatgatgacatcacagtgaaaaaggatcagtgtttagttcgatcatttattgattctaaattttactctatagcaagaaaggacattaaggaagtagacattctcaatctaccggaatctgagctctccactaaaccagggcttcagaaagcaagcatcttcttaaaaactagagttgttcctgataattggaaaatggatataagtgaaatccttgagtcatccagtagtgatgatgaagatggcccagctgaagaaaatgatgaagagaaggaaaaggaggccaaaaagacagaagaagaggtgcctgaggaagaacttgatcctgaagagagggacaacttcctccagcagctttataagtttatggaagacagaggtactccaatcaacaaaccacctgttttgggctataaagatctcaatctcttcaaactcttcagactggtttatcatcagggtggatgtgacaatattgatagtggtgctgtatggaagcaaatttatatggaccttggcattcctattttgaattcagctgcttcctacaatgtaaaaactgcttatagaaagtatctctatggttttgaggagtactgccgttcggcaaatattcagttcagaactgttcatcaccatgaaccaaaagtaaaagaggaaaaaaaagacttagaagaatcaatggaagaggctctcaaattagatcaagaaatgcctttaacagaagtgaagagtgaacctgaggaaaatatcgattcaaacagtgaaagtgaaagagaagagatagaattaaaatctccgaggggacgaaggagaattgctcgagatgtaaattctattaaaaaggaaattgaagaagagaaaacagaagacaaattaaaagataatgatacagaaaataaggatgtagatgatgactatgaaactgcagagaaaaaagaaaatgagctactactggggagaaaaaatacaccaaagcaaaaagagaagaaaattaaaaaacaggaggattctgacaaagactcagatgaagaggaagagaaaagccaagagagggaagaaactgaaagcaaatgtgactctgaaggagaggaagatgaggaagacatggaaccctgcctaacaggaaccaaagtgaaagtaaaatatggacgagggaagactcagaaaatttatgaagccagtattaaaagcactgaaattgatgacggagaagttttatatttggtacattactatggatggaatgtcaggtatgatgagtgggtgaaggctgacaggataatctggcctttggacaaaggtggaccaaagaaaaaacagaagaaaaaagctaaaaataaagaagatagtgaaaaggacgaaaagagagatgaggagaggcagaagtcaaaacggggacgacctcctttaaaatcaaccctctcatcaaacatgccgtatggcttatctaagacagcaaacagtgaaggaaaatcagactcttgttcatctgatagtgaaacagaagatgctttagaaaagaatttaataaatgaagaactttctcttaaagatgaactagaaaaaaatgaaaatttgaatgatgataagctagatgaagaaaatccaaagatttctgcacatatattaaaagaaaatgataggactcaaatgcagcctttagaaaccctgaagttagaagttggagagaatgaacaaatagtacagatttttgggaacaaaatggaaaaaacagaagaagttaagaaagaagccgaaaaatctccaaaaggaaagggaagacgaagcaagacaaaagatctttctttagaaattataaagatttcatcatttggccagaatgaagcaggaagtgaacctcatatagaagctcatagtcttgaattgtcttcattagacaataaaaacttttcttctgctacagaagatgaaattgaccaatgtgtgaaagaaaagaagttgaaacggaaaatactaggacaatcatcgccagagaaaaaaataagaattgagaatggaatggaaatgacaaatactgtatctcaagaaaggaccagtgattgtattggatctgagggaatgaaaaacttaaattttgaacagcactttgaaagagaaaatgaaggaatgccatcattgatagcagagtcaaaccaatgcatccaacaactgactagtgaaagatttgatagtccagctgaagaaactgtaaatattccactaaaagaagatgaggatgcaatgcctctgatcgggcctgaaaccttggtttgccatgaagtagatttggatgatttggatgaaaaggataagaccagcattgaggatgtagcagttgaaagctctgagtctaactctcttgtttctattccacctgccctacctcctgtagtccaacataacttttcagtagcttcaccacttactcttagtcaagatgagtctcgaagcgtaaaaagtgagagtgatataacgattgaagttgatagtattgctgaagaatctcaagaaggtctctgtgagagggaatcggcaaatggatttgaaactaatgttgcctctggtacctgtagtataattgtacaagagagagagagcagagagaagggtcagaagaggccaagtgatggaaatagtggattaatggcaaaaaagcaaaagcgtaccccaaagcgaacaagtgctgcagccaaaaatgaaaagaatggaacagatgaattagataatatgaacagtacagagagaatctcatttctccaagaaaaactacaggaaatcagaaaatattatatgtctttgaagtctgaagttgcaaccatagacaggaggagaaaaagattaaaaaagaaagacagggaagtgtctcatgcgggagcctccatgtcatctgcttcatcagacactggaatgagtccctcatcatcatctcccccacaaaatgtacttgctgtagaatgcaggtagtaatgaactagtccgtaacttgaaagtatttcgatttcttggctttatatatcttgtggaaaggacgaaacacagggccttgtctggctccc

SEQ ID NO: 1532 - DNA, 3713 bp, Homo sapiens
  source 1..3713: mol_type = genomic DNA
accgccaccatgaaggcggcagatgagcctgcctacctgacagtgggaaccgatgtcagtgccaagtaccgaggtgccttctgtgaggcaaagattaagactgtgaaaaggctggtgaaagttaaggtactcctgaaacaggataataccacacaattggtacaagatgaccaagtaaagggtcctttaagagttggagctattgttgaaacaaggacatctgatggatcttttcaggaagctattatcagcaagttgacagatgctagttggtataccgtggtgtttgatgatggtgatgagcgaacattgagacgtacctcactttgtctgaaaggagagagacattttgcagagagtgagacacttgaccagcttccattaacaaatccagagcattttggaactccagtaattgcaaagaagacgaacagaggaaggagatcttctcttcctgttactgaagatgaaaaggaagaagaaagcagtgaagaggaagatgaagacaagcgccgtctcaatgatgaattactaggaaaagttgtaagtgtggtgtctgcaacggagaggactgaatggtatcctgctttggtaatatctcccagctgtaatgatgacatcacagtgaaaaaggatcagtgtttagttcgatcatttattgattctaaattttactctatagcaagaaaggacattaaggaagtagacattctcaatctaccggaatctgagctctccactaaaccagggcttcagaaagcaagcatcttcttaaaaactagagttgttcctgataattggaaaatggatataagtgaaatccttgagtcatccagtagtgatgatgaagatggcccagctgaagaaaatgatgaagagaaggaaaaggaggccaaaaagacagaagaagaggtgcctgaggaagaacttgatcctgaagagagggacaacttcctccagcagctttataagtttatggaagacagaggtactccaatcaacaaaccacctgttttgggctataaagatctcaatctcttcaaactcttcagactggtttatcatcagggtggatgtgacaatattgatagtggtgctgtatggaagcaaatttatatggaccttggcattcctattttgaattcagctgcttcctacaatgtaaaaactgcttatagaaagtatctctatggttttgaggagtactgccgttcggcaaatattcagttcagaactgttcatcaccatgaaccaaaagtaaaagaggaaaaaaaagacttagaagaatcaatggaagaggctctcaaattagatcaagaaatgcctttaacagaagtgaagagtgaacctgaggaaaatatcgattcaaacagtgaaagtgaaagagaagagatagaattaaaatctccgaggggacgaaggagaattgctcgagatgtaaattctattaaaaaggaaattgaagaagagaaaacagaagacaaattaaaagataatgatacagaaaataaggatgtagatgatgactatgaaactgcagagaaaaaagaaaatgagctactactggggagaaaaaatacaccaaagcaaaaagagaagaaaattaaaaaacaggaggattctgacaaagactcagatgaagaggaagagaaaagccaagagagggaagaaactgaaagcaaatgtgactctgaaggagaggaagatgaggaagacatggaaccctgcctaacaggaaccaaagtgaaagtaaaatatggacgagggaagactcagaaaatttatgaagccagtattaaaagcactgaaattgatgacggagaagttttatatttggtacattactatggatggaatgtcaggtatgatgagtgggtgaaggctgacaggataatctggcctttggacaaaggtggaccaaagaaaaaacagaagaaaaaagctaaaaataaagaagatagtgaaaaggacgaaaagagagatgaggagaggcagaagtcaaaacggggacgacctcctttaaaatcaaccctctcatcaaacatgccgtatggcttatctaagacagcaaacagtgaaggaaaatcagactcttgttcatctgatagtgaaacagaagatgctttagaaaagaatttaataaatgaagaactttctcttaaagatgaactagaaaaaaatgaaaatttgaatgatgataagctagatgaagaaaatccaaagatttctgcacatatattaaaagaaaatgataggactcaaatgcagcctttagaaaccctgaagttagaagttggagagaatgaacaaatagtacagatttttgggaacaaaatggaaaaaacagaagaagttaagaaagaagccgaaaaatctccaaaaggaaagggaagacgaagcaagacaaaagatctttctttagaaattataaagatttcatcatttggccagaatgaagcaggaagtgaacctcatatagaagctcatagtcttgaattgtcttcattagacaataaaaacttttcttctgctacagaagatgaaattgaccaatgtgtgaaagaaaagaagttgaaacggaaaatactaggacaatcatcgccagagaaaaaaataagaattgagaatggaatggaaatgacaaatactgtatctcaagaaaggaccagtgattgtattggatctgagggaatgaaaaacttaaattttgaacagcactttgaaagagaaaatgaaggaatgccatcattgatagcagagtcaaaccaatgcatccaacaactgactagtgaaagatttgatagtccagctgaagaaactgtaaatattccactaaaagaagatgaggatgcaatgcctctgatcgggcctgaaaccttggtttgccatgaagtagatttggatgatttggatgaaaaggataagaccagcattgaggatgtagcagttgaaagctctgagtctaactctcttgtttctattccacctgccctacctcctgtagtccaacataacttttcagtagcttcaccacttactcttagtcaagatgagtctcgaagcgtaaaaagtgagagtgatataacgattgaagttgatagtattgctgaagaatctcaagaaggtctctgtgagagggaatcggcaaatggatttgaaactaatgttgcctctggtacctgtagtataattgtacaagagagagagagcagagagaagggtcagaagaggccaagtgatggaaatagtggattaatggcaaaaaagcaaaagcgtaccccaaagcgaacaagtgctgcagccaaaaatgaaaagaatggaacaggacaaagcagtgatagtgaagatcttcctgtcctagacaattcaaatgaattagataatatgaacagtacagagagaatctcatttctccaagaaaaactacaggaaatcagaaaatattatatgtctttgaagtctgaagttgcaaccatagacaggaggagaaaaagattaaaaaagaaagacagggaagtgtctcatgcgggagcctccatgtcatctgcttcatcagacactggaatgagtccctcatcatcatctcccccacaaaatgtacttgctgtagaatgcaggtagtaatgaactagtccgtaacttgaaagtatttcgatttcttggctttatatatcttgtggaaaggacgaaaagaaactcttctagtagcaagc

SEQ ID NO: 1533 - DNA, 3782 bp, Homo sapiens
  source 1..3782: mol_type = genomic DNA
accgccaccatgaaggcccttgatgagcctccctatttgacagtgggcactgatgtgagtgctaaatacagaggagccttttgtgaagccaagatcaagacagcaaaaagacttgtcaaagtcaaggtgacatttagacatgattcttcaacagtggaagttcaggatgaccacataaagggcccactaaaggtaggagctattgtggaagtgaagaatcttgatggtgcatatcaggaagctgttatcaataaactaacagatgcgagttggtacactgtagtttttgatgacggagatgagaagacactgagacgatcttcactgtgcctgaaaggagagaggcattttgctgaaagtgaaacattagaccagctcccactcaccaaccctgagcattttggcactccagtcataggaaagaaaacaaatagaggaagaagatctaatcatataccagaggaagagtcttcatcatcctccagtgatgaagatgaggatgataggaaacagattgatgagctactaggcaaagttgtatgtgtagattacattagtttggataaaaagaaagcactgtggtttcctgcattggtggtttgtcctgattgtagtgatgagattgctgtaaaaaaggacaatattcttgttcgatctttcaaagatggaaaatttacttcagttccaagaaaagatgtccatgaaattactagtgacactgcaccaaagcctgatgctgttttaaagcaagcctttgaacaggcacttgaatttcacaaaagtagaactattcctgctaactggaagactgaattgaaagaagatagctctagcagtgaagcagaggaagaagaggaggaggaagatgatgaaaaagaaaaggaggataatagcagtgaagaagaagaagaaatagaaccatttccagaagaaagggagaactttcttcagcaattgtacaaatttatggaagatagaggtacacctattaacaaacgacctgtacttggatatcgaaatttgaatctctttaagttattcagacttgtacacaaacttggaggatttgataatattgaaagtggagctgtttggaaacaagtctaccaagatcttggaatccctgtcttaaattcagctgcaggatacaatgttaaatgtgcttataaaaaatacttatatggttttgaggagtactgtagatcagccaacattgaatttcagatggcattgccagagaaagttgttaacaagcaatgtaaggagtgtgaaaatgtaaaagaaataaaagttaaggaggaaaatgaaacagagatcaaagaaataaagatggaggaggagaggaatataataccaagagaagaaaagcctattgaggatgaaattgaaagaaaagaaaatattaagccctctctgggaagtaaaaagaatttattagaatctatacctacacattctgatcaggaaaaagaagttaacattaaaaaaccagaagacaatgaaaatctggatgacaaagatgatgacacaactagggtagatgaatccctcaacataaaggtagaagctgaggaagaaaaagcaaaatctggatacgatgaatggattaaagcagataaaatagtaagacctgctgataaaaatgtgccaaagataaaacatcggaagaaaataaagaataaattagacaaagaaaaagacaaagatgaaaaatactctccaaaaaactgtaaacttcggcgcttgtccaaaccaccatttcagacaaatccatctcctgaaatggtatccaaactggatctcactgatgccaaaaactctgatactgctcatattaagtccatagaaattacttcgatccttaatggacttcaagcttctgaaagttctgctgaagacagtgagcaggaagatgagagaggtgctcaagacatggataataatggcaaagaggaatctaagattgatcatttgaccaacaacagaaatgatcttatttcaaaggaggaacagaacagttcatctttgctagaagaaaacaaagttcatgcagatttggtaatatccaaaccagtgtcaaaatctccagaaagattaaggaaagatatagaagtattatccgaagatactgattatgaagaagatgaagtcacaaaaaagagaaaggatgtcaagaaggacacaacagataaatcttcaaaaccacaaataaaacgtggtaaaagaaggtattgcaatacagaagagtgtctaaaaactggatcacctggcaaaaaggaagagaaggccaagaacaaagaatcactttgcatggaaaacagtagcaacagctcttcagatgaagatgaagaagaaacaaaagcaaagatgacaccaactaagaaatacaatggtttggaggaaaaaagaaaatctctacggacaactggtttctattcaggattttcagaagtggcagaaaaaaggattaaacttttaaataactctgatgaaagacttcaaaacagcagggccaaagatcgaaaagatgtctggtcaagtattcagggacagtggcctaaaaaaacgctgaaagagcttttttcagactctgatactgaggctgcagcttccccaccgcatcctgccccagaggagggggtggcagaggagtcactgcagactgtggctgaagaggagagttgttcacccagtgtagaactagaaaaaccacctccagtcaatgtcgatagtaaacccattgaagaaaaaacagtagaggtcaatgacagaaaagcagaatttccaagtagtggcagtaattcagtgctaaatacccctcctactacacctgaatcgccttcatcagtcactgtaacagaaggcagccggcagcagtcttctgtaacagtatcagaaccactggctccaaaccaagaagaggttcgaagtatcaagagtgaaactgatagcacaattgaggtggatagtgttgctggggagctccaagacctccagtctgaagggaatagctcgccagcaggttttgatgccagtgtgagctcaagcagtagtaatcagccagaaccagaacatcctgaaaaagcctgtacaggtcagaaaagagtgaaagatgctcagggaggaggaagttcatcaaaaaagcagaaaagaagccataaagcaacagtggtaaacaacaaaaagaagggaaaaggcacaaatagtagtgatagtgaagaactttcagctggtgaaagtataactaagagtcagccagtcaaatcagtttccactggaatgaagtctcatagtaccaaatctcccgcaaggacgcagtctccaggaaaatgtggaaagaatggtgataaggatcctgatctcaaggaacccagtaatcgattacccaaagtttacaaatggagttttcagatgtcggacctggaaaatatgacaagtgccgaacgcatcacaattcttcaagaaaaacttcaagaaatcagaaaacattatctgtcattaaaatctgaagtagcttccattgatcggaggagaaagcgtttaaagaagaaagagagagaaagtgctgctacatcctcatcctcctcttcaccttcatccagttccataacagctgctgttatgttaactttagctgaaccgtcaatgtccagcgcatcacaaaatggaatgtcagttgagtgcaggtagtaatgaactagtccgtaacttgaaagtatttcgatttcttggctttatatatcttgtggaaaggacgatatgtacattgaccgctactatga

SEQ ID NO: 1534 - DNA, 4040 bp, Homo sapiens
  source 1..4040: mol_type = genomic DNA
accgccaccatgaaggcccttgatgagcctccctatttgacagtgggcactgatgtgagtgctaaatacagaggagccttttgtgaagccaagatcaagacagcaaaaagacttgtcaaagtcaaggtgacatttagacatgattcttcaacagtggaagttcaggatgaccacataaagggcccactaaaggtaggagctattgtggaagtgaagaatcttgatggtgcatatcaggaagctgttatcaataaactaacagatgcgagttggtacactgtagtttttgatgacggagatgagaagacactgagacgatcttcactgtgcctgaaaggagagaggcattttgctgaaagtgaaacattagaccagctcccactcaccaaccctgagcattttggcactccagtcataggaaagaaaacaaatagaggaagaagatctaatcatataccagaggaagagtcttcatcatcctccagtgatgaagatgaggatgataggaaacagattgatgagctactaggcaaagttgtatgtgtagattacattagtttggataaaaagaaagcactgtggtttcctgcattggtggtttgtcctgattgtagtgatgagattgctgtaaaaaaggacaatattcttgttcgatctttcaaagatggaaaatttacttcagttccaagaaaagatgtccatgaaattactagtgacactgcaccaaagcctgatgctgttttaaagcaagcctttgaacaggcacttgaatttcacaaaagtagaactattcctgctaactggaagactgaattgaaagaagatagctctagcagtgaagcagaggaagaagaggaggaggaagatgatgaaaaagaaaaggaggataatagcagtgaagaagaagaagaaatagaaccatttccagaagaaagggagaactttcttcagcaattgtacaaatttatggaagatagaggtacacctattaacaaacgacctgtacttggatatcgaaatttgaatctctttaagttattcagacttgtacacaaacttggaggatttgataatattgaaagtggagctgtttggaaacaagtctaccaagatcttggaatccctgtcttaaattcagctgcaggatacaatgttaaatgtgcttataaaaaatacttatatggttttgaggagtactgtagatcagccaacattgaatttcagatggcattgccagagaaagttgttaacaagcaatgtaaggagtgtgaaaatgtaaaagaaataaaagttaaggaggaaaatgaaacagagatcaaagaaataaagatggaggaggagaggaatataataccaagagaagaaaagcctattgaggatgaaattgaaagaaaagaaaatattaagccctctctgggaagtaaaaagaatttattagaatctatacctacacattctgatcaggaaaaagaagttaacattaaaaaaccagaagacaatgaaaatctggatgacaaagatgatgacacaactagggtagatgaatccctcaacataaaggtagaagctgaggaagaaaaagcaaaatctggagatgaaacgaataaagaagaagatgaagatgatgaagaagcagaagaggaggaggaggaggaagaagaagaagaggatgaagatgatgatgacaacaatgaggaagaggagtttgagtgctatccaccaggcatgaaagtccaagtgcggtatggacgagggaaaaatcaaaaaatgtatgaagctagtattaaagattctgatgtcgaaggtggagaggtcctttacttggtgcattactgcggatggaatgtgagatacgatgaatggattaaagcagataaaatagtaagacctgctgataaaaatgtgccaaagataaaacatcggaagaaaataaagaataaattagacaaagaaaaagacaaagatgaaaaatactctccaaaaaactgtaaacttcggcgcttgtccaaaccaccatttcagacaaatccatctcctgaaatggtatccaaactggatctcactgatgccaaaaactctgatactgctcatattaagtccatagaaattacttcgatccttaatggacttcaagcttctgaaagttctgctgaagacagtgagcaggaagatgagagaggtgctcaagacatggataataatggcaaagaggaatctaagattgatcatttgaccaacaacagaaatgatcttatttcaaaggaggaacagaacagttcatctttgctagaagaaaacaaagttcatgcagatttggtaatatccaaaccagtgtcaaaatctccagaaagattaaggaaagatatagaagtattatccgaagatactgattatgaagaagatgaagtcacaaaaaagagaaaggatgtcaagaaggacacaacagataaatcttcaaaaccacaaataaaacgtggtaaaagaaggtattgcaatacagaagagtgtctaaaaactggatcacctggcaaaaaggaagagaaggccaagaacaaagaatcactttgcatggaaaacagtagcaacagctcttcagatgaagatgaagaagaaacaaaagcaaagatgacaccaactaagaaatacaatggtttggaggaaaaaagaaaatctctacggacaactggtttctattcaggattttcagaagtggcagaaaaaaggattaaacttttaaataactctgatgaaagacttcaaaacagcagggccaaagatcgaaaagatgtctggtcaagtattcagggacagtggcctaaaaaaacgctgaaagagcttttttcagactctgatactgaggctgcagcttccccaccgcatcctgccccagaggagggggtggcagaggagtcactgcagactgtggctgaagaggagagttgttcacccagtgtagaactagaaaaaccacctccagtcaatgtcgatagtaaacccattgaagaaaaaacagtagaggtcaatgacagaaaagcagaatttccaagtagtggcagtaattcagtgctaaatacccctcctactacacctgaatcgccttcatcagtcactgtaacagaaggcagccggcagcagtcttctgtaacagtatcagaaccactggctccaaaccaagaagaggttcgaagtatcaagagtgaaactgatagcacaattgaggtggatagtgttgctggggagctccaagacctccagtctgaagggaatagctcgccagcaggttttgatgccagtgtgagctcaagcagtagtaatcagccagaaccagaacatcctgaaaaagcctgtacaggtcagaaaagagtgaaagatgctcagggaggaggaagttcatcaaaaaagcagaaaagaagccataaagcaacagtggtaaacaacaaaaagaagggaaaaggcacaaatagtagtgatagtgaagaactttcagctggtgaaagtataactaagagtcagccagtcaaatcagtttccactggaatgaagtctcatagtaccaaatctcccgcaaggacgcagtctccaggaaaatgtggaaagaatggtgataaggatcctgatctcaaggaacccagtaatcgattacccaaagtttacaaatggagttttcagatgtcggacctggaaaatatgacaagtgccgaacgcatcacaattcttcaagaaaaacttcaagaaatcagaaaacattatctgtcattaaaatctgaagtagcttccattgatcggaggagaaagcgtttaaagaagaaagagagagaaagtgctgctacatcctcatcctcctcttcaccttcatccagttccataacagctgctgttatgttaactttagctgaaccgtcaatgtccagcgcatcacaaaatggaatgtcagttgagtgcaggtagtaatgaactagtccgtaacttgaaagtatttcgatttcttggctttatatatcttgtggaaaggacgaagtttagagtattaaccgcatgta

SEQ ID NO: 1535 - DNA, 590 bp, Homo sapiens
  source 1..590: mol_type = genomic DNA
accgccaccatgaacaaggaagttaaagacaatcaggaaatgaaatcaaggatattggtgattaaggctgcagaagacagtgcgttgcagtatatgaacttcatgaatgtcatctttgcagcacagaaacagaatattttgattgatgcctgtgttttagactccgactcagggctcctccaacaggcttgtgacatcacgggaggactgtacctgaaggtgcctcagatgccttctcttctgcagtatttgctgtgggtgtttcttcccgatcaagatcagagatctcagttaatcctcccacccccagttcatgttgactacagggctgcttgcttctgtcatcgaaatctcattgaaattggttatgtctgttctgtgtgtttgtcaatattctgcaatttcagccccatttgtactacgtgcgagacagcctttaaaatttctctgcctccagtgctgaaagccaagaaaaagaaactgaaagtgtctgcctagtaatgaactagtccgtaacttgaaagtatttcgatttcttggctttatatatcttgtggaaaggacgagataaactcccgggtttctccacc

SEQ ID NO: 1536 - DNA, 905 bp, Homo sapiens
  source 1..905: mol_type = genomic DNA
accgccaccatggtgctgggaaattcgcatttattcatgaatcgttccaacaaacttgctgtgatagcaagtcacattcaagaaagccgattcttatatcctggaaagaatggcagacttggagacttcttcggagaccctggcaaccctcctgaatttaatccctctgggagtaaagatggaaaatacgaacttttaacctcagcaaatgaagttattgttgaagagattaaagatctaatgaccaaaagtgacataaagggtcaacatacagaaactttgctggcaggatccctggccaaagccctttgctacattcatagaatgaacaaggaagttaaagacaatcaggaaatgaaatcaaggatattggtgattaaggctgcagaagacagtgcgttgcagtatatgaacttcatgaatgtcatctttgcagcacagaaacagaatattttgattgatgcctgtgttttagactccgactcagggctcctccaacaggcttgtgacatcacgggaggactgtacctgaaggtgcctcagatgccttctcttctgcagtatttgctgtgggtgtttcttcccgatcaagatcagagatctcagttaatcctcccacccccagttcatgttgactacagggctgcttgcttctgtcatcgaaatctcattgaaattggttatgtctgttctgtgtgtttgtcaatattctgcaatttcagccccatttgtactacgtgcgagacagcctttaaaatttctctgcctccagtgctgaaagccaagaaaaagaaactgaaagtgtctgcctagtaatgaactagtccgtaacttgaaagtatttcgatttcttggctttatatatcttgtggaaaggacgaggagaagtcgtttagcggcctaca

SEQ ID NO: 1537 - DNA, 1511 bp, Homo sapiens
  source 1..1511: mol_type = genomic DNA
accgccaccatggtgaattactcctatgatgaagatctggaagagctttgtcccgtgtgtggagataaagtgtctgggtaccattatgggctcctcacctgtgaaagctgcaagggattttttaagcgaacagtccaaaataataaaaggtacacatgtatagaaaaccagaactgccaaattgacaaaacacagagaaagcgttgtccttactgtcgttttcaaaaatgtctaagtgttggaatgaagctagaagctgtaagggccgaccgaatgcgtggaggaaggaataagtttgggccaatgtacaagagagacagggccctgaagcaacagaaaaaagccctcatccgagccaatggacttaagctagaagccatgtctcaggtgatccaagctatgccctctgacctgaccatttcctctgcaattcaaaacatccactctgcctccaaaggcctacctctgaaccatgctgccttgcctcctacagactatgacagaagtccctttgtaacatcccccattagcatgacaatgccccctcacggcagcctgcaaggttaccaaacatatggccactttcctagccgggccatcaagtctgagtacccagacccctataccagctcacccgagtccataatgggctattcatatatggatagttaccagacgagctctccagcaagcatcccacatctgatactggaacttttgaagtgtgagccagatgagcctcaagtccaggctaaaatcatggcctatttgcagcaagagcaggctaaccgaagcaagcacgaaaagctgagcacctttgggcttatgtgcaaaatggcagatcaaactctcttctccattgtcgagtgggccaggagtagtatcttcttcagagaacttaaggttgatgaccaaatgaagctgcttcagaactgctggagtgagctcttaatcctcgaccacatttaccgacaagtggtacatggaaaggaaggatccatcttcctggttactgggcaacaagtggactattccataatagcatcacaagccggagccaccctcaacaacctcatgagtcatgcacaggagttagtggcaaaacttcgttctctccagtttgatcaacgagagttcgtatgtctgaaattcttggtgctctttagtttagatgtcaaaaaccttgaaaacttccagctggtagaaggtgtccaggaacaagtcaatgccgccctgctggactacacaatgtgtaactacccgcagcagacagagaaatttggacagctacttcttcgactacccgaaatccgggccatcagtatgcaggctgaagaatacctctactacaagcacctgaacggggatgtgccctataataaccttctcattgaaatgttgcatgccaaaagagcatagtaatgaactagtccgtaacttgaaagtatttcgatttcttggctttatatatcttgtggaaaggacgacaatcaaggcggtcgcctcgtttg

SEQ ID NO: 1538 - DNA, 1727 bp, Homo sapiens
  source 1..1727: mol_type = genomic DNA
accgccaccatgtcttctaattcagatactggggatttacaagagtctttaaagcacggacttacacctattggtgctgggcttccggaccgacacggatcccccatccccgcccgcggtcgccttgtcatgctgcccaaagtggagacggaagccctgggactggctcgatcgcatggggaacagggccagatgccggaaaacatgcaagtgtctcaatttaaaatggtgaattactcctatgatgaagatctggaagagctttgtcccgtgtgtggagataaagtgtctgggtaccattatgggctcctcacctgtgaaagctgcaagggattttttaagcgaacagtccaaaataataaaaggtacacatgtatagaaaaccagaactgccaaattgacaaaacacagagaaagcgttgtccttactgtcgttttcaaaaatgtctaagtgttggaatgaagctagaagctgtaagggccgaccgaatgcgtggaggaaggaataagtttgggccaatgtacaagagagacagggccctgaagcaacagaaaaaagccctcatccgagccaatggacttaagctagaagccatgtctcaggtgatccaagctatgccctctgacctgaccatttcctctgcaattcaaaacatccactctgcctccaaaggcctacctctgaaccatgctgccttgcctcctacagactatgacagaagtccctttgtaacatcccccattagcatgacaatgccccctcacggcagcctgcaaggttaccaaacatatggccactttcctagccgggccatcaagtctgagtacccagacccctataccagctcacccgagtccataatgggctattcatatatggatagttaccagacgagctctccagcaagcatcccacatctgatactggaacttttgaagtgtgagccagatgagcctcaagtccaggctaaaatcatggcctatttgcagcaagagcaggctaaccgaagcaagcacgaaaagctgagcacctttgggcttatgtgcaaaatggcagatcaaactctcttctccattgtcgagtgggccaggagtagtatcttcttcagagaacttaaggttgatgaccaaatgaagctgcttcagaactgctggagtgagctcttaatcctcgaccacatttaccgacaagtggtacatggaaaggaaggatccatcttcctggttactgggcaacaagtggactattccataatagcatcacaagccggagccaccctcaacaacctcatgagtcatgcacaggagttagtggcaaaacttcgttctctccagtttgatcaacgagagttcgtatgtctgaaattcttggtgctctttagtttagatgtcaaaaaccttgaaaacttccagctggtagaaggtgtccaggaacaagtcaatgccgccctgctggactacacaatgtgtaactacccgcagcagacagagaaatttggacagctacttcttcgactacccgaaatccgggccatcagtatgcaggctgaagaatacctctactacaagcacctgaacggggatgtgccctataataaccttctcattgaaatgttgcatgccaaaagagcatagtaatgaactagtccgtaacttgaaagtatttcgatttcttggctttatatatcttgtggaaaggacgagaacggccgttgcgtggtctgctg

SEQ ID NO: 1539 - DNA, 608 bp, Homo sapiens
  source 1..608: mol_type = genomic DNA
accgccaccatgaaactgtccgtcctaccccctcgctccctcctcgccccctacaccgtgttgtgctgcccaccagactcggagaagccgcggctgtccccggaaccctccgagcggcgccctcaggcccccgccaaaaagctccgcaagccgaggaccatctactccagcctgcagctgcagcacctaaaccagcgtttccagcacacgcagtacctggcgctgcccgagagggcccagctggcagcgcagctcggcctcacccagacccaggtaaagatctggtttcagaacaaacgctccaagtataagaagctcctgaagcagaattctggggggcaggaaggggacttccctgggaggaccttctctgtgtctccctgctccccacccctcccctccctctgggatctacccaaggcagggaccctgcccaccagtggctatggcaacagctttggagcctggtatcagcatcactcctcagatgtcctggcttcgcctcagatgatgtagtaatgaactagtccgtaacttgaaagtatttcgatttcttggctttatatatcttgtggaaaggacgacgtcatttgataagatgaagtcac

SEQ ID NO: 1540 - DNA, 983 bp, Homo sapiens
  source 1..983: mol_type = genomic DNA
accgccaccatgatgaccatgactacgatggctgacggcttggaaggccaggactcgtccaaatccgccttcatggagttcgggcagcagcagcagcagcagcagcaacagcagcagcagcagcagcagcaacagcaacagccgccgccgccgccgccgccgccgccgcagccgcactcgcagcagagctccccggccatggcaggcgcgcactaccctctgcactgcctgcactcggcggcggcggcggcagcggccggctcgcaccaccaccaccaccaccagcaccaccaccacggctcgccctacgcgtcgggcggagggaactcctacaaccaccgctcgctcgccgcctacccctacatgagccactcgcagcacagcccttacctccagtcctaccacaacagcagcgcagccgcccagacgcgaggggacgacacagatcaacaaaaaactacagtgattgaaaacggggaaatcaggttcaatggaaaagggaaaaagattcggaagcctcggaccatttattccagcctgcagctccaggctttaaaccatcgctttcagcagacacagtatctggcccttccagagagagccgaactggcagcttccttaggactgacacaaacacaggtgaagatatggtttcagaacaaacgctctaagtttaagaaactgctgaagcagggcagtaatcctcatgagagcgaccccctccagggctcggcggccctgtcgccacgctcgccagcgctgcctccagtctgggacgtttctgcctcggccaagggtgtcagtatgccccccaacagctacatgcctggctattctcactggtactcctctccacaccaggacacgatgcagagaccacagatgatgtagtaatgaactagtccgtaacttgaaagtatttcgatttcttggctttatatatcttgtggaaaggacgagtgctctttggagacacgctcaat

SEQ ID NO: 1541 - DNA, 869 bp, Homo sapiens
  source 1..869: mol_type = genomic DNA
accgccaccatgaccatgaccaccatgccagaaagtctcaacagccccgtgtcgggcaaggcggtgtttatggagtttgggccgcccaaccagcaaatgtctccttctcccatgtcccacgggcactactccatgcactgtttacactcggcgggccattcgcagcccgacggcgcctacagctcagcctcgtccttctcccgaccgctgggctacccctacgtcaactcggtcagcagccacgcatccagcccctacatcagttcggtgcagtcctacccgggcagcgccagcctcgcccagagccgcctggaggacccaggggcggactcggagaagagcacggtggtggaaggcggtgaagtgcgcttcaatggcaagggaaaaaagatccgtaaacccaggacgatttattccagtttgcagttgcaggctttgaaccggaggttccagcaaactcagtacctagctctgccggagagggcggagctcgcggcctctttgggactcacacagactcaggtcaagatctggttccaaaacaagcgatccaagttcaagaagctgatgaagcagggtggggcggctctggagggtagtgcgttggccaacggtcgggccctgtctgctggctccccacccgtgccgcccggctggaaccctaactcttcatccgggaagggctcaggaggaaacgcgggctcctatatccccagctacacatcgtggtacccttcagcgcaccaagaagctatgcagcaaccccaacttatgtagtaatgaactagtccgtaacttgaaagtatttcgatttcttggctttatatatcttgtggaaaggacgataccctctgagttcgcagaaaggt

SEQ ID NO: 1542 - DNA, 491 bp, Homo sapiens
  source 1..491: mol_type = genomic DNA
accgccaccatgaccatgaccaccatgccagaaagtctcaacagccccgtgtcgggcaaggcggtgtttatggagtttgggccgcccaaccagcaaatgtctccttctcccatgtcccacgggcactactccatgcactgtttacactcggcgggccattcgcagcccgacggcgcctacagctcagcctcgtccttctcccgaccgctgggctacccctacgtcaactcggtcagcagccacgcatccagcccctacatcagttcggtgcagtcctacccgggcagcgccagcctcgcccagagccgcctggaggacccaggtcaagatctggttccaaaacaagcgatccaagttcaagaagctgatgaagcagggtggggcggctctggagggtagtaatgaactagtccgtaacttgaaagtatttcgatttcttggctttatatatcttgtggaaaggacgagttgaaagccacgaacgaattata

SEQ ID NO: 1543 - DNA, 1088 bp, Homo sapiens
  source 1..1088: mol_type = genomic DNA
accgccaccatgactggagtctttgacagtctagtggctgatatgcactcgacccagatcgccgcctccagcacgtaccaccagcaccagcagcccccgagcggcggcggcgccggcccgggtggcaacagcagcagcagcagcagcctccacaagccccaggagtcgcccacccttccggtgtccaccgccaccgacagcagctactacaccaaccagcagcacccggcgggcggcggcggcggcgggggctcgccctacgcgcacatgggttcctaccagtaccaagccagcggcctcaacaacgtcccttactccgccaagagcagctatgacctgggctacaccgccgcctacacctcctacgctccctatggaaccagttcgtccccagccaacaacgagcctgagaaggaggaccttgagcctgaaattcggatagtgaacgggaagccaaagaaagtccggaaaccccgcaccatctactccagtttccagctggcggctcttcagcggcgtttccaaaagactcaatacttggccttgccggagcgagccgagctggcggcctctctgggcctcacccagactcaggtcaaaatctggttccagaaccgccggtccaagttcaagaagatgtggaaaagtggtgagatcccctcggagcagcaccctggggccagcgcttctccaccttgtgcttcgccgccagtctcagcgccggcctcctgggactttggtgtgccgcagcggatggcgggcggcggtggtccgggcagtggcggcagcggcgccggcagctcgggctccagcccgagcagcgcggcctcggcttttctgggcaactacccctggtaccaccagacctcgggatccgcctcacacctgcaggccacggcgccgctgctgcaccccactcagaccccgcagccgcatcaccaccaccaccatcacggcggcgggggcgccccggtgagcgcggggacgattttctagtaatgaactagtccgtaacttgaaagtatttcgatttcttggctttatatatcttgtggaaaggacgaccttgataaggaaatagcggtggc

SEQ ID NO: 1544 - DNA, 1058 bp, Homo sapiens
  source 1..1058: mol_type = genomic DNA
accgccaccatgacccttgatcatcagatcatcaatccaactcttaaatggtcacaacctgcagtgccaagtggtgggcctcttgtgcagcatgcacacacaactctggacagtgatgctggcctcacagaaaacccactcaccaagttactagctattgggaaagaagatgacaatgcacaatggcatttatctggaagtattttggatgtgtatagcggtgaacaaggaatttcaccaattaacatggggcttacaagtgcttcttgtccaagtagtctaccaatgaaaagagaaattacagaaactgacactagagctttagcaaaagagagacaaaaaaaggacaaccacaacctcattgaaagaagaagaaggtataatattaattaccgaatcaaggagcttggcactcttattccaaagtctaatgatcctgatatgcgctggaacaaaggaaccattctaaaagcatcagtggagtacatcaagtggctacaaaaagaacaacagagagcccgagaattggaacacagacagaagaaattagagcaggctaacaggcgacttctacttcggattcaggaactagaaattcaggctcgtactcatggtctgccaaccctggcttcacttggcacggttgatttaggtgctcatgtcaccaaacagcagagccatcctgagcagaattcagtagactattgccaacaactgactgtgtctcaggggccaagccctgagctctgtgatcaagctatagccttttctgatcctttgtcatacttcacagatttatcatttagtgctgcattgaaagaggaacaaagattggatggcatgctattggatgacacaatctctccatttggaacagatcctctgctatctgccacttcccctgcagtttccaaagaaagcagtaggagaagtagctttagctcagatgatggtgatgaattatagtaatgaactagtccgtaacttgaaagtatttcgatttcttggctttatatatcttgtggaaaggacgaggcggcaactgatagtgccaatcg

SEQ ID NO: 1545 - DNA, 1145 bp, Homo sapiens
  source 1..1145: mol_type = genomic DNA
accgccaccatgacccttgatcatcagatcatcaatccaactcttaaatggtcacaacctgcagtgccaagtggtgggcctcttgtgcagcatgcacacacaactctggacagtgatgctggcctcacagaaaacccactcaccaagttactagctattgggaaagaagatgacaatgcacaatggcatatggaggacgttattgaggatataatcggtatggaatcaagttttaaagaggaaggagcagactctcctctgctaatgcaaagaacattatctggaagtattttggatgtgtatagcggtgaacaaggaatttcaccaattaacatggggcttacaagtgcttcttgtccaagtagtctaccaatgaaaagagaaattacagaaactgacactagagctttagcaaaagagagacaaaaaaaggacaaccacaacctcattgaaagaagaagaaggtataatattaattaccgaatcaaggagcttggcactcttattccaaagtctaatgatcctgatatgcgctggaacaaaggaaccattctaaaagcatcagtggagtacatcaagtggctacaaaaagaacaacagagagcccgagaattggaacacagacagaagaaattagagcaggctaacaggcgacttctacttcggattcaggaactagaaattcaggctcgtactcatggtctgccaaccctggcttcacttggcacggttgatttaggtgctcatgtcaccaaacagcagagccatcctgagcagaattcagtagactattgccaacaactgactgtgtctcaggggccaagccctgagctctgtgatcaagctatagccttttctgatcctttgtcatacttcacagatttatcatttagtgctgcattgaaagaggaacaaagattggatggcatgctattggatgacacaatctctccatttggaacagatcctctgctatctgccacttcccctgcagtttccaaagaaagcagtaggagaagtagctttagctcagatgatggtgatgaattatagtaatgaactagtccgtaacttgaaagtatttcgatttcttggctttatatatcttgtggaaaggacgatgggtttgcatttgtcgccgacct

SEQ ID NO: 1546 - DNA, 944 bp, Homo sapiens
  source 1..944: mol_type = genomic DNA
accgccaccatgatgaaggagaaagagaaaaccattgctattgtgaaggttatagacacttcaaagttaaaactgttatctggaagtattttggatgtgtatagcggtgaacaaggaatttcaccaattaacatggggcttacaagtgcttcttgtccaagtagtctaccaatgaaaagagaaattacagaaactgacactagagctttagcaaaagagagacaaaaaaaggacaaccacaacctcattgaaagaagaagaaggtataatattaattaccgaatcaaggagcttggcactcttattccaaagtctaatgatcctgatatgcgctggaacaaaggaaccattctaaaagcatcagtggagtacatcaagtggctacaaaaagaacaacagagagcccgagaattggaacacagacagaagaaattagagcaggctaacaggcgacttctacttcggattcaggaactagaaattcaggctcgtactcatggtctgccaaccctggcttcacttggcacggttgatttaggtgctcatgtcaccaaacagcagagccatcctgagcagaattcagtagactattgccaacaactgactgtgtctcaggggccaagccctgagctctgtgatcaagctatagccttttctgatcctttgtcatacttcacagatttatcatttagtgctgcattgaaagaggaacaaagattggatggcatgctattggatgacacaatctctccatttggaacagatcctctgctatctgccacttcccctgcagtttccaaagaaagcagtaggagaagtagctttagctcagatgatggtgatgaattatagtaatgaactagtccgtaacttgaaagtatttcgatttcttggctttatatatcttgtggaaaggacgaataagcaaccagcccttcgtggca

SEQ ID NO: 1547 - DNA, 1277 bp, Homo sapiens
  source 1..1277: mol_type = genomic DNA
accgccaccatggcgtcacgcatagggttgcgcatgcagctcatgcgggagcaggcgcagcaggaggagcagcgggagcgcatgcagcaacaggctgtcatgcattacatgcagcagcagcagcagcagcaacagcagcagctcggagggccgcccaccccggccatcaatacccccgtccacttccagtcgccaccacctgtgcctggggaggtgttgaagttggatgatgtcattgacaacattatgcgtctggacgatgtccttggctacatcaatcctgaaatgcagatgcccaacacgctacccctgtccagcagccacctgaatgtgtacagcagcgacccccaggtcacagcctccctggtgggcgtcaccagcagctcctgccctgcggacctgacccagaagcgagagctcacagatgctgagagcagggccctggccaaggagcggcagaagaaagacaatcacaacttaattgaaaggagacgaaggttcaacatcaatgaccgcatcaaggagttgggaatgctgatccccaaggccaatgacctggacgtgcgctggaacaagggcaccatcctcaaggcctctgtggattacatccggaggatgcagaaggacctgcaaaagtccagggagctggagaaccactctcgccgcctggagatgaccaacaagcagctctggctccgtatccaggagctggagatgcaggctcgagtgcacggcctccctaccacctccccgtccggcatgaacatggctgagctggcccagcaggtggtgaagcaggagctgcctagcgaagagggcccaggggaggccctgatgctgggggctgaggtccctgaccctgagccactgccagctctgcccccgcaagccccgctgcccctgcccacccagccaccatccccattccatcacctggacttcagccacagcctgagctttgggggcagggaggacgagggtcccccgggctaccccgaacccctggcgccggggcatggctccccattccccagcctgtccaagaaggatctggacctcatgctcctggacgactcactgctaccgctggcctctgatccacttctgtccaccatgtcccccgaggcctccaaggccagcagccgccggagcagcttcagcatggaggagggcgatgtgctgtagtaatgaactagtccgtaacttgaaagtatttcgatttcttggctttatatatcttgtggaaaggacgacacgtaagctcaatggattacgct

SEQ ID NO: 1548 - DNA, 1574 bp, Homo sapiens
  source 1..1574: mol_type = genomic DNA
accgccaccatgacagcaagctcaggctgggagccagcgccggcagccaccatggcgtcacgcatagggttgcgcatgcagctcatgcgggagcaggcgcagcaggaggagcagcgggagcgcatgcagcaacaggctgtcatgcattacatgcagcagcagcagcagcagcaacagcagcagctcggagggccgcccaccccggccatcaatacccccgtccacttccagtcgccaccacctgtgcctggggaggtgttgaaggtgcagtcctacctggagaatcccacatcctaccatctgcagcagtcgcagcatcagaaggtgcgggagtacctgtccgagacctatgggaacaagtttgctgcccacatcagcccagcccagggctctccgaaacccccaccagccgcctccccaggggtgcgagctggacacgtgctgtcctcctccgctggcaacagtgctcccaatagccccatggccatgctgcacattggctccaaccctgagagggagttggatgatgtcattgacaacattatgcgtctggacgatgtccttggctacatcaatcctgaaatgcagatgcccaacacgctacccctgtccagcagccacctgaatgtgtacagcagcgacccccaggtcacagcctccctggtgggcgtcaccagcagctcctgccctgcggacctgacccagaagcgagagctcacagatgctgagagcagggccctggccaaggagcggcagaagaaagacaatcacaacttaattgaaaggagacgaaggttcaacatcaatgaccgcatcaaggagttgggaatgctgatccccaaggccaatgacctggacgtgcgctggaacaagggcaccatcctcaaggcctctgtggattacatccggaggatgcagaaggacctgcaaaagtccagggagctggagaaccactctcgccgcctggagatgaccaacaagcagctctggctccgtatccaggagctggagatgcaggctcgagtgcacggcctccctaccacctccccgtccggcatgaacatggctgagctggcccagcaggtggtgaagcaggagctgcctagcgaagagggcccaggggaggccctgatgctgggggctgaggtccctgaccctgagccactgccagctctgcccccgcaagccccgctgcccctgcccacccagccaccatccccattccatcacctggacttcagccacagcctgagctttgggggcagggaggacgagggtcccccgggctaccccgaacccctggcgccggggcatggctccccattccccagcctgtccaagaaggatctggacctcatgctcctggacgactcactgctaccgctggcctctgatccacttctgtccaccatgtcccccgaggcctccaaggccagcagccgccggagcagcttcagcatggaggagggcgatgtgctgtagtaatgaactagtccgtaacttgaaagtatttcgatttcttggctttatatatcttgtggaaaggacgacaggtcaggaccttcctcctacat

SEQ ID NO: 1549 - DNA, 1250 bp, Homo sapiens
  source 1..1250: mol_type = genomic DNA
accgccaccatgctggacggcctaaagatggaggagaacttccaaagcgcgatcgacacctcggcctccttctcctcgctgctgggcagagcggtgagccccaagtctgtctgcgagggctgtcagcgggtcatcttggacaggtttctgctgcggctcaacgacagcttctggcatgagcagtgcgtgcagtgcgcctcctgcaaagagcccctggagaccacctgcttctaccgggacaagaagctgtactgcaagtatgactacgagaagctgtttgctgttaaatgtgggggctgcttcgaggccatcgctcccaatgagtttgttatgcgggcccagaagagtgtataccacctgagctgcttctgctgctgtgtctgcgagcgacagcttcagaagggtgatgagtttgtcctgaaggaggggcagctgctctgcaaaggggactatgagaaggagcgggagctgctcagcctggtgagcccagcagcctcagactcaggtaaaagtgatgatgaagaaagtctctgcaagtcagcccatggggcagggaaaggaactgctgaggaaggcaaggaccataagcgccccaaacgtccgagaaccatcttgacaactcaacagaggcgagcattcaaggcctcatttgaagtatcctccaagccctgcaggaaggtgagagagactctggctgcagagacagggctgagtgtccgtgtcgtccaggtgtggttccaaaaccagagagcgaagatgaagaagctggccaggcgacagcagcagcagcagcaagatcagcagaacacccagaggctgagctctgctcagacaaacggtggtgggagtgctgggatggaaggaatcatgaacccctacacggctctgcccaccccacagcagctcctggccatcgagcagagtgtctacagctcagatcccttccgacagggtctcaccccaccccagatgcctggagaccacatgcacccttatggtgccgagccccttttccatgacctggatagcgacgacacctccctcagtaacctgggtgattgtttcctagcaacctcagaagctgggcctctgcagtccagagtgggaaaccccattgaccatctgtactccatgcagaattcttacttcacatcttagtaatgaactagtccgtaacttgaaagtatttcgatttcttggctttatatatcttgtggaaaggacgaatgacctcggcgttctgtccacac

SEQ ID NO: 1550 - DNA, 1310 bp, Homo sapiens
  source 1..1310: mol_type = genomic DNA
accgccaccatggatatagcaacaggtcccgagtcgctggagaggtgcttccctcgcgggcagacggactgcgccaagatgttggacggcatcaagatggaggagcacgccctgcgccccgggcccgccactctgggggtgctgctgggctccgactgcccgcatcccgccgtctgcgagggctgccagcggcccatctccgaccgcttcctgatgcgagtcaacgagtcgtcctggcacgaggagtgtttgcagtgcgcggcgtgtcagcaagccctcaccaccagctgctacttccgggatcggaaactgtactgcaaacaagactaccaacagctcttcgcggccaagtgcagcggctgcatggagaagatcgcccccaccgagttcgtgatgcgggcgctggagtgcgtgtaccacctgggctgcttctgctgctgcgtgtgtgaacggcagctacgcaagggcgacgaattcgtgctcaaggagggccagctgctgtgcaagggtgactacgagaaggagaaggacctgctcagctccgtgagccccgacgagtccgactccgtgaagagcgaggatgaagatggggacatgaagccggccaaggggcagggcagtcagagcaagggcagcggggatgacgggaaggacccgcggaggcccaagcgaccccggaccatcctcaccacgcagcagcgaagagccttcaaggcctccttcgaggtctcgtcgaagccttgccgaaaggtccgagagacactggcagctgagacgggcctcagtgtgcgcgtggtccaggtctggtttcagaaccaaagagcaaagatgaagaagctggcgcggcggcaccagcagcagcaggagcagcagaactcccagcggctgggccaggaggtcctgtccagccgcatggagggcatgatggcttcctacacgccgctggccccaccacagcagcagatcgtggccatggaacagagcccctacggcagcagcgaccccttccagcagggcctcacgccgccccaaatgccaggtgaccacatgaacccctatgggaacgactccatcttccatgacatcgacagcgatacctccttaaccagcctcagcgactgcttcctcggctcctcagacgtgggctccctgcaggcccgcgtggggaaccccatcgaccggctctactccatgcagagttcctacttcgcctcctagtaatgaactagtccgtaacttgaaagtatttcgatttcttggctttatatatcttgtggaaaggacgatagagacggtgccgcacggcgtta

SEQ ID NO: 1551 - DNA, 1322 bp, Homo sapiens
  source 1..1322: mol_type = genomic DNA
accgccaccatggatatagcaacaggtcccgagtcgctggagaggtgcttccctcgcgggcagacggactgcgccaagatgttggacggcatcaagatggaggagcacgccctgcgccccgggcccgccactctgggggtgctgctgggctccgactgcccgcatcccgccgtctgcgagggctgccagcggcccatctccgaccgcttcctgatgcgagtcaacgagtcgtcctggcacgaggagtgtttgcagtgcgcggcgtgtcagcaagccctcaccaccagctgctacttccgggatcggaaactgtactgcaaacaagactaccaacagctcttcgcggccaagtgcagcggctgcatggagaagatcgcccccaccgagttcgtgatgcgggcgctggagtgcgtgtaccacctgggctgcttctgctgctgcgtgtgtgaacggcagctacgcaagggcgacgaattcgtgctcaaggagggccagctgctgtgcaagggtgactacgagaaggagaaggacctgctcagctccgtgagccccgacgagtccgactccgtgaagagcgaggatgaagatggggacatgaagccggccaaggggcagggcagtcagagcaagggcagcggggatgacgggaaggacccgcggaggcccaagcgaccccggaccatcctcaccacgcagcagcgaagagccttcaaggcctccttcgaggtctcgtcgaagccttgccgaaaggtccgagagacactggcagctgagacgggcctcagtgtgcgcgtggtccaggtctggtttcagaaccaaagagcaaagatgaagaagctggcgcggcggcaccagcagcagcaggagcagcagaactcccagcggctgggccagggtgagccggggccggggcagggcctgggccaggaggtcctgtccagccgcatggagggcatgatggcttcctacacgccgctggccccaccacagcagcagatcgtggccatggaacagagcccctacggcagcagcgaccccttccagcagggcctcacgccgccccaaatgccagggaacgactccatcttccatgacatcgacagcgatacctccttaaccagcctcagcgactgcttcctcggctcctcagacgtgggctccctgcaggcccgcgtggggaaccccatcgaccggctctactccatgcagagttcctacttcgcctcctagtaatgaactagtccgtaacttgaaagtatttcgatttcttggctttatatatcttgtggaaaggacgacactcgtgaggagcctaaggattc

SEQ ID NO: 1552 - DNA, 1289 bp, Homo sapiens
  source 1..1289: mol_type = genomic DNA
accgccaccatggatatagcaacaggtcccgagtcgctggagaggtgcttccctcgcgggcagacggactgcgccaagatgttggacggcatcaagatggaggagcacgccctgcgccccgggcccgccactctgggggtgctgctgggctccgactgcccgcatcccgccgtctgcgagggctgccagcggcccatctccgaccgcttcctgatgcgagtcaacgagtcgtcctggcacgaggagtgtttgcagtgcgcggcgtgtcagcaagccctcaccaccagctgctacttccgggatcggaaactgtactgcaaacaagactaccaacagctcttcgcggccaagtgcagcggctgcatggagaagatcgcccccaccgagttcgtgatgcgggcgctggagtgcgtgtaccacctgggctgcttctgctgctgcgtgtgtgaacggcagctacgcaagggcgacgaattcgtgctcaaggagggccagctgctgtgcaagggtgactacgagaaggagaaggacctgctcagctccgtgagccccgacgagtccgactccgtgaagagcgaggatgaagatggggacatgaagccggccaaggggcagggcagtcagagcaagggcagcggggatgacgggaaggacccgcggaggcccaagcgaccccggaccatcctcaccacgcagcagcgaagagccttcaaggcctccttcgaggtctcgtcgaagccttgccgaaaggtccgagagacactggcagctgagacgggcctcagtgtgcgcgtggtccaggtctggtttcagaaccaaagagcaaagatgaagaagctggcgcggcggcaccagcagcagcaggagcagcagaactcccagcggctgggccaggaggtcctgtccagccgcatggagggcatgatggcttcctacacgccgctggccccaccacagcagcagatcgtggccatggaacagagcccctacggcagcagcgaccccttccagcagggcctcacgccgccccaaatgccagggaacgactccatcttccatgacatcgacagcgatacctccttaaccagcctcagcgactgcttcctcggctcctcagacgtgggctccctgcaggcccgcgtggggaaccccatcgaccggctctactccatgcagagttcctacttcgcctcctagtaatgaactagtccgtaacttgaaagtatttcgatttcttggctttatatatcttgtggaaaggacgacaaatgatatccgcgtaaagggcc

SEQ ID NO: 1553 - DNA, 2573 bp, Homo sapiens
  source 1..2573: mol_type = genomic DNA
accgccaccatggagctgtggcgccaatgcacccactggctcatccagtgccgggtgctgccgcccagccaccgcgtgacctgggatggggctcaggtgtgtgaactggcccaggccctccgggatggtgtccttctgtgtcagctgcttaacaacctgctaccccatgccatcaacctgcgtgaggtcaacctgcgcccccagatgtcccagttcctgtgccttaagaacattagaaccttcctgtccacctgctgtgagaagttcggcctcaagcggagcgagctcttcgaagcctttgacctcttcgatgtgcaggattttggcaaggtcatctacaccctgtctgctctgtcctggaccccgatcgcccagaacagggggatcatgcccttccccaccgaggaggagagtgtaggtgatgaagacatctacagtggcctgtccgaccagatcgacgacacggtggaggaggatgaggacctgtatgactgcgtggagaatgaggaggcggaaggcgacgagatctatgaggacctcatgcgctcggagcccgtgtccatgccgcccaagatgacagagtatgacaagcgctgctgctgcctgcgggagatccagcagacggaggagaagtacactgacacgctgggctccatccagcagcatttcttgaagcccctgcaacggttcctgaaacctcaagacattgagatcatctttatcaacattgaggacctgcttcgtgttcatactcacttcctaaaggagatgaaggaagccctgggcacccctggcgcagccaatctctaccaggtcttcatcaaatacaaggagaggttcctcgtctatggccgctactgcagccaggtggagtcagccagcaaacacctggaccgtgtggccgcagcccgggaggacgtgcagatgaagctggaggaatgttctcagagagccaacaacgggaggttcaccctgcgggacctgctgatggtgcctatgcagcgagttctcaaatatcacctccttctccaggagctggtgaaacacacgcaggaggcgatggagaaggagaacctgcggctggccctggatgccatgagggacctggctcagtgcgtgaacgaggtcaagcgagacaacgagacactgcgacagatcaccaatttccagctgtccattgagaacctggaccagtctctggctcactatggccggcccaagatcgacggggaactcaagatcacctcggtggaacggcgctccaagatggacaggtatgccttcctgctcgacaaagctctactcatctgtaagcgcaggggagactcctatgacctcaaggactttgtaaacctgcacagcttccaggttcgggatgactcttcaggagaccgagacaacaagaagtggagccacatgttcctcctgatcgaggaccaaggtgcccagggctatgagctgttcttcaagacaagagaattgaagaagaagtggatggagcagtttgagatggccatctccaacatctatccggagaatgccaccgccaacgggcatgacttccagatgttctcctttgaggagaccacatcctgcaaggcctgtcagatgctgcttagaggtaccttctatcagggctaccgctgccatcggtgccgggcatctgcacacaaggagtgtctggggagggtccctccatgtggccgacatgggcaagatttcccaggaactatgaagaaggacaaactacatcgcagggctcaggacaaaaagaggaatgagctgggtctgcccaagatggaggtgtttcaggaatactacgggcttcctccaccccctggagccattggaccctttctacggctcaaccctggagacattgtggagctcacgaaggctgaggctgaacagaactggtgggagggccctcctcaggacctgtctgttcatctctggtacgcaggccccatggagcgggcaggggcagagagcatcctggccaaccgctcggacgggactttcttggtgcggcagagggtgaaggatgcagcagaatttgccatcagcattaaatataacgtcgaggtcaagcacattaaaatcatgacagcagaaggactgtaccggatcacagagaaaaaggctttccgggggcttacggagctggtggagttttaccagcagaactctctaaaggattgcttcaagtctctggacaccaccttgcagttccccttcaaggagcctgaaaagagaaccatcagcaggccagcagtgggaagcacaaagtattttggcacagccaaagcccgctatgacttctgcgcccgagaccgatcagagctgtcgctcaaggagggtgacatcatcaagatccttaacaagaagggacagcaaggctggtggcgaggggagatctatggccgggttggctggttccctgccaactacgtggaggaagattattctgaatactgctagtaatgaactagtccgtaacttgaaagtatttcgatttcttggctttatatatcttgtggaaaggacgagggtccgcaacccagggtaggaag

SEQ ID NO: 1554 - DNA, 2543 bp, Homo sapiens
  source 1..2543: mol_type = genomic DNA
accgccaccatggagctgtggcgccaatgcacccactggctcatccagtgccgggtgctgccgcccagccaccgcgtgacctgggatggggctcaggtgtgtgaactggcccaggccctccgggatggtgtccttctgtgtcagctgcttaacaacctgctaccccatgccatcaacctgcgtgaggtcaacctgcgcccccagatgtcccagttcctgtgccttaagaacattagaaccttcctgtccacctgctgtgagaagttcggcctcaagcggagcgagctcttcgaagcctttgacctcttcgatgtgcaggattttggcaaggtcatctacaccctgtctgctctgtcctggaccccgatcgcccagaacagggggatcatgcccttccccaccgaggaggagagtgtaggtgatgaagacatctacagtggcctgtccgaccagatcgacgacacggtggaggaggatgaggacctgtatgactgcgtggagaatgaggaggcggaaggcgacgagatctatgaggacctcatgcgctcggagcccgtgtccatgccgcatttcttgaagcccctgcaacggttcctgaaacctcaagacattgagatcatctttatcaacattgaggacctgcttcgtgttcatactcacttcctaaaggagatgaaggaagccctgggcacccctggcgcagccaatctctaccaggtcttcatcaaatacaaggagaggttcctcgtctatggccgctactgcagccaggtggagtcagccagcaaacacctggaccgtgtggccgcagcccgggaggacgtgcagatgaagctggaggaatgttctcagagagccaacaacgggaggttcaccctgcgggacctgctgatggtgcctatgcagcgagttctcaaatatcacctccttctccaggagctggtgaaacacacgcaggaggcgatggagaaggagaacctgcggctggccctggatgccatgagggacctggctcagtgcgtgaacgaggtcaagcgagacaacgagacactgcgacagatcaccaatttccagctgtccattgagaacctggaccagtctctggctcactatggccggcccaagatcgacggggaactcaagatcacctcggtggaacggcgctccaagatggacaggtatgccttcctgctcgacaaagctctactcatctgtaagcgcaggggagactcctatgacctcaaggactttgtaaacctgcacagcttccaggttcgggatgactcttcaggagaccgagacaacaagaagtggagccacatgttcctcctgatcgaggaccaaggtgcccagggctatgagctgttcttcaagacaagagaattgaagaagaagtggatggagcagtttgagatggccatctccaacatctatccggagaatgccaccgccaacgggcatgacttccagatgttctcctttgaggagaccacatcctgcaaggcctgtcagatgctgcttagaggtaccttctatcagggctaccgctgccatcggtgccgggcatctgcacacaaggagtgtctggggagggtccctccatgtggccgacatgggcaagatttcccaggaactatgaagaaggacaaactacatcgcagggctcaggacaaaaagaggaatgagctgggtctgcccaagatggaggtgtttcaggaatactacgggcttcctccaccccctggagccattggaccctttctacggctcaaccctggagacattgtggagctcacgaaggctgaggctgaacagaactggtgggagggcagaaatacatctactaatgaaattggctggtttccttgtaacagggtgaagccctatgtccatggccctcctcaggacctgtctgttcatctctggtacgcaggccccatggagcgggcaggggcagagagcatcctggccaaccgctcggacgggactttcttggtgcggcagagggtgaaggatgcagcagaatttgccatcagcattaaatataacgtcgaggtcaagcacattaaaatcatgacagcagaaggactgtaccggatcacagagaaaaaggctttccgggggcttacggagctggtggagttttaccagcagaactctctaaaggattgcttcaagtctctggacaccaccttgcagttccccttcaaggagcctgaaaagagaaccatcagcaggccagcagtgggaagcacaaagtattttggcacagccaaagcccgctatgacttctgcgcccgagaccgatcagagctgtcgctcaaggagggtgacatcatcaagatccttaacaagaagggacagcaaggctggtggcgaggggagatctatggccgggttggctggttccctgccaactacgtggaggaagattattctgaatactgctagtaatgaactagtccgtaacttgaaagtatttcgatttcttggctttatatatcttgtggaaaggacgacgctactacgcgcacttggactca

SEQ ID NO: 1555 - DNA, 2639 bp, Homo sapiens
  source 1..2639: mol_type = genomic DNA
accgccaccatggagctgtggcgccaatgcacccactggctcatccagtgccgggtgctgccgcccagccaccgcgtgacctgggatggggctcaggtgtgtgaactggcccaggccctccgggatggtgtccttctgtgtcagctgcttaacaacctgctaccccatgccatcaacctgcgtgaggtcaacctgcgcccccagatgtcccagttcctgtgccttaagaacattagaaccttcctgtccacctgctgtgagaagttcggcctcaagcggagcgagctcttcgaagcctttgacctcttcgatgtgcaggattttggcaaggtcatctacaccctgtctgctctgtcctggaccccgatcgcccagaacagggggatcatgcccttccccaccgaggaggagagtgtaggtgatgaagacatctacagtggcctgtccgaccagatcgacgacacggtggaggaggatgaggacctgtatgactgcgtggagaatgaggaggcggaaggcgacgagatctatgaggacctcatgcgctcggagcccgtgtccatgccgcccaagatgacagagtatgacaagcgctgctgctgcctgcgggagatccagcagacggaggagaagtacactgacacgctgggctccatccagcagcatttcttgaagcccctgcaacggttcctgaaacctcaagacattgagatcatctttatcaacattgaggacctgcttcgtgttcatactcacttcctaaaggagatgaaggaagccctgggcacccctggcgcagccaatctctaccaggtcttcatcaaatacaaggagaggttcctcgtctatggccgctactgcagccaggtggagtcagccagcaaacacctggaccgtgtggccgcagcccgggaggacgtgcagatgaagctggaggaatgttctcagagagccaacaacgggaggttcaccctgcgggacctgctgatggtgcctatgcagcgagttctcaaatatcacctccttctccaggagctggtgaaacacacgcaggaggcgatggagaaggagaacctgcggctggccctggatgccatgagggacctggctcagtgcgtgaacgaggtcaagcgagacaacgagacactgcgacagatcaccaatttccagctgtccattgagaacctggaccagtctctggctcactatggccggcccaagatcgacggggaactcaagatcacctcggtggaacggcgctccaagatggacaggtatgccttcctgctcgacaaagctctactcatctgtaagcgcaggggagactcctatgacctcaaggactttgtaaacctgcacagcttccaggttcgggatgactcttcaggagaccgagacaacaagaagtggagccacatgttcctcctgatcgaggaccaaggtgcccagggctatgagctgttcttcaagacaagagaattgaagaagaagtggatggagcagtttgagatggccatctccaacatctatccggagaatgccaccgccaacgggcatgacttccagatgttctcctttgaggagaccacatcctgcaaggcctgtcagatgctgcttagaggtaccttctatcagggctaccgctgccatcggtgccgggcatctgcacacaaggagtgtctggggagggtccctccatgtggccgacatgggcaagatttcccaggaactatgaagaaggacaaactacatcgcagggctcaggacaaaaagaggaatgagctgggtctgcccaagatggaggtgtttcaggaatactacgggcttcctccaccccctggagccattggaccctttctacggctcaaccctggagacattgtggagctcacgaaggctgaggctgaacagaactggtgggagggcagaaatacatctactaatgaaattggctggtttccttgtaacagggtgaagccctatgtccatggccctcctcaggacctgtctgttcatctctggtacgcaggccccatggagcgggcaggggcagagagcatcctggccaaccgctcggacgggactttcttggtgcggcagagggtgaaggatgcagcagaatttgccatcagcattaaatataacgtcgaggtcaagcacattaaaatcatgacagcagaaggactgtaccggatcacagagaaaaaggctttccgggggcttacggagctggtggagttttaccagcagaactctctaaaggattgcttcaagtctctggacaccaccttgcagttccccttcaaggagcctgaaaagagaaccatcagcaggccagcagtgggaagcacaaagtattttggcacagccaaagcccgctatgacttctgcgcccgagaccgatcagagctgtcgctcaaggagggtgacatcatcaagatccttaacaagaagggacagcaaggctggtggcgaggggagatctatggccgggttggctggttccctgccaactacgtggaggaagattattctgaatactgctagtaatgaactagtccgtaacttgaaagtatttcgatttcttggctttatatatcttgtggaaaggacgatgaaattcatgcggaacgtggtgc

SEQ ID NO: 1556 - DNA, 914 bp, Homo sapiens
  source 1..914: mol_type = genomic DNA
accgccaccatgtgtgagcgcagtctctacagagcgggctatgtgggctcgcttctgaatctgcagtcgccagactctttctacttctccaacctgaggccgaatggcggccagttggccgcgcttccccctatctcctacccgcgcggcgcgctgccctgggccgccacgcccgcctcctgcgcccccgcgcagcctgcgggcgccactgccttcggcggcttctcgcagccctacctggctggctccgggcctctcggcctgcagcccccaacagccaaagacggacccgaagagcaggctaagttctatgcgcccgaagcggccgctgggccagaggagcgcggtcgtacccggccgtccttcgcccccgagtctagcctggctcctgcagtggctgctctcaaagcggccaagtatgactacgctggtgtgggtcgtgccacgccgggctccacgaccctgctccagggggctccctgcgcccctggcttcaaggacgacaccaagggcccgctcaacttgaacatgacagtgcaggcggcgggcgttgcctcttgcctgcgaccttcactgcccgacggcctgccgtggggggcggccccggggagggcccgcaagaagcggaaaccctacacgaagcagcagattgcggagttggagaacgaattcctcgtcaacgaattcatcaacaggcagaaacgcaaggaattgtccaataggctgaacctcagcgaccagcaagtcaaaatctggttccagaacaggcgtatgaagaagaagcgcgtggtgcttcgggagcaggcgctggcgctctactagtaatgaactagtccgtaacttgaaagtatttcgatttcttggctttatatatcttgtggaaaggacgacagcgagctcgagttgtagatctt

SEQ ID NO: 1557 - DNA, 1133 bp, Homo sapiens
  source 1..1133: mol_type = genomic DNA
accgccaccatgagccgcgccgggagctgggacatggacgggctgcgggcagacggcgggggcgccggtggcgccccggcctcttcctcctcctcatcggtggcggcggcggcggcgtcaggccagtgccgcggctttctctccgcgcctgtgttcgccgggacgcattcggggcgggcggcggcggcggcagcggcggctgcggcggcggcggcggcagcctccggctttgcgtaccccgggacctctgagcgcacgggctcttcctcgtcgtcgtcctcttctgccgttgtagcggcgcgcccggaggctcccccagccaaagagtgcccagcacccacgcctgcagcggccgctgcagcgcccccgagcgctccagcgctgggctacggctaccacttcggcaacggctactacagctgccgtatgtcgcacggcgtgggcttacagcagaatgcgctcaagtcatcgccgcacgcctcgctgggaggctttcccgtggagaagtacatggacgtgtcaggcctggcgagcagcagcgtaccggccaacgaggtgccagcgcgagccaaggaggtatccttctaccagggctatacgagcccttaccagcacgtgcccggctatatcgacatggtgtccactttcggctccggggagcctcggcacgaggcctacatctccatggaggggtaccagtcctggacgctggctaacgggtggaacagccaggtgtactgcaccaaggaccagccacaggggtcccacttttggaaatcttcctttccaggggatgtggctctaaatcagccggacatgtgcgtctaccgaagagggaggaagaagagagtgccttacaccaaactgcagcttaaagaactggagaacgagtatgccattaacaaattcattaacaaggacaagcggcggcgtatctcggctgctacgaacctatctgagagacaagtgaccatttggtttcagaaccgaagagtgaaggacaagaaaattgtctccaagctcaaagatactgtctcctagtaatgaactagtccgtaacttgaaagtatttcgatttcttggctttatatatcttgtggaaaggacgatttcctcctcggtcgcatatatgt

SEQ ID NO: 1558 - DNA, 1118 bp, Homo sapiens
  source 1..1118: mol_type = genomic DNA
accgccaccatgaacgactttgacgagtgcggccagagcgcagccagcatgtacctgccgggctgcgcctactatgtggccccgtctgacttcgctagcaagccttcgttcctttcccaaccgtcgtcctgccagatgactttcccctactcttccaacctggctccgcacgtccagcccgtgcgcgaagtggccttccgcgactacggcctggagcgcgccaagtggccgtaccgcggcggcggcggcggcggcagcgcggggggcggcagcagcgggggcggccccggcgggggcggcggcggcgcggggggctacgctccctactacgcggcggcggcggcggcggctgcggcggccgcggcggccgaggaggcggccatgcaacgcgagcttctcccgcccgcgggccgccggccggacgtgctcttcaaggcgcctgagccggtgtgcgctgcgccggggccgccgcacggccccgcgggcgccgcctccaacttctacagcgcggtgggccgcaatggcatcttgccacagggcttcgaccagttctacgaggcagcgcccgggcccccgttcgccgggccgcagcccccgccgccacccgcgccgccacagcccgagggcgcagccgacaagggcgaccccaggaccggggctggtggcggcgggggcagtccctgcaccaaggcgacccctggctcggagcccaagggggcagcagaaggcagcggtggcgacggcgagggccccccgggagaggcgggggccgagaagagcagcagcgcagttgccccccagcggtcccggaaaaagcgctgtccctataccaagtaccagatccgcgaactggaacgcgagtttttctttaacgtgtacataaacaaagagaaaagacttcaactctctcggatgctcaacctcactgaccggcaagtcaaaatctggttccagaatcgcaggatgaaagaaaagaaactgaacagagaccgtctgcagtatttcactggaaaccccttattttagtaatgaactagtccgtaacttgaaagtatttcgatttcttggctttatatatcttgtggaaaggacgatagagatagcctccaaagtccttg

SEQ ID NO: 1559 - DNA, 1832 bp, Homo sapiens
  source 1..1832: mol_type = genomic DNA
accgccaccatggatgtgaggttctaccccgcggcggccggggaccctgccagcctggacttcgcgcagtgcctggggtactacggctacagcaagtttggaaataataataactatatgaatatggctgaggcgaacaatgcgttcttcgctgccagtgagcagacattccacacaccaagccttggggacgaggaattcgaaattccaccaatcacgcctcctccagagtcagaccctgccctaggcatgccggatgtactgctaccctttcaagccctcagcgatccattgccttcccagggaagtgaattcacaccccagtttccccctcaaagcctggacctcccttccattacaatctcaagaaatctcgtggaacaagatggcgtgcttcatagcagtgggttgcatatggatcagagccacacacaagtgtcccagtaccggcaggatccctccctgatcatgcggtccatcgtccacatgaccgatgctgcgcgttctggggtcatgcctcctgcccagctcaccaccatcaaccagtctcagctcagcgcccagttggggttgaatttgggaggtgccagtatgcctcacacatctccttcacctccagcaagcaaatcagccactccctccccttccagctccatcaatgaagaggatgctgatgaagccaacagagccattggagagaaaagagctgctccagactctggcaagaagcccaagactccaaagaaaaagaaaaagaaagatcccaatgagccacagaagccagtgtcagcatatgccctgtttttcagagacacacaggctgcaattaaaggtcaaaaccccaatgcaacctttggagaggtctcaaaaattgtagcatctatgtgggacagccttggagaagaacaaaagcaggtatataaaaggaaaacagaagctgccaaaaaagaatacctgaaggccctggcggcatacagggccagcctcgtttctaaggctgctgctgagtcagcagaagcccagaccatccgttctgttcagcagaccctggcgtcgaccaatctaacatcctctctccttctcaacactccactgtctcaacatggaacagtgtcagcatcacctcagactctccagcaatccctccctaggtcaatcgctcccaaacccttaaccatgagactccccatgaaccagattgtcacatcagtcaccattgcagccaacatgccctcgaacattggggctccactgataagctccatgggaacgaccatggttggctcagcaccctccacccaagtgagtccttcggtgcaaacccagcagcatcagatgcaattgcagcagcagcagcagcagcaacaacaacagatgcaacagatgcagcagcagcaactccagcagcaccaaatgcatcagcaaatccagcagcagatgcagcagcagcatttccagcaccacatgcagcagcacctgcagcagcagcagcagcatctccagcagcaaattaatcaacagcagctgcagcagcagctgcagcagcgcctccagctgcagcagctgcaacacatgcagcaccagtctcagccttctcctcggcagcactcccctgtcgcctctcagataacatcccccatccctgccatcgggagcccccagccagcctctcagcagcaccagtcgcaaatacagtctcagacacagactcaagtattatcgcaggtcagtattttctagtaatgaactagtccgtaacttgaaagtatttcgatttcttggctttatatatcttgtggaaaggacgaggtcaacctatattgcgattactg

SEQ ID NO: 1560 - DNA, 1817 bp, Homo sapiens
  source 1..1817: mol_type = genomic DNA
accgccaccatgaagtgccaacctcgctcgggagccaggcgcattgaggagagacttcattacctgataactacctatctgaaatttggaaataataataactatatgaatatggctgaggcgaacaatgcgttcttcgctgccagtgagacattccacacaccaagccttggggacgaggaattcgaaattccaccaatcacgcctcctccagagtcagaccctgccctaggcatgccggatgtactgctaccctttcaagccctcagcgatccattgccttcccagggaagtgaattcacaccccagtttccccctcaaagcctggacctcccttccattacaatctcaagaaatctcgtggaacaagatggcgtgcttcatagcagtgggttgcatatggatcagagccacacacaagtgtcccagtaccggcaggatccctccctgatcatgcggtccatcgtccacatgaccgatgctgcgcgttctggggtcatgcctcctgcccagctcaccaccatcaaccagtctcagctcagcgcccagttggggttgaatttgggaggtgccagtatgcctcacacatctccttcacctccagcaagcaaatcagccactccctccccttccagctccatcaatgaagaggatgctgatgaagccaacagagccattggagagaaaagagctgctccagactctggcaagaagcccaagactccaaagaaaaagaaaaagaaagatcccaatgagccacagaagccagtgtcagcatatgccctgtttttcagagacacacaggctgcaattaaaggtcaaaaccccaatgcaacctttggagaggtctcaaaaattgtagcatctatgtgggacagccttggagaagaacaaaagcaggtatataaaaggaaaacagaagctgccaaaaaagaatacctgaaggccctggcggcatacagggccagcctcgtttctaaggctgctgctgagtcagcagaagcccagaccatccgttctgttcagcagaccctggcgtcgaccaatctaacatcctctctccttctcaacactccactgtctcaacatggaacagtgtcagcatcacctcagactctccagcaatccctccctaggtcaatcgctcccaaacccttaaccatgagactccccatgaaccagattgtcacatcagtcaccattgcagccaacatgccctcgaacattggggctccactgataagctccatgggaacgaccatggttggctcagcaccctccacccaagtgagtccttcggtgcaaacccagcagcatcagatgcaattgcagcagcagcagcagcagcaacaacaacagatgcaacagatgcagcagcagcaactccagcagcaccaaatgcatcagcaaatccagcagcagatgcagcagcagcatttccagcaccacatgcagcagcacctgcagcagcagcagcagcatctccagcagcaaattaatcaacagcagctgcagcagcagctgcagcagcgcctccagctgcagcagctgcaacacatgcagcaccagtctcagccttctcctcggcagcactcccctgtcgcctctcagataacatcccccatccctgccatcgggagcccccagccagcctctcagcagcaccagtcgcaaatacagtctcagacacagactcaagtattatcgcaggtcagtattttctagtaatgaactagtccgtaacttgaaagtatttcgatttcttggctttatatatcttgtggaaaggacgacgatgctaggcttatcgacaccac

SEQ ID NO: 1561 - DNA, 1622 bp, Homo sapiens
  source 1..1622: mol_type = genomic DNA
accgccaccatggacgtccgcctgtacccctcggcgcccgcggtgggcgcgcggcccggggccgagccggccggcctggcgcacctggactattaccacggcggcaagtttgatggtgacagtgcctacgtggggatgagtgacggaaacccagagctcctgtcaaccagccagacctacaacggccagagcgagaacaacgaagactatgagatccccccgataacacctcccaacctcccggagccatccctcctgcacctgggggaccacgaagccagctaccactcgctgtgccacggcctcacccccaacggtctgctccctgcctactcctatcaggccatggacctcccagccatcatggtgtccaacatgctagcacaggacagccacctgctgtcgggccagctgcccacgatccaggagatggtccactcggaagtggctgcctatgactcgggccggcccgggcccctgctgggtcgcccggcaatgctggccagccacatgagtgccctcagccagtcccagctcatctcgcagatgggcatccggagcagcatcgcccacagctccccatcaccgccggggagcaagtcagcgaccccctctccctccagctccactcaggaagaggagtcggaagtgcatttcaagatctcgggagaaaagagaccttcagccgacccaggaaaaaaggccaagaacccgaagaagaagaaaaagaaggaccccaatgagccgcagaagcctgtgtcggcctacgcactcttcttcagagacactcaggccgccatcaagggtcagaaccccagtgccactttcggtgacgtgtccaaaatcgtggcctccatgtgggacagcctgggagaggaacagaagcaggcctacaagaggaagacagaagcagcaaagaaggaatatctgaaggccctggcagcctaccgggctagcctcgtctccaagagctccccagatcaaggtgagaccaagagcactcaggcaaacccaccagccaaaatgctcccacccaagcagcccatgtatgccatgccaggcctggcctccttcctgacgccgtcggacctgcaggccttccgcagtggggcctcccctgccagcctcgcccggacgctgggctccaagtctctgctgccaggcctcagtgcgtccccgccgccgccaccctccttcccgctcagccccacactgcaccagcagctgtcactgccccctcacgcccagggcgccctcctcagtccacctgttagcatgtccccagccccccagccccctgtcctgcccacccccatggcactccaggtgcagctggcgatgagcccctcacctccagggccacaggacttcccgcacatctctgagttccccagcagctcgggatcctgctcacctggcccatccaaccccaccagcagcggggactgggacagcagctaccccagtggggagtgtggcatcagcacctgcagcctgctccccagggacaaatcgctctacctcacctagtaatgaactagtccgtaacttgaaagtatttcgatttcttggctttatatatcttgtggaaaggacgacgagagcctgtagacggagcactt

SEQ ID NO: 1562 - DNA, 1568 bp, Homo sapiens
  source 1..1568: mol_type = genomic DNA
accgccaccatgcagcagactcgcacagaggctgtcgcgggcgcgttctctcgctgcctgggcttctgtggaatgagactcgggctccttctacttgcaagacactggtgcattgcaggtgtgtttccgcagaagtttgatggtgacagtgcctacgtggggatgagtgacggaaacccagagctcctgtcaaccagccagacctacaacggccagagcgagaacaacgaagactatgagatccccccgataacacctcccaacctcccggagccatccctcctgcacctgggggaccacgaagccagctaccactcgctgtgccacggcctcacccccaacggtctgctccctgcctactcctatcaggccatggacctcccagccatcatggtgtccaacatgctagcacaggacagccacctgctgtcgggccagctgcccacgatccaggagatggtccactcggaagtggctgcctatgactcgggccggcccgggcccctgctgggtcgcccggcaatgctggccagccacatgagtgccctcagccagtcccagctcatctcgcagatgggcatccggagcagcatcgcccacagctccccatcaccgccggggagcaagtcagcgaccccctctccctccagctccactcaggaagaggagtcggaagtgcatttcaagatctcgggagaaaagagaccttcagccgacccaggaaaaaaggccaagaacccgaagaagaagaaaaagaaggaccccaatgagccgcagaagcctgtgtcggcctacgcactcttcttcagagacactcaggccgccatcaagggtcagaaccccagtgccactttcggtgacgtgtccaaaatcgtggcctccatgtgggacagcctgggagaggaacagaagcagagctccccagatcaaggtgagaccaagagcactcaggcaaacccaccagccaaaatgctcccacccaagcagcccatgtatgccatgccaggcctggcctccttcctgacgccgtcggacctgcaggccttccgcagtggggcctcccctgccagcctcgcccggacgctgggctccaagtctctgctgccaggcctcagtgcgtccccgccgccgccaccctccttcccgctcagccccacactgcaccagcagctgtcactgccccctcacgcccagggcgccctcctcagtccacctgttagcatgtccccagccccccagccccctgtcctgcccacccccatggcactccaggtgcagctggcgatgagcccctcacctccagggccacaggacttcccgcacatctctgagttccccagcagctcgggatcctgctcacctggcccatccaaccccaccagcagcggggactgggacagcagctaccccagtggggagtgtggcatcagcacctgcagcctgctccccagggacaaatcgctctacctcacctagtaatgaactagtccgtaacttgaaagtatttcgatttcttggctttatatatcttgtggaaaggacgaccagacctaagaggaatgacgctt

SEQ ID NO: 1563 - DNA, 1688 bp, Homo sapiens
  source 1..1688: mol_type = genomic DNA
accgccaccatggaggtggtgccagctgagattgctaagaagcctcgaacgccaacctctggtccagtaatcacgaagctgatctttgcaaaaccaattaatagtaaagcagttacaggacagacaactcaagtttcaccaccagttattgcaggtagggttctttcacagtctactcccggaactccatcaaagaccataacaatatctgaaagtggtgttattggatcaactttaaattctacaacacagacaccaaataaaatagccatctcacctttgaaatcgccaaataaggcagtgaaatcaactgtgcagaccatcactgttggaggagtgagcacatcacagtttaagacaattattcctctggcaactgctcccaatgtccagcagattcaagtgcctggaagcaagtttcattatgtccgacttgttactgccacatcagccagtagctcaacccagccagttagtcagaatcccagtacaaacactcagcctcttcagcaagcaaagccagtggttgttaatacaaccccagtgcggatgtcagttccaattgtctcagctcaggctgtcaaacaagttgttccaaaaccaatcaatccaacttcacaaatagtaactactagccagccacagcaacggcttatcatgcctgccacaccactgccacagatccagcccaacctcactaacctgccaccaggcactgtcctggcaccagctccgggaacagggaatgtgggttatgcagtgcttccagctcagtatgttactcagctacagcagtcttcatatgtatcaatagcaagcaactctacctttactggaacatctggtatccagacccaggcacggcttccattcaatggcataatcccatcagagtcggccagtcggccccgaaagccctgtaattgtacaaaatcactgtgtttgaaattgtattgtgattgctttgcaaatggtgaattttgcaacaactgcaattgtactaattgttacaacaatttggaacatgaaaatgaaaggcaaaaagcaataaaggcatgccttgacagaaatccagaagcctttaagcctaagatagggaaaggaaaggagggagaatctgatcgacgtcatagcaaagggtgtaattgcaaacgatcaggatgtcttaaaaactactgtgaatgctatgaggcaaaaataatgtgttcctcaatatgcaaatgtattggctgtaagaattttgaagaaagcccggaaaggaagacattgatgcatttggcagatgcagctgaagtaagggtacagcaacaaacagcagccaagacgaagttatcctctcaaatttcagacttgcttactaggccaacaccagctttaaatagtggaggcggaaaattgccatttacatttgtaactaaggaagtagctgaagccacatgtaattgcctccttgcccaggcagagcaggcagacaagaagggaaaatcaaaggcagcagcggaacggatgatacttgaggaattcggacgatgtttgatgagtgtcatcaactctgcaggaaaggcaaaaagtgacccttgtgccatgaattgctagtaatgaactagtccgtaacttgaaagtatttcgatttcttggctttatatatcttgtggaaaggacgaattatagccaatatgtttgaactc

SEQ ID NO: 1564 - DNA, 2351 bp, Homo sapiens
  source 1..2351: mol_type = genomic DNA
accgccaccatggaggtggtgccagctgaggtgaatagtttgcttccagaggaaataatggacactggtataactttagtggatgatgatagtattgaggctgttattgtttcatccccaattcccatggagacagaactggaagaaattgtcaacataaattctactggtgactctacagccacgcccatttccacggaaccaatcacagtgtacagtaaccacactaaccaagttgcagtgaataccacaattactaaagcagattctaataccacagtgaaaccagcttttccaagtggccttcaaaaacttggtgctcagactcctgtgactatatcagccaatcagattattttaaacaaagtatcacagacatctgatcttaaacttggcaatcagacccttaaaccagatggacagaagttaattttaacaactttgggcaagtctggttcaccaattgttttagcactaccccatagccaactaccccaggctcagaaagttacaactcaggcccagtcaggagatgctaagttaccaccgcagcaaattaaagtagttaccattggagggaggccagaggtgaaacctgtcattggtgtctcagcattgaccccaggaagtcaactgattaatactacaactcagccctctgtgttacagacccaacagttaaaaacagtacagattgctaagaagcctcgaacgccaacctctggtccagtaatcacgaagctgatctttgcaaaaccaattaatagtaaagcagttacaggacagacaactcaagtttcaccaccagttattgcaggtagggttctttcacagtctactcccggaactccatcaaagaccataacaatatctgaaagtggtgttattggatcaactttaaattctacaacacagacaccaaataaaatagccatctcacctttgaaatcgccaaataaggcagtgaaatcaactgtgcagaccatcactgttggaggagtgagcacatcacagtttaagacaattattcctctggcaactgctcccaatgtccagcagattcaagtgcctggaagcaagtttcattatgtccgacttgttactgccacatcagccagtagctcaacccagccagttagtcagaatcccagtacaaacactcagcctcttcagcaagcaaagccagtggttgttaatacaaccccagtgcggatgtcagttccaattgtctcagctcaggctgtcaaacaagttgttccaaaaccaatcaatccaacttcacaaatagtaactactagccagccacagcaacggcttatcatgcctgccacaccactgccacagatccagcccaacctcactaacctgccaccaggcactgtcctggcaccagctccgggaacagggaatgtgggttatgcagtgcttccagctcagtatgttactcagctacagcagtcttcatatgtatcaatagcaagcaactctacctttactggaacatctggtatccagacccaggcacggcttccattcaatggcataatcccatcagagtcggccagtcggccccgaaagccctgtaattgtacaaaatcactgtgtttgaaattgtattgtgattgctttgcaaatggtgaattttgcaacaactgcaattgtactaattgttacaacaatttggaacatgaaaatgaaaggcaaaaagcaataaaggcatgccttgacagaaatccagaagcctttaagcctaagatagggaaaggaaaggagggagaatctgatcgacgtcatagcaaagggtgtaattgcaaacgatcaggatgtcttaaaaactactgtgaatgctatgaggcaaaaataatgtgttcctcaatatgcaaatgtattggctgtaagaattttgaagaaagcccggaaaggaagacattgatgcatttggcagatgcagctgaagtaagggtacagcaacaaacagcagccaagacgaagttatcctctcaaatttcagacttgcttactaggccaacaccagctttaaatagtggaggcggaaaattgccatttacatttgtaactaaggaagtagctgaagccacatgtaattgcctccttgcccaggcagagcaggcagacaagaagggaaaatcaaaggcagcagcggaacggatgatacttgaggaattcggacgatgtttgatgagtgtcatcaactctgcaggaaaggcaaaaagtgacccttgtgccatgaattgctagtaatgaactagtccgtaacttgaaagtatttcgatttcttggctttatatatcttgtggaaaggacgagatatggatcccgttaatgcgcgg

SEQ ID NO: 1565 - DNA, 2084 bp, Homo sapiens
  source 1..2084: mol_type = genomic DNA
accgccaccatggaggtggtgccagctgaggtgaatagtttgcttccagaggaaataatggacactggtataactttagtggatgatgatagtattgaggctgttattgtttcatccccaattcccatggagacagaactggaagaaattgtcaacataaattctactggtgactctacagccacgcccatttccacggaaccaatcacagtgtacagtaaccacactaaccaagttgcagtgaataccacaattactaaagcagattctaataccacagtgaaaccagcttttccaagtggccttcaaaaacttggtgctcagactcctgtgactatatcagccaatcagattattttaaacaaagtatcacagacatctgatcttaaacttggcaatcagacccttaaaccagatggacagaagttaattttaacaactttgggcaagtctggttcaccaattgttttagcactaccccatagccaactaccccaggctcagaaagttacaactcaggcccagtcaggagatgctaagttaccaccgcagcaaattaaagtagttaccattggagggaggccagaggtgaaacctgtcattggtgtctcagcattgaccccaggaagtcaactgattaatactacaactcagccctctgtgttacagacccaacagttaaaaacagtacaggcagtgaaatcaactgtgcagaccatcactgttggaggagtgagcacatcacagtttaagacaattattcctctggcaactgctcccaatgtccagcagattcaagtgcctggaagcaagtttcattatgtccgacttgttactgccacatcagccagtagctcaacccagccagttagtcagaatcccagtacaaacactcagcctcttcagcaagcaaagccagtggttgttaatacaaccccagtgcggatgtcagttccaattgtctcagctcaggctgtcaaacaagttgttccaaaaccaatcaatccaacttcacaaatagtaactactagccagccacagcaacggcttatcatgcctgccacaccactgccacagatccagcccaacctcactaacctgccaccaggcactgtcctggcaccagctccgggaacagggaatgtgggttatgcagtgcttccagctcagtatgttactcagctacagcagtcttcatatgtatcaatagcaagcaactctacctttactggaacatctggtatccagacccaggcacggcttccattcaatggcataatcccatcagagtcggccagtcggccccgaaagccctgtaattgtacaaaatcactgtgtttgaaattgtattgtgattgctttgcaaatggtgaattttgcaacaactgcaattgtactaattgttacaacaatttggaacatgaaaatgaaaggcaaaaagcaataaaggcatgccttgacagaaatccagaagcctttaagcctaagatagggaaaggaaaggagggagaatctgatcgacgtcatagcaaagggtgtaattgcaaacgatcaggatgtcttaaaaactactgtgaatgctatgaggcaaaaataatgtgttcctcaatatgcaaatgtattggctgtaagaattttgaagaaagcccggaaaggaagacattgatgcatttggcagatgcagctgaagtaagggtacagcaacaaacagcagccaagacgaagttatcctctcaaatttcagacttgcttactaggccaacaccagctttaaatagtggaggcggaaaattgccatttacatttgtaactaaggaagtagctgaagccacatgtaattgcctccttgcccaggcagagcaggcagacaagaagggaaaatcaaaggcagcagcggaacggatgatacttgaggaattcggacgatgtttgatgagtgtcatcaactctgcaggaaaggcaaaaagtgacccttgtgccatgaattgctagtaatgaactagtccgtaacttgaaagtatttcgatttcttggctttatatatcttgtggaaaggacgattactagtgcgcagccatctaaac

SEQ ID NO: 1566 - DNA, 662 bp, Homo sapiens
  source 1..662: mol_type = genomic DNA
accgccaccatgttcgggaaaccagacaaaatggacgttcgatgccactcggacgccgaggctgcccgggtctcgaagaacgcgcacaaggagagtcgggagagcaagggcgcggaggggaacctcccagccgccttcctcaaggagccgcagggcgccttctcagcgtcgggcgctgctgaggattgtaacaaaagtaaatccaattccgcagcggacccggattactgccgccggatcctggtccgagatgccaaggggtccatccgagagatcatcctgcccaagggcctggacttggaccggcctaagaggacgcgcacgtccttcaccgcggagcagctctatcggctggagatggagttccagcgctgccagtacgtggtgggccgcgagaggaccgagctcgcccggcagcttaacctctccgagacccaggcaaatagtgaagaaaataatgaacgattcaaacgcgggataaaaaaacaaaagaagaaaaggaagaaagagccagcaaatgatgagtctcggcgtggggactccgggggcagagggtggcagcccctatagtaatgaactagtccgtaacttgaaagtatttcgatttcttggctttatatatcttgtggaaaggacgatagttaagtcgtaacgtatacaac

SEQ ID NO: 1567 - DNA, 1106 bp, Homo sapiens
  source 1..1106: mol_type = genomic DNA
accgccaccatgttcgggaaaccagacaaaatggacgttcgatgccactcggacgccgaggctgcccgggtctcgaagaacgcgcacaaggagagtcgggagagcaagggcgcggaggggaacctcccagccgccttcctcaaggagccgcagggcgccttctcagcgtcgggcgctgctgaggattgtaacaaaagtaaatccaattccgcagcggacccggattactgccgccggatcctggtccgagatgccaaggggtccatccgagagatcatcctgcccaagggcctggacttggaccggcctaagaggacgcgcacgtccttcaccgcggagcagctctatcggctggagatggagttccagcgctgccagtacgtggtgggccgcgagaggaccgagctcgcccggcagcttaacctctccgagacccaggtgaaggtctggttccagaaccggcgcaccaagcagaagaaggaccagggcaaggactcggagctacgctcggtggtgtcggagaccgcggccacgtgcagcgtgctacggctgctggagcagggccgcctgttgtcgccgcccggcctgcctgcgctgctgccgccttgcgccacgggcgctctcggctcagcgctgcgcgggcccagcttgccggccctgggcgcgggcgccgctgcaggctcggccgccgcagccgccgccgccgccccgggcccagcgggcgctgcatccccgcacccgccggctgtgggcggtgctccaggtcccgggcccgccgggccggggggattgcacgcaggcgccccggccgcgggccacagcctcttcagcctgccggtgccctcgctgctcggctccgtcgccagccgcctgtcctccgccccgttaacaatggctggttcgctagctgggaatttgcaagaactctccgcccgatatctgagctcctcggccttcgagccttactcccggaccaacaataaagaaggggccgagaaaaaagcgctggactagtaatgaactagtccgtaacttgaaagtatttcgatttcttggctttatatatcttgtggaaaggacgagctaaagaatccgagcggcaaggt

SEQ ID NO: 1568 - DNA, 1850 bp, Homo sapiens
  source 1..1850: mol_type = genomic DNA
accgccaccatgttgtacctggaaaacaatgcccagactcaatttagtgagccacagtacacgaacctggggctcctgaacagcatggaccagcagattcagaacggctcctcgtccaccagtccctataacacagaccacgcgcagaacagcgtcacggcgccctcgccctacgcacagcccagctccaccttcgatgctctctctccatcacccgccatcccctccaacaccgactacccaggcccgcacagtttcgacgtgtccttccagcagtcgagcaccgccaagtcggccacctggacgtattccactgaactgaagaaactctactgccaaattgcaaagacatgccccatccagatcaaggtgatgaccccacctcctcagggagctgttatccgcgccatgcctgtctacaaaaaagctgagcacgtcacggaggtggtgaagcggtgccccaaccatgagctgagccgtgaattcaacgagggacagattgcccctcctagtcatttgattcgagtagaggggaacagccatgcccagtatgtagaagatcccatcacaggaagacagagtgtgctggtaccttatgagccaccccaggttggcactgaattcacgacagtcttgtacaatttcatgtgtaacagcagttgtgttggagggatgaaccgccgtccaattttaatcattgttactctggaaaccagagatgggcaagtcctgggccgacgctgctttgaggcccggatctgtgcttgcccaggaagagacaggaaggcggatgaagatagcatcagaaagcagcaagtttcggacagtacaaagaacggtgatgcgtttcgtcagaacacacatggtatccagatgacatccatcaagaaacgaagatccccagatgatgaactgttatacttaccagtgaggggccgtgagacttatgaaatgctgttgaagatcaaagagtccctggaactcatgcagtaccttcctcagcacacaattgaaacgtacaggcaacagcaacagcagcagcaccagcacttacttcagaaacagacctcaatacagtctccatcttcatatggtaacagctccccacctctgaacaaaatgaacagcatgaacaagctgccttctgtgagccagcttatcaaccctcagcagcgcaacgccctcactcctacaaccattcctgatggcatgggagccaacattcccatgatgggcacccacatgccaatggctggagacatgaatggactcagccccacccaggcactccctcccccactctccatgccatccacctcccactgcacacccccacctccgtatcccacagattgcagcattgtcagtttcttagcgaggttgggctgttcatcatgtctggactatttcacgacccaggggctgaccaccatctatcagattgagcattactccatggatgatctggcaagtctgaaaatccctgagcaatttcgacatgcgatctggaagggcatcctggaccaccggcagctccacgaattctcctccccttctcatctcctgcggaccccaagcagtgcctctacagtcagtgtgggctccagtgagacccggggtgagcgtgttattgatgctgtgcgattcaccctccgccagaccatctctttcccaccccgagatgagtggaatgacttcaactttgacatggatgctcgccgcaataagcaacagcgcatcaaagaggagggggagtagtaatgaactagtccgtaacttgaaagtatttcgatttcttggctttatatatcttgtggaaaggacgatgtgcactctatattaattaggct

SEQ ID NO: 1569 - DNA, 1862 bp, Homo sapiens
  source 1..1862: mol_type = genomic DNA
accgccaccatgttgtacctggaaaacaatgcccagactcaatttagtgagccacagtacacgaacctggggctcctgaacagcatggaccagcagattcagaacggctcctcgtccaccagtccctataacacagaccacgcgcagaacagcgtcacggcgccctcgccctacgcacagcccagctccaccttcgatgctctctctccatcacccgccatcccctccaacaccgactacccaggcccgcacagtttcgacgtgtccttccagcagtcgagcaccgccaagtcggccacctggacgtattccactgaactgaagaaactctactgccaaattgcaaagacatgccccatccagatcaaggtgatgaccccacctcctcagggagctgttatccgcgccatgcctgtctacaaaaaagctgagcacgtcacggaggtggtgaagcggtgccccaaccatgagctgagccgtgaattcaacgagggacagattgcccctcctagtcatttgattcgagtagaggggaacagccatgcccagtatgtagaagatcccatcacaggaagacagagtgtgctggtaccttatgagccaccccaggttggcactgaattcacgacagtcttgtacaatttcatgtgtaacagcagttgtgttggagggatgaaccgccgtccaattttaatcattgttactctggaaaccagagatgggcaagtcctgggccgacgctgctttgaggcccggatctgtgcttgcccaggaagagacaggaaggcggatgaagatagcatcagaaagcagcaagtttcggacagtacaaagaacggtgatggtacgaagcgcccgtttcgtcagaacacacatggtatccagatgacatccatcaagaaacgaagatccccagatgatgaactgttatacttaccagtgaggggccgtgagacttatgaaatgctgttgaagatcaaagagtccctggaactcatgcagtaccttcctcagcacacaattgaaacgtacaggcaacagcaacagcagcagcaccagcacttacttcagaaacagacctcaatacagtctccatcttcatatggtaacagctccccacctctgaacaaaatgaacagcatgaacaagctgccttctgtgagccagcttatcaaccctcagcagcgcaacgccctcactcctacaaccattcctgatggcatgggagccaacattcccatgatgggcacccacatgccaatggctggagacatgaatggactcagccccacccaggcactccctcccccactctccatgccatccacctcccactgcacacccccacctccgtatcccacagattgcagcattgtcagtttcttagcgaggttgggctgttcatcatgtctggactatttcacgacccaggggctgaccaccatctatcagattgagcattactccatggatgatctggcaagtctgaaaatccctgagcaatttcgacatgcgatctggaagggcatcctggaccaccggcagctccacgaattctcctccccttctcatctcctgcggaccccaagcagtgcctctacagtcagtgtgggctccagtgagacccggggtgagcgtgttattgatgctgtgcgattcaccctccgccagaccatctctttcccaccccgagatgagtggaatgacttcaactttgacatggatgctcgccgcaataagcaacagcgcatcaaagaggagggggagtagtaatgaactagtccgtaacttgaaagtatttcgatttcttggctttatatatcttgtggaaaggacgattctagagttcgcatactagttga

SEQ ID NO: 1570 - DNA, 1769 bp, Homo sapiens
  source 1..1769: mol_type = genomic DNA
accgccaccatgaattttgaaacttcacggtgtgccaccctacagtactgccctgacccttacatccagcgtttcgtagaaaccccagctcatttctcttggaaagaaagttattaccgatccaccatgtcccagagcacacagacaaatgaattcctcagtccagaggttttccagcatatctgggattttctggaacagcctatatgttcagttcagcccattgacttgaactttgtggatgaaccatcagaagatggtgcgacaaacaagattgagattagcatggactgtatccgcatgcaggactcggacctgagtgaccccatgtggccacagtacacgaacctggggctcctgaacagcatggaccagcagattcagaacggctcctcgtccaccagtccctataacacagaccacgcgcagaacagcgtcacggcgccctcgccctacgcacagcccagctccaccttcgatgctctctctccatcacccgccatcccctccaacaccgactacccaggcccgcacagtttcgacgtgtccttccagcagtcgagcaccgccaagtcggccacctggacgtattccactgaactgaagaaactctactgccaaattgcaaagacatgccccatccagatcaaggtgatgaccccacctcctcagggagctgttatccgcgccatgcctgtctacaaaaaagctgagcacgtcacggaggtggtgaagcggtgccccaaccatgagctgagccgtgaattcaacgagggacagattgcccctcctagtcatttgattcgagtagaggggaacagccatgcccagtatgtagaagatcccatcacaggaagacagagtgtgctggtaccttatgagccaccccaggttggcactgaattcacgacagtcttgtacaatttcatgtgtaacagcagttgtgttggagggatgaaccgccgtccaattttaatcattgttactctggaaaccagagatgggcaagtcctgggccgacgctgctttgaggcccggatctgtgcttgcccaggaagagacaggaaggcggatgaagatagcatcagaaagcagcaagtttcggacagtacaaagaacggtgatggtacgaagcgcccgtttcgtcagaacacacatggtatccagatgacatccatcaagaaacgaagatccccagatgatgaactgttatacttaccagtgaggggccgtgagacttatgaaatgctgttgaagatcaaagagtccctggaactcatgcagtaccttcctcagcacacaattgaaacgtacaggcaacagcaacagcagcagcaccagcacttacttcagaaacagacctcaatacagtctccatcttcatatggtaacagctccccacctctgaacaaaatgaacagcatgaacaagctgccttctgtgagccagcttatcaaccctcagcagcgcaacgccctcactcctacaaccattcctgatggcatgggagccaacattcccatgatgggcacccacatgccaatggctggagacatgaatggactcagccccacccaggcactccctcccccactctccatgccatccacctcccactgcacacccccacctccgtatcccacagattgcagcattgtcaggatctggcaagtctagtaatgaactagtccgtaacttgaaagtatttcgatttcttggctttatatatcttgtggaaaggacgaatgcatcctcgaacagttaccaca

SEQ ID NO: 1571 - DNA, 1283 bp, Homo sapiens
  source 1..1283: mol_type = genomic DNA
accgccaccatgttgtacctggaaaacaatgcccagactcaatttagtgagccacagtacacgaacctggggctcctgaacagcatggaccagcagattcagaacggctcctcgtccaccagtccctataacacagaccacgcgcagaacagcgtcacggcgccctcgccctacgcacagcccagctccaccttcgatgctctctctccatcacccgccatcccctccaacaccgactacccaggcccgcacagtttcgacgtgtccttccagcagtcgagcaccgccaagtcggccacctggacgtattccactgaactgaagaaactctactgccaaattgcaaagacatgccccatccagatcaaggtgatgaccccacctcctcagggagctgttatccgcgccatgcctgtctacaaaaaagctgagcacgtcacggaggtggtgaagcggtgccccaaccatgagctgagccgtgaattcaacgagggacagattgcccctcctagtcatttgattcgagtagaggggaacagccatgcccagtatgtagaagatcccatcacaggaagacagagtgtgctggtaccttatgagccaccccaggttggcactgaattcacgacagtcttgtacaatttcatgtgtaacagcagttgtgttggagggatgaaccgccgtccaattttaatcattgttactctggaaaccagagatgggcaagtcctgggccgacgctgctttgaggcccggatctgtgcttgcccaggaagagacaggaaggcggatgaagatagcatcagaaagcagcaagtttcggacagtacaaagaacggtgatggtacgaagcgcccgtttcgtcagaacacacatggtatccagatgacatccatcaagaaacgaagatccccagatgatgaactgttatacttaccagtgaggggccgtgagacttatgaaatgctgttgaagatcaaagagtccctggaactcatgcagtaccttcctcagcacacaattgaaacgtacaggcaacagcaacagcagcagcaccagcacttacttcagaaacatctcctttcagcctgcttcaggaatgagcttgtggagccccggagagaaactccaaaacaatctgacgtcttctttagacattccaagcccccaaaccgatcagtgtacccatagtaatgaactagtccgtaacttgaaagtatttcgatttcttggctttatatatcttgtggaaaggacgactgaagagtgatcaattgcgacta

SEQ ID NO: 1572 - DNA, 1565 bp, Homo sapiens
  source 1..1565: mol_type = genomic DNA
accgccaccatgaattttgaaacttcacggtgtgccaccctacagtactgccctgacccttacatccagcgtttcgtagaaaccccagctcatttctcttggaaagaaagttattaccgatccaccatgtcccagagcacacagacaaatgaattcctcagtccagaggttttccagcatatctgggattttctggaacagcctatatgttcagttcagcccattgacttgaactttgtggatgaaccatcagaagatggtgcgacaaacaagattgagattagcatggactgtatccgcatgcaggactcggacctgagtgaccccatgtggccacagtacacgaacctggggctcctgaacagcatggaccagcagattcagaacggctcctcgtccaccagtccctataacacagaccacgcgcagaacagcgtcacggcgccctcgccctacgcacagcccagctccaccttcgatgctctctctccatcacccgccatcccctccaacaccgactacccaggcccgcacagtttcgacgtgtccttccagcagtcgagcaccgccaagtcggccacctggacgtattccactgaactgaagaaactctactgccaaattgcaaagacatgccccatccagatcaaggtgatgaccccacctcctcagggagctgttatccgcgccatgcctgtctacaaaaaagctgagcacgtcacggaggtggtgaagcggtgccccaaccatgagctgagccgtgaattcaacgagggacagattgcccctcctagtcatttgattcgagtagaggggaacagccatgcccagtatgtagaagatcccatcacaggaagacagagtgtgctggtaccttatgagccaccccaggttggcactgaattcacgacagtcttgtacaatttcatgtgtaacagcagttgtgttggagggatgaaccgccgtccaattttaatcattgttactctggaaaccagagatgggcaagtcctgggccgacgctgctttgaggcccggatctgtgcttgcccaggaagagacaggaaggcggatgaagatagcatcagaaagcagcaagtttcggacagtacaaagaacggtgatggtacgaagcgcccgtttcgtcagaacacacatggtatccagatgacatccatcaagaaacgaagatccccagatgatgaactgttatacttaccagtgaggggccgtgagacttatgaaatgctgttgaagatcaaagagtccctggaactcatgcagtaccttcctcagcacacaattgaaacgtacaggcaacagcaacagcagcagcaccagcacttacttcagaaacatctcctttcagcctgcttcaggaatgagcttgtggagccccggagagaaactccaaaacaatctgacgtcttctttagacattccaagcccccaaaccgatcagtgtacccatagtaatgaactagtccgtaacttgaaagtatttcgatttcttggctttatatatcttgtggaaaggacgattcttgcataactctaagggtcgt

SEQ ID NO: 1573 - DNA, 1487 bp, Homo sapiens
  source 1..1487: mol_type = genomic DNA
accgccaccatgttgtacctggaaaacaatgcccagactcaatttagtgagccacagtacacgaacctggggctcctgaacagcatggaccagcagattcagaacggctcctcgtccaccagtccctataacacagaccacgcgcagaacagcgtcacggcgccctcgccctacgcacagcccagctccaccttcgatgctctctctccatcacccgccatcccctccaacaccgactacccaggcccgcacagtttcgacgtgtccttccagcagtcgagcaccgccaagtcggccacctggacgtattccactgaactgaagaaactctactgccaaattgcaaagacatgccccatccagatcaaggtgatgaccccacctcctcagggagctgttatccgcgccatgcctgtctacaaaaaagctgagcacgtcacggaggtggtgaagcggtgccccaaccatgagctgagccgtgaattcaacgagggacagattgcccctcctagtcatttgattcgagtagaggggaacagccatgcccagtatgtagaagatcccatcacaggaagacagagtgtgctggtaccttatgagccaccccaggttggcactgaattcacgacagtcttgtacaatttcatgtgtaacagcagttgtgttggagggatgaaccgccgtccaattttaatcattgttactctggaaaccagagatgggcaagtcctgggccgacgctgctttgaggcccggatctgtgcttgcccaggaagagacaggaaggcggatgaagatagcatcagaaagcagcaagtttcggacagtacaaagaacggtgatggtacgaagcgcccgtttcgtcagaacacacatggtatccagatgacatccatcaagaaacgaagatccccagatgatgaactgttatacttaccagtgaggggccgtgagacttatgaaatgctgttgaagatcaaagagtccctggaactcatgcagtaccttcctcagcacacaattgaaacgtacaggcaacagcaacagcagcagcaccagcacttacttcagaaacagacctcaatacagtctccatcttcatatggtaacagctccccacctctgaacaaaatgaacagcatgaacaagctgccttctgtgagccagcttatcaaccctcagcagcgcaacgccctcactcctacaaccattcctgatggcatgggagccaacattcccatgatgggcacccacatgccaatggctggagacatgaatggactcagccccacccaggcactccctcccccactctccatgccatccacctcccactgcacacccccacctccgtatcccacagattgcagcattgtcaggatctggcaagtctagtaatgaactagtccgtaacttgaaagtatttcgatttcttggctttatatatcttgtggaaaggacgagtatgtttgcggtatcatcaagca

SEQ ID NO: 1574 - DNA, 2132 bp, Homo sapiens
  source 1..2132: mol_type = genomic DNA
accgccaccatgaattttgaaacttcacggtgtgccaccctacagtactgccctgacccttacatccagcgtttcgtagaaaccccagctcatttctcttggaaagaaagttattaccgatccaccatgtcccagagcacacagacaaatgaattcctcagtccagaggttttccagcatatctgggattttctggaacagcctatatgttcagttcagcccattgacttgaactttgtggatgaaccatcagaagatggtgcgacaaacaagattgagattagcatggactgtatccgcatgcaggactcggacctgagtgaccccatgtggccacagtacacgaacctggggctcctgaacagcatggaccagcagattcagaacggctcctcgtccaccagtccctataacacagaccacgcgcagaacagcgtcacggcgccctcgccctacgcacagcccagctccaccttcgatgctctctctccatcacccgccatcccctccaacaccgactacccaggcccgcacagtttcgacgtgtccttccagcagtcgagcaccgccaagtcggccacctggacgtattccactgaactgaagaaactctactgccaaattgcaaagacatgccccatccagatcaaggtgatgaccccacctcctcagggagctgttatccgcgccatgcctgtctacaaaaaagctgagcacgtcacggaggtggtgaagcggtgccccaaccatgagctgagccgtgaattcaacgagggacagattgcccctcctagtcatttgattcgagtagaggggaacagccatgcccagtatgtagaagatcccatcacaggaagacagagtgtgctggtaccttatgagccaccccaggttggcactgaattcacgacagtcttgtacaatttcatgtgtaacagcagttgtgttggagggatgaaccgccgtccaattttaatcattgttactctggaaaccagagatgggcaagtcctgggccgacgctgctttgaggcccggatctgtgcttgcccaggaagagacaggaaggcggatgaagatagcatcagaaagcagcaagtttcggacagtacaaagaacggtgatgcgtttcgtcagaacacacatggtatccagatgacatccatcaagaaacgaagatccccagatgatgaactgttatacttaccagtgaggggccgtgagacttatgaaatgctgttgaagatcaaagagtccctggaactcatgcagtaccttcctcagcacacaattgaaacgtacaggcaacagcaacagcagcagcaccagcacttacttcagaaacagacctcaatacagtctccatcttcatatggtaacagctccccacctctgaacaaaatgaacagcatgaacaagctgccttctgtgagccagcttatcaaccctcagcagcgcaacgccctcactcctacaaccattcctgatggcatgggagccaacattcccatgatgggcacccacatgccaatggctggagacatgaatggactcagccccacccaggcactccctcccccactctccatgccatccacctcccactgcacacccccacctccgtatcccacagattgcagcattgtcagtttcttagcgaggttgggctgttcatcatgtctggactatttcacgacccaggggctgaccaccatctatcagattgagcattactccatggatgatctggcaagtctgaaaatccctgagcaatttcgacatgcgatctggaagggcatcctggaccaccggcagctccacgaattctcctccccttctcatctcctgcggaccccaagcagtgcctctacagtcagtgtgggctccagtgagacccggggtgagcgtgttattgatgctgtgcgattcaccctccgccagaccatctctttcccaccccgagatgagtggaatgacttcaactttgacatggatgctcgccgcaataagcaacagcgcatcaaagaggagggggagtagtaatgaactagtccgtaacttgaaagtatttcgatttcttggctttatatatcttgtggaaaggacgaacttgcgttaaataggaaagccac

SEQ ID NO: 1575 - DNA, 1019 bp, Homo sapiens
  source 1..1019: mol_type = genomic DNA
accgccaccatgagtgtggatccagcttgtccccaaagcttgccttgctttgaagcatccgactgtaaagaatcttcacctatgcctgtgatttgtgggcctgaagaaaactatccatccttgcaaatgtcttctgctgagatgcctcacacggagactgtctctcctcttccttcctccatggatctgcttattcaggacagccctgattcttccaccagtcccaaaggcaaacaacccacttctgcagagaagagtgtcgcaaaaaaggaagacaaggtcccggtcaagaaacagaagaccagaactgtgttctcttccacccagctgtgtgtactcaatgatagatttcagagacagaaatacctcagcctccagcagatgcaagaactctccaacatcctgaacctcagctacaaacaggtgaagacctggttccagaaccagagaatgaaatctaagaggtggcagaaaaacaactggccgaagaatagcaatggtgtgacgcagaaggcctcagcacctacctaccccagcctttactcttcctaccaccagggatgcctggtgaacccgactgggaaccttccaatgtggagcaaccagacctggaacaattcaacctggagcaaccagacccagaacatccagtcctggagcaaccactcctggaacactcagacctggtgcacccaatcctggaacaatcaggcctggaacagtcccttctataactgtggagaggaatctctgcagtcctgcatgcagttccagccaaattctcctgccagtgacttggaggctgccttggaagctgctggggaaggccttaatgtaatacagcagaccactaggtattttagtactccacaaaccatggatttattcctaaactactccatgaacatgcaacctgaagacgtgtagtaatgaactagtccgtaacttgaaagtatttcgatttcttggctttatatatcttgtggaaaggacgatcaattatgaagttaaccacctat

SEQ ID NO: 1576 - DNA, 971 bp, Homo sapiens
  source 1..971: mol_type = genomic DNA
accgccaccatgagtgtggatccagcttgtccccaaagcttgccttgctttgaagcatccgactgtaaagaatcttcacctatgcctgtgatttgtgggcctgaagaaaactatccatccttgcaaatgtcttctgctgagatgcctcacacggagactgtctctcctcttccttcctccatggatctgcttattcaggacagccctgattcttccaccagtcccaaaggcaaacaacccacttctgcagagaagagtgtcgcaaaaaaggaagacaaggtcccggtcaagaaacagaagaccagaactgtgttctcttccacccagctgtgtgtactcaatgatagatttcagagacagaaatacctcagcctccagcagatgcaagaactctccaacatcctgaacctcagctacaaacaggtgaagacctggttccagaaccagagaatgaaatctaagaggtggcagaaaaacaactggccgaagaatagcaatggtgtgacgcagggatgcctggtgaacccgactgggaaccttccaatgtggagcaaccagacctggaacaattcaacctggagcaaccagacccagaacatccagtcctggagcaaccactcctggaacactcagacctggtgcacccaatcctggaacaatcaggcctggaacagtcccttctataactgtggagaggaatctctgcagtcctgcatgcagttccagccaaattctcctgccagtgacttggaggctgccttggaagctgctggggaaggccttaatgtaatacagcagaccactaggtattttagtactccacaaaccatggatttattcctaaactactccatgaacatgcaacctgaagacgtgtagtaatgaactagtccgtaacttgaaagtatttcgatttcttggctttatatatcttgtggaaaggacgatcgaacatcgagacgataacaacc

SEQ ID NO: 1577 - DNA, 1541 bp, Homo sapiens
  source 1..1541: mol_type = genomic DNA
accgccaccatggagcgggacgaaccgccgcctagcggagggggaggcggcgggggctcggcggggttcctggagcctcccgccgcgctccctccgccgccgcgcaacggtttctgtcaggatgaattggcagagcttgacccaggcactatttctgtttcagatgatcgggctgaacaacgaacctgtctcatttgtggggaccgcgctacaggcttgcactatgggatcatctcctgtgagggctgcaaagggtttttcaagcggagcatttgcaacaaacgggtatatcgatgcagtcgtgacaagaactgtgtcatgtctcggaagcagaggaacaggtgccagtactgccgcctgctcaaatgcctccagatggggatgaaccggaaggctatcagagaagatggcatgcctggaggccggaataagagcattgggccagtccagatatcggaagaagaaatcgaaaggatcatgtctgggcaggagtttgaggaagaggccaatcactggagcaaccatggtgatagtgaccacagttcccctgggaacagggcttcggagagcaaccagccctcaccaggctccacactgtcttccaggtctgtggaactgaatggattcatggccttcagggaacagtacatgggaatgtctgtgcctccacattaccaatatataccgcacctttttagctattctggccactcaccacttctgccccaacaagctcgcagcctggatccccagtcatacagtctgattcaccagctgttatcagccgaggacctggaaccattgggcacgcccatgttgattgaagatggatacgctgtgacacaggcagaactatttgccctgctttgccgcctggccgacgagctgctctttaggcagattgcctggatcaagaaactgcctttcttctgcgagctctcaatcaaggattacacgtgcctcttgagctctacgtggcaggagctaatcctgctgtcttccctcaccgtttacagcaagcagatctttggggaactggctgatgtcactgccaagtactcgccctccgatgaagaactacacagatttagtgatgaagggatggaggtgatcgagcggctcatctacctctatcacaagttccatcagctaaaggtcagcaacgaggagtatgcttgcatgaaagcaattaacttcctaaatcaagatatcaggggtctgaccagtgcctcacagctggaacaattgaataaacgatactggtacatttgccaggattttactgaatataaatacacacatcagccgaaccgctttcctgatctcatgatgtgcttacctgagattcgatatattgcaggaaagatggtgaatgtgcccctggagcagctgcccctcctctttaaggtggtgctgcattcctgcaagaccagtgtgggcaaggaatagtaatgaactagtccgtaacttgaaagtatttcgatttcttggctttatatatcttgtggaaaggacgaatgatcagtttcgcacgcaattat

SEQ ID NO: 1578 - DNA, 1532 bp, Homo sapiens
  source 1..1532: mol_type = genomic DNA
accgccaccatggagcgggacgaaccgccgcctagcggagggggaggcggcgggggctcggcggggttcctggagcctcccgccgcgctccctccgccgccgcgcaacggtttctgtcaggatgaattggcagagcttgacccaggcactaatgatcgggctgaacaacgaacctgtctcatttgtggggaccgcgctacaggcttgcactatgggatcatctcctgtgagggctgcaaagggtttttcaagcggagcatttgcaacaaacgggtatatcgatgcagtcgtgacaagaactgtgtcatgtctcggaagcagaggaacaggtgccagtactgccgcctgctcaaatgcctccagatggggatgaaccggaaggctatcagagaagatggcatgcctggaggccggaataagagcattgggccagtccagatatcggaagaagaaatcgaaaggatcatgtctgggcaggagtttgaggaagaggccaatcactggagcaaccatggtgatagtgaccacagttcccctgggaacagggcttcggagagcaaccagccctcaccaggctccacactgtcttccagtaggtctgtggaactgaatggattcatggccttcagggaacagtacatgggaatgtctgtgcctccacattaccaatatataccgcacctttttagctattctggccactcaccacttctgccccaacaagctcgcagcctggatccccagtcatacagtctgattcaccagctgttatcagccgaggacctggaaccattgggcacgcccatgttgattgaagatggatacgctgtgacacaggcagaactatttgccctgctttgccgcctggccgacgagctgctctttaggcagattgcctggatcaagaaactgcctttcttctgcgagctctcaatcaaggattacacgtgcctcttgagctctacgtggcaggagctaatcctgctgtcttccctcaccgtttacagcaagcagatctttggggaactggctgatgtcactgccaagtactcgccctccgatgaagaactacacagatttagtgatgaagggatggaggtgatcgagcggctcatctacctctatcacaagttccatcagctaaaggtcagcaacgaggagtatgcttgcatgaaagcaattaacttcctaaatcaagatatcaggggtctgaccagtgcctcacagctggaacaattgaataaacgatactggtacatttgccaggattttactgaatataaatacacacatcagccgaaccgctttcctgatctcatgatgtgcttacctgagattcgatatattgcaggaaagatggtgaatgtgcccctggagcagctgcccctcctctttaaggtggtgctgcattcctgcaagaccagtgtgggcaaggaatagtaatgaactagtccgtaacttgaaagtatttcgatttcttggctttatatatcttgtggaaaggacgaacaggtatagcacatgatgatgta

SEQ ID NO: 1579 - DNA, 1544 bp, Homo sapiens
  source 1..1544: mol_type = genomic DNA
accgccaccatggagcgggacgaaccgccgcctagcggagggggaggcggcgggggctcggcggggttcctggagcctcccgccgcgctccctccgccgccgcgcaacggtttctgtcaggatgaattggcagagcttgacccaggcactatttctgtttcagatgatcgggctgaacaacgaacctgtctcatttgtggggaccgcgctacaggcttgcactatgggatcatctcctgtgagggctgcaaagggtttttcaagcggagcatttgcaacaaacgggtatatcgatgcagtcgtgacaagaactgtgtcatgtctcggaagcagaggaacaggtgccagtactgccgcctgctcaaatgcctccagatggggatgaaccggaaggctatcagagaagatggcatgcctggaggccggaataagagcattgggccagtccagatatcggaagaagaaatcgaaaggatcatgtctgggcaggagtttgaggaagaggccaatcactggagcaaccatggtgatagtgaccacagttcccctgggaacagggcttcggagagcaaccagccctcaccaggctccacactgtcttccagtaggtctgtggaactgaatggattcatggccttcagggaacagtacatgggaatgtctgtgcctccacattaccaatatataccgcacctttttagctattctggccactcaccacttctgccccaacaagctcgcagcctggatccccagtcatacagtctgattcaccagctgttatcagccgaggacctggaaccattgggcacgcccatgttgattgaagatggatacgctgtgacacaggcagaactatttgccctgctttgccgcctggccgacgagctgctctttaggcagattgcctggatcaagaaactgcctttcttctgcgagctctcaatcaaggattacacgtgcctcttgagctctacgtggcaggagctaatcctgctgtcttccctcaccgtttacagcaagcagatctttggggaactggctgatgtcactgccaagtactcgccctccgatgaagaactacacagatttagtgatgaagggatggaggtgatcgagcggctcatctacctctatcacaagttccatcagctaaaggtcagcaacgaggagtatgcttgcatgaaagcaattaacttcctaaatcaagatatcaggggtctgaccagtgcctcacagctggaacaattgaataaacgatactggtacatttgccaggattttactgaatataaatacacacatcagccgaaccgctttcctgatctcatgatgtgcttacctgagattcgatatattgcaggaaagatggtgaatgtgcccctggagcagctgcccctcctctttaaggtggtgctgcattcctgcaagaccagtgtgggcaaggaatagtaatgaactagtccgtaacttgaaagtatttcgatttcttggctttatatatcttgtggaaaggacgaaaggtgaagttgcgccaaacggct

SEQ ID NO: 1580 - DNA, 1529 bp, Homo sapiens
  source 1..1529: mol_type = genomic DNA
accgccaccatggagcgggacgaaccgccgcctagcggagggggaggcggcgggggctcggcggggttcctggagcctcccgccgcgctccctccgccgccgcgcaacggtttctgtcaggatgaattggcagagcttgacccaggcactaatgatcgggctgaacaacgaacctgtctcatttgtggggaccgcgctacaggcttgcactatgggatcatctcctgtgagggctgcaaagggtttttcaagcggagcatttgcaacaaacgggtatatcgatgcagtcgtgacaagaactgtgtcatgtctcggaagcagaggaacaggtgccagtactgccgcctgctcaaatgcctccagatggggatgaaccggaaggctatcagagaagatggcatgcctggaggccggaataagagcattgggccagtccagatatcggaagaagaaatcgaaaggatcatgtctgggcaggagtttgaggaagaggccaatcactggagcaaccatggtgatagtgaccacagttcccctgggaacagggcttcggagagcaaccagccctcaccaggctccacactgtcttccaggtctgtggaactgaatggattcatggccttcagggaacagtacatgggaatgtctgtgcctccacattaccaatatataccgcacctttttagctattctggccactcaccacttctgccccaacaagctcgcagcctggatccccagtcatacagtctgattcaccagctgttatcagccgaggacctggaaccattgggcacgcccatgttgattgaagatggatacgctgtgacacaggcagaactatttgccctgctttgccgcctggccgacgagctgctctttaggcagattgcctggatcaagaaactgcctttcttctgcgagctctcaatcaaggattacacgtgcctcttgagctctacgtggcaggagctaatcctgctgtcttccctcaccgtttacagcaagcagatctttggggaactggctgatgtcactgccaagtactcgccctccgatgaagaactacacagatttagtgatgaagggatggaggtgatcgagcggctcatctacctctatcacaagttccatcagctaaaggtcagcaacgaggagtatgcttgcatgaaagcaattaacttcctaaatcaagatatcaggggtctgaccagtgcctcacagctggaacaattgaataaacgatactggtacatttgccaggattttactgaatataaatacacacatcagccgaaccgctttcctgatctcatgatgtgcttacctgagattcgatatattgcaggaaagatggtgaatgtgcccctggagcagctgcccctcctctttaaggtggtgctgcattcctgcaagaccagtgtgggcaaggaatagtaatgaactagtccgtaacttgaaagtatttcgatttcttggctttatatatcttgtggaaaggacgaacttcaggttccttaaccgacaac

SEQ ID NO: 1581 - DNA, 1673 bp, Homo sapiens
  source 1..1673: mol_type = genomic DNA
accgccaccatgctggagaccttccggaacctggcctcagtagatgatgggactcaatttaaagccaatgggtcagtttctctgcaggatatgtacgggcaagaaaaatctaaggaacagacaataccaaacttcacaggaaataattcctgtgcctacactttagaaaaaaattgtgaaggctatggcactgaagaccaccacaaaaatctgagaaatcatatggtggacagattctgtacacataatgaaggtaatcaatatggagaagccatccatcaaatgccagatcttaccctgcacaagaaagtttctgctggagaaaaaccatatgaatgcaccaagtgcaggacagtcttcacgcatctttcttctcttaaaaggcacgtcaagtctcactgtggacgaaaagcacctccaggtgaggaatgtaagcaggcctgcatttgtccctcacacctacacagtcacggaagaactgacactgaggagaagccgtataagtgtcaagcatgtgggcaaactttccaacatcctcgttacctctcccaccacgtaaagactcacacagcagagaaaacctacaaatgcgagcagtgtcggatggcgtttaatgggttcgcaagcttcactagacatgtgagaactcacacaaaagacaggccatataaatgtcaggaatgtgggagagccttcatttatccctcgacatttcaaagacacatgacaacacacactggagagaagccctataaatgtcagcactgtgggaaagccttcacttacccccaggcttttcaaagacatgagaagacgcacacgggagagaagccctatgaatgcaagcagtgtgggaaaacattcagttggtctgaaaccttgcgagtccacatgaggatccacactggggacaaactctataaatgtgaacactgtgggaaggcttttacctcttccagatcattccaaggtcatttgaggacgcacactggagagaaaccttatgagtgtaaacaatgtgggaaagccttcacttggtcctcaacgtttagagaacatgtgagaattcacacgcaagagcagctctataaatgtgaacaatgtgggaaggcttttacctcttccagatcattccgaggtcatttgaggacgcacactggagagaagccttatgagtgtaaacaatgtggaaaaaccttcacttggtcctcaacgtttagagaacatgtgagaattcacacgcaagagcagctccataaatgtgaacactgtgggaaggcctttacctcttccagagcattccaaggtcatttgaggatgcacactggagagaagccttatgagtgtaaacaatgtggaaaaaccttcacttggtcctcaaccttacataatcatgtgaggatgcacactggagagaaacctcacaaatgtaaacaatgtgggatgtccttcaagtggcactcctccttccggaaccatctgaggatgcacacaggacagaaatcccacgaatgtcagtcatactcaaaagccttcagttgccaagtcattctttctaaaaccagtgagagcacacactagtaatgaactagtccgtaacttgaaagtatttcgatttcttggctttatatatcttgtggaaaggacgaaccgcctctggattagtgaattaa

SEQ ID NO: 1582 - DNA, 509 bp, Homo sapiens
  source 1..509: mol_type = genomic DNA
accgccaccatgttccgagacttcggggaacccggcccgagctccgggaacggcggcgggtacggcggccccgcgcagcccccggccgcagcgcaggcagcccagcagaagttccacctggtgccaagcatcaacaccatgagtggcagtcaggagctgcagtggatggtacagcctcatttcctggggcccagcagttaccccaggcctctgacctaccctcagtacagccccccacaaccccggccaggagtcatccgggccctggggccgcctccaggggtacgtcgaaggccttgtgaacagcccggaggaagaggagcgccgccgagtaaggcgcgagcggaacaagctggctgcggccaagtgcaggaaccggaggaaggaactgaccgacttcctgcaggcggagactagtaatgaactagtccgtaacttgaaagtatttcgatttcttggctttatatatcttgtggaaaggacgacaacaatagcggcaaggccgatgg

SEQ ID NO: 1583 - DNA, 809 bp, Homo sapiens
  source 1..809: mol_type = genomic DNA
accgccaccatgttccgagacttcggggaacccggcccgagctccgggaacggcggcgggtacggcggccccgcgcagcccccggccgcagcgcaggcagcccagcagaagttccacctggtgccaagcatcaacaccatgagtggcagtcaggagctgcagtggatggtacagcctcatttcctggggcccagcagttaccccaggcctctgacctaccctcagtacagccccccacaaccccggccaggagtcatccgggccctggggccgcctccaggggtacgtcgaaggccttgtgaacaggagactgacaaactggaagatgagaaatctgggctgcagcgagagattgaggagctgcagaagcagaaggagcgcctagagctggtgctggaagcccaccgacccatctgcaaaatcccggaaggagccaaggagggggacacaggcagtaccagtggcaccagcagcccaccagccccctgccgccctgtaccttgtatctccctttccccagggcctgtgcttgaacctgaggcactgcacacccccacactcatgaccacaccctccctaactcctttcacccccagcctggtcttcacctaccccagcactcctgagccttgtgcctcagctcatcgcaagagtagcagcagcagcggagacccatcctctgacccccttggctctccaaccctcctcgctttgtagtaatgaactagtccgtaacttgaaagtatttcgatttcttggctttatatatcttgtggaaaggacgacaccattggcaggtaccgatacgt

SEQ ID NO: 1584 - DNA, 611 bp, Homo sapiens
  source 1..611: mol_type = genomic DNA
accgccaccatgttccgagacttcggggaacccggcccgagctccgggaacggcggcgggtacggcggccccgcgcagcccccggccgcagcgcaggcagcccagcaggagactgacaaactggaagatgagaaatctgggctgcagcgagagattgaggagctgcagaagcagaaggagcgcctagagctggtgctggaagcccaccgacccatctgcaaaatcccggaaggagccaaggagggggacacaggcagtaccagtggcaccagcagcccaccagccccctgccgccctgtaccttgtatctccctttccccagggcctgtgcttgaacctgaggcactgcacacccccacactcatgaccacaccctccctaactcctttcacccccagcctggtcttcacctaccccagcactcctgagccttgtgcctcagctcatcgcaagagtagcagcagcagcggagacccatcctctgacccccttggctctccaaccctcctcgctttgtagtaatgaactagtccgtaacttgaaagtatttcgatttcttggctttatatatcttgtggaaaggacgaacgtccttccacggccataggtta

SEQ ID NO: 1585 - DNA, 1574 bp, Homo sapiens
  source 1..1574: mol_type = genomic DNA
accgccaccatgggtccagtcatgcctcccagtaagaagccagaaagctcaggaattagtgtctccagtggactgagtcagtgttacgggggcagcggtttctccaaggcccttcaggaagacgatgacctcgacttttctctgcctgacatccgattagaagagggggccatggaagatgaagagctgaccaacctgaactggctgcacgagagcaagaacttgctgaagagctttggggagtcggtcctcaggagtgtcagccccgtccaggacctggacgatgacacccccccatcccctgcccactctgacatgccctacgatgccaggcagaaccccaactgcaaacccccctactccttcagctgcctcatatttatggccatcgaggactctccaaccaagcgcctgccagtgaaggatatctacaactggatcttggaacattttccgtattttgcaaatgcacctactgggtggaaaaactcagtgagacacaatttatcattgaataagtgttttaagaaagtggacaaagagaggagtcagagtattgggaaagggtcgttgtggtgcatagacccagagtatagacaaaatctaattcaggctttgaaaaagacaccttatcacccacacccacacgtgttcaatacacctcccacctgtcctcaggcatatcaaagcacatcaggtccacccatctggccgggcagtaccttcttcaagagaaatggagcccttctccaagatcctgacattgatgctgccagtgccatgatgcttttgaatactccccctgagatacaagcaggttttcctccaggagtgatccaaaatggagcgcgggtcctgagccgagggctgtttcctggcgtgcggccgctgccaatcactcccattggggtgacagcggccatgaggaatggcatcaccagctgccggatgcggactgagagtgagccatcttgtggctccccagtggtcagcggagaccccaaggaggatcacaactacagcagtgccaagtcctccaacgcccggagcacctcgcccaccagcgactccatctcctcctcctcctcctcagccgacgaccactatgagtttgccaccaaggggagccaggagggcagcgagggcagcgaggggagcttccggagccacgagagccccagcgacacggaagaggacgacaggaagcacagccagaaggagcccaaggattctctgggggacagcgggtacgcatcccagcacaagaagcgccagcacttcgccaaggccaggaaggtccccagcgacacactgcccctcaaaaagagacgcaccgaaaagccccccgagagcgatgatgaggagatgaaagaagcggcagggtccctcctgcacttagcagggatccggtcctgtttgaataacatcaccaatcggacggcaaaggggcagaaagagcaaaaggaaaccacaaaaaattagtaatgaactagtccgtaacttgaaagtatttcgatttcttggctttatatatcttgtggaaaggacgatgttctgtctcacctacacaccga

SEQ ID NO: 1586 - DNA, 914 bp, Homo sapiens
  source 1..914: mol_type = genomic DNA
accgccaccatgcagtacccgcaccccgggccggcggcgggcgccgtgggggtgccgctgtacgcgcccacgccgctgctgcaacccgcacacccgacgcccttttacatcgaggacatcctgggccgcgggcccgccgcgcccacgcccgcccccacgctgccgtcccccaactcctccttcaccagcctcgtgtccccctaccggaccccggtgtacgagcccacgccgatccatccagccttctcgcaccactccgccgccgcgctggccgctgcctacggacccggcggcttcgggggccctctgtaccccttcccgcggacggtgaacgactacacgcacgccctgctccgccacgaccccctgggcaaacctctactctggagccccttcttgcagaggcctctgcataaaaggaaaggcggccaggtgagattctccaacgaccagaccatcgagctggagaagaaattcgagacgcagaaatatctctctccgcccgagaggaagcgtctggccaagatgctgcagctcagcgagagacaggtcaaaacctggtttcagaatcgacgcgctaaatggaggagactaaaacaggagaaccctcaaagcaataaaaaagaagaactggaaagtttggacagttcctgtgatcagaggcaagatttgcccagtgaacagaataaaggtgcttctttggatagctctcaatgttcgccctcccctgcctcccaggaagaccttgaatcagagatttcagaggattctgatcaggaagtggacattgagggcgataaaagctattttaatgctggatagtaatgaactagtccgtaacttgaaagtatttcgatttcttggctttatatatcttgtggaaaggacgaaggatcctatttccaatcgtgccg

SEQ ID NO: 1587 - DNA, 944 bp, Homo sapiens
  source 1..944: mol_type = genomic DNA
accgccaccatgtgcccgcctcaggcacaggcagaggtgggccccaccatgactgagaaggcagagatggtgtgtgcccccagcccagcgcctgccccaccccctaagcctgcctcgcctgggcccccgcaggtggaggaggtgggccaccgaggaggctcctcgccccccaggctgccacctggtgtaccagtgatcagcctgggccacagcaggcccccaggggtagccatgcccaccacagagctgggcactctgcggcccccgctgctgcaactctccaccctgggaactgccccgcccactttggccctgcactaccaccctcaccccttcctcaacagtgtctacattgggccagcaggaccttttagcatcttccctagcagccggttgaagcggagaccaagccactgtgagctggacctggctgaggggcaccagccccagaaggtggcccggcgcgtgttcaccaacagccgggagcgctggcggcagcagaacgttaacggcgccttcgccgagctgaggaagctgctgccgacgcacccgcccgaccggaagctgagcaagaacgaggtgctccgcctagccatgaagtacatcggcttcctggtgcggctgctgcgcgaccaagccgcagctctggccgcaggccccacccctcccgggcctcgcaaacggccggtgcaccgggtcccagacgacggcgcccgccggggatccggacgcagggccgaggcggcagcgcgctcgcagcccgcgcccccggccgaccccgacggcagccccggtggagcggcccggcccatcaagatggagcaaaccgctttgagcccagaggtgcggtagtaatgaactagtccgtaacttgaaagtatttcgatttcttggctttatatatcttgtggaaaggacgatccaagagatacgaatagacgatg

SEQ ID NO: 1588 - DNA, 3308 bp, Homo sapiens
  source 1..3308: mol_type = genomic DNA
accgccaccatgttcgaggacaagccccacgctgagggggcggcggtggtcgccgcagccggggaggcgctacaggccctgtgccaggagctgaacctggacgaggggagcgcggccgaagccctggacgactttactgccatccgaggcaactacagcctagagggagaagttacacactggttggcatgttcattatatgttgcatgccgcaaaagcattattcccacggttggaaagggtatcatggaaggcaactgtgtttcacttaccagaatactacgttcagctaaattaagtttaatacaattttttagtaaaatgaagaaatggatggacatgtcaaatctaccacaagaatttcgtgaacgtatagaaaggctagagagaaattttgaggtgtctactgtaatattcaaaaaatatgagccaatttttttagatatatttcaaaatccatatgaagaaccaccaaagttaccacgaagccggaagcagaggaggattccttgcagtgttaaggatctgtttaatttctgttggacactttttgtttatactaagggtaattttcggatgattggggatgacttagtaaactcttatcatttacttctatgctgcttggatctgatttttgccaatgcgattatgtgcccaaatagacaagacttgctaaatccatcatttaaaggtttaccatctgattttcatactgctgactttacggcttctgaagagccaccctgcatcattgctgtactgtgtgaactgcatgatggacttctcgtagaagcaaaaggaataaaggagcactactttaagccatatatttcaaaactctttgacaggaagatattaaaaggagaatgcctcctggacctttcaagttttactgataatagcaaagcagtgaataaggagtatgaagagtatgttctaactgttggtgattttgatgagaggatctttttgggagcagacgcagaagaggaaattggaacacctcgaaagttcactcgtgacaccccattagggaaactgacagcacaggctaatgtggagtataaccttcaacagcactttgaaaaaaaaaggtcatttgcaccttctaccccactgaccggacggagatatttacgagaaaaagaagcagtcattactcctgttgcatcagccacccaaagtgtgagccggttacagagtattgtggctggtctgaaaaatgcaccaagtgaccaacttataaatatttttgaatcttgtgtgcgtaatcctgtggaaaacattatgaaaatactaaaaggaataggagagactttctgtcaacactatactcaatcaacagatgaacagccaggatctcacatagactttgctgtaaacagactaaagctggcagaaattttgtattataaaatactagagactgtaatggttcaggaaacacgaagacttcatggaatggacatgtcagttcttttagagcaagatatatttcatcgttccttgatggcttgttgtttggaaattgtgctctttgcctatagctcacctcgtacttttccttggattattgaagttctcaacttgcaaccattttacttttataaggttattgaggtggtgatccgctcagaagaggggctctcaagggacatggtgaaacacctaaacagcattgaagaacagattttggagagtttagcatggagtcacgattctgcactgtgggaggctctccaggtttctgcaaacaaagttcctacctgtgaagaagttatattcccaaataactttgaaacaggaaatggaggaaatgtgcagggacatcttcccctgatgccaatgtctcctctaatgcacccaagagtcaaggaagttcgaactgacagtgggagtcttcgaagagatatgcaaccattgtctccaatttctgtccatgaacgctacagttctcctaccgcagggagtgctaagagaagactctttggagaggaccccccaaaggaaatgcttatggacaagatcataacagaaggaacaaaattgaaaatcgctccttcttcaagcattactgctgaaaatgtatcaattttacctggtcaaactcttctaacaatggccacagccccagtaacaggaacaacaggacataaagttacaattccattacatggtgtcgcaaatgatgctggagagatcacactgatacctctttccatgaatacaaatcaggagtccaaagtcaagagtcctgtatcacttactgctcattcattaattggtgcttctccaaaacagaccaatctgactaaagcacaagaggtacattcaactggaataaacaggccaaagagaactgggtccttagcactattttacagaaaggtctatcatttggcaagtgtacgcttacgtgatctatgtctaaaactggatgtttcaaatgagttacgaaggaagatatggacgtgttttgaattcactttagttcactgtcctgatctaatgaaagacaggcatttggatcagctcctcctttgtgccttttatatcatggcaaaggtaacaaaagaagaaagaacttttcaagaaattatgaaaagttataggaatcagccccaagctaatagtcacgtatatagaagtgttctgctgaaaagtattccaagagaagttgtggcatataataaaaatataaatgatgactttgaaatgatagattgtgacttagaagatgctacaaaaacacctgactgttccagtggaccagtgaaagaggaaagaggtgatcttataaaattttacaatacaatatatgtaggaagagtgaagtcatttgcactgaaatacgacttggcgaatcaggaccatatgatggatgctccaccactctctccttttccacatattaaacaacagccaggctcaccacgccgcatttcccagcagcactccatttatatttccccgcacaagaatgggtcaggccttacaccaagaagcgctctgctgtacaagttcaatggcagcccttctaagagtttgaaagatatcaacaacatgataaggcaaggtgagcagagaaccaagaagcgagtaatagccatcgatagtgatgcagaatcccctgccaaacgcgtctgtcaagaaaatgatgacgttttactgaaacgactacaggatgttgtcagtgaaagagcaaatcattagtaatgaactagtccgtaacttgaaagtatttcgatttcttggctttatatatcttgtggaaaggacgaacttgctactgacaccacaccaca

SEQ ID NO: 1589 - DNA, 3146 bp, Homo sapiens
  source 1..3146: mol_type = genomic DNA
accgccaccatgttcgaggacaagccccacgctgagggggcggcggtggtcgccgcagccggggaggcgctacaggccctgtgccaggagctgaacctggacgaggggagcgcggccgaagccctggacgactttactgccatccgaggcaactacagcctagagggagaagttacacactggttggcatgttcattatatgttgcatgccgcaaaagcattattcccacggttggaaagggtatcatggaaggcaactgtgtttcacttaccagaatactacgttcagctaaattaagtttaatacaattttttagtaaaatgaagaaatggatggacatgtcaaatctaccacaagaatttcgtgaacgtatagaaaggctagagagaaattttgaggtgtctactgtaatattcaaaaaatatgagccaatttttttagatatatttcaaaatccatatgaagaaccaccaaagttaccacgaagccggaagcagaggaggattccttgcagtgttaaggatctgtttaatttctgttggacactttttgtttatactaagggtaattttcggatgattggggatgacttagtaaactcttatcatttacttctatgctgcttggatctgatttttgccaatgcgattatgtgcccaaatagacaagacttgctaaatccatcatttaaaggtttaccatctgattttcatactgctgactttacggcttctgaagagccaccctgcatcattgctgtactgtgtgaactgcatgatggacttctcgtagaagcaaaaggaataaaggagcactactttaagccatatatttcaaaactctttgacaggaagatattaaaaggagaatgcctcctggacctttcaagttttactgataatagcaaagcagtgaataaggagtatgaagagtatgttctaactgttggtgattttgatgagaggatctttttgggagcagacgcagaagaggaaattggaacacctcgaaagttcactcgtgacaccccattagggaaactgacagcacaggctaatgtggagtataaccttcaacagcactttgaaaaaaaaaggtcatttgcaccttctaccccactgaccggacggagatatttacgagaaaaagaagcagtcattactcctgttgcatcagccacccaaagtgtgagccggttacagagtattgtggctggtctgaaaaatgcaccaagtgaccaacttataaatatttttgaatcttgtgtgcgtaatcctgtggaaaacattatgaaaatactaaaaggaataggagagactttctgtcaacactatactcaatcaacagatgaacagccaggatctcacatagactttgctgtaaacagactaaagctggcagaaattttgtattataaaatactagagactgtaatggttcaggaaacacgaagacttcatggaatggacatgtcagttcttttagagcaagatatatttcatcgttccttgatggcttgttgtttggaaattgtgctctttgcctatagctcacctcgtacttttccttggattattgaagttctcaacttgcaaccattttacttttataaggttattgaggtggtgatccgctcagaagaggggctctcaagggacatggtgaaacacctaaacagcattgaagaacagattttggagagtttagcatggagtcacgattctgcactgtgggaggctctccaggtttctgcaaacaaagttcctacctgtgaagaagttatattcccaaataactttgaaacaggaaatggaggaaatgtgcagggacatcttcccctgatgccaatgtctcctctaatgcacccaagagtcaaggaagttcgaactgacagtgggagtcttcgaagagatatgcaaccattgtctccaatttctgtccatgaacgctacagttctcctaccgcagggagtgctaagagaagactctttggagaggaccccccaaaggaaatgcttatggacaagatcataacagaaggaacaaaattgaaaatcgctccttcttcaagcattactgctgaaaatgtatcaattttacctggtcaaactcttctaacaatggccacagccccagtaacaggaacaacaggacataaagttacaattccattacatggtgtcgcaaatgatgctggagagatcacactgatacctctttccatgaatacaaatcaggagtccaaagtcaagagtcctgtatcacttactgctcattcattaattggtgcttctccaaaacagaccaatctgactaaagcacaagaggtacattcaactggaataaacaggccaaagagaactgggtccttagcactattttacagaaaggtctatcatttggcaagtgtacgcttacgtgatctatgtctaaaactggatgtttcaaatgagttacgaaggaagatatggacgtgttttgaattcactttagttcactgtcctgatctaatgaaagacaggcatttggatcagctcctcctttgtgccttttatatcatggcaaaggtaacaaaagaagaaagaacttttcaagaaattatgaaaagttataggaatcagccccaagctaatagtcacgtatatagaagtgttctgctgaaaagtattccaagagaagttgtggcatataataaaaatataaatgatgactttgaaatgatagattgtgacttagaagatgctacaaaaacacctgactgttccagtggaccagtgaaagaggaaagaggtgatcttataaaattttacaatacaatatatgtaggaagagtgaagtcatttgcactgaaatacgacttggcgaatcaggaccatatgatggatgctccaccactctctccttttccacatattaaacaacagccaggctcaccacgccgcatttcccagcagcactccatttatatttccccgcacaagaatgggtcaggccttacaccaagaagcgctctgctgtacaagttcaatggcagcccttctaaggtaaggtagtaatgaactagtccgtaacttgaaagtatttcgatttcttggctttatatatcttgtggaaaggacgaagagtgccgtttccactcgcaata

SEQ ID NO: 1590 - DNA, 3521 bp, Homo sapiens
  source 1..3521: mol_type = genomic DNA
accgccaccatgccgtcgggaggtgaccagtcgccaccgcccccgcctccccctccggcggcggcagcctcggatgaggaggaggaggacgacggcgaggcggaagacgccgcgccgcctgccgagtcgcccacccctcagatccagcagcggttcgacgagctgtgcagccgcctcaacatggacgaggcggcgcgggccgaggcctgggacagctaccgcagcatgagcgaaagctacacgctggagggaaatgatcttcattggttagcatgtgccttatatgtggcttgcagaaaatctgttccaactgtaagcaaagggacagtggaaggaaactatgtatctttaactagaatcctgaaatgttcagagcagagcttaatcgaattttttaataagatgaagaagtgggaagacatggcaaatctacccccacatttcagagaacgtactgagagattagaaagaaacttcactgtttctgctgtaatttttaagaaatatgaacccatttttcaggacatctttaaataccctcaagaggagcaacctcgtcagcagcgaggaaggaaacagcggcgacagccctgtactgtgtctgaaattttccatttttgttgggtgctttttatatatgcaaaaggtaatttccccatgattagtgatgatttggtcaattcttatcacctgctgctgtgtgctttggacttagtttatggaaatgcacttcagtgttctaatcgtaaagaacttgtgaaccctaattttaaaggcttatctgaagattttcatgctaaagattctaaaccttcctctgaccccccttgtatcattgagaaactgtgttccttacatgatggcctagttttggaagcaaaggggataaaggaacatttctggaaaccctatattaggaaactttatgaaaaaaagctccttaagggaaaagaagaaaatctcactgggtttctagaacctgggaactttggagagagttttaaagccatcaataaggcctatgaggagtatgttttatctgttgggaatttagatgagcggatatttcttggagaggatgctgaggaggaaattgggactctctcaaggtgtctgaacgctggttcaggaacagagactgctgaaagggtgcagatgaaaaacatcttacagcagcattttgacaagtccaaagcacttagaatctccacaccactaactggtgttaggtacattaaggagaatagcccttgtgtgactccagtttctacagctacgcatagcttgagtcgtcttcacaccatgctgacaggcctcaggaatgcaccaagtgagaaactggaacagattctcaggacatgttccagagatccaacccaggctattgctaacagactgaaagaaatgtttgaaatatattctcagcatttccagccagacgaggatttcagtaattgtgctaaagaaattgccagcaaacattttcgttttgcggagatgctttactataaagtattagaatctgttattgagcaggaacaaaaaagactaggagacatggatttatctggtattctggaacaagatgcgttccacagatctctcttggcctgctgccttgaggtcgtcactttttcttataagcctcctgggaattttccatttattactgaaatatttgatgtgcctctttatcatttttataaggtgatagaagtattcattagagcagaagatggcctttgtagagaggtggtaaaacaccttaatcagattgaagaacagatcttagatcatttggcatggaaaccagagtctccactctgggaaaaaattagagacaatgaaaacagagttcctacatgtgaagaggtcatgccacctcagaacctggaaagggcagatgaaatttgcattgctggctcccctttgactcccagaagggtgactgaagttcgtgctgatactggaggacttggaaggagcataacatctccaaccacattatacgataggtacagctccccaccagccagcactaccagaaggcggctatttgttgagaatgatagcccctctgatggagggacgcctgggcgcatgcccccacagcccctagtcaatgctgtccctgtgcagaatgtatctggggagactgtttctgtcacaccagttcctggacagactttggtcaccatggcaaccgccactgtcacagccaacaatgggcaaacggtaaccattcctgtgcaaggtattgccaatgaaaatggagggataacattcttccctgtccaagtcaatgttggggggcaggcacaagctgtgacaggctccatccagcccctcagtgctcaggccctggctggaagtctgagctctcaacaggtgacaggaacaactttgcaagtccctggtcaagtggccattcaacagatttccccaggtggccaacagcagaagcaaggccagtctgtaaccagcagtagtaatagacccaggaagaccagctctttatcgcttttctttagaaaggtataccatttagcagctgtccgccttcgggatctctgtgccaaactagatatttcagatgaattgaggaaaaaaatctggacctgctttgaattctccataattcagtgtcctgaacttatgatggacagacatctggaccagttattaatgtgtgccatttatgtgatggcaaaggtcacaaaagaagataagtccttccagaacattatgcgttgttataggactcagccgcaggcccggagccaggtgtatagaagtgttttgataaaagggaaaagaaaaagaagaaattctggcagcagtgatagcagaagccatcagaattctccaacagaactaaacaaagatagaaccagtagagactccagtccagttatgaggtcaagcagcaccttgccagttccacagcccagcagtgctcctcccacacctactcgcctcacaggtgccaacagtgacatggaagaagaggagaggggagacctcattcagttctacaacaacatctacatcaaacagattaagacatttgccatgaagtactcacaggcaaatatggatgctcctccactctctccctatccatttgtaagaacaggctcccctcgccgaatacagttgtctcaaaatcatcctgtctacatttccccacataaaaatgaaacaatgctttctcctcgagaaaagattttctattacttcagcaacagtccttcaaagagactgagagaaattaatagtatgatacgcacaggagaaactcctactaaaaagagaggaattcttttggaagatggaagtgaatcacctgcaaaaagaatttgcccagaaaatcattctgccttattacgccgtctccaagatgtagctaatgaccgtggttcccactagtaatgaactagtccgtaacttgaaagtatttcgatttcttggctttatatatcttgtggaaaggacgatgctcgcaagtgatttcccaggcc

SEQ ID NO: 1591 - DNA, 2882 bp, Homo sapiens
  source 1..2882: mol_type = genomic DNA
accgccaccatgaagaagacccggagcacaaccttgcggcgagcctggcctagctcggatttctcggaccgggcctcggaccgcatgaggtcccgcagcgagaaggactaccgcctgcacaagcgtttccccgcggccttcgcgccccaggcttcgcggggctacatgacatcaggtgatgtatcacccatcagtatgtctcccatcagtcagtctcagtttattccactcggggagatcctctgcttggccatctcagcaatgaactcggcaagaaagcctgtcacccaagaagcactgatggagcacctgaccacgtgcttcccaggtgttccaacgccaagccaagaaattctgcggcacacgctgaacacgctggtacgggagaggaagatctacccaactccagatggctacttcatcgtgaccccacagacttatttcataactccttccctcataagaactaacagtaaatggtaccatttggacgagaggatacctgaccggtctcagtgcacctctccgcaacccgggaccatcacgccctctgcctcaggctgtgtcagggaaaggacattgccccgaaaccactgcgactcttgccactgctgcagagaagacgtgcacagcacgcatgcacccaccctgcaaaggaagtctgccaaggactgcaaagacccttactgtcccccttctctgtgccaggtgccacccactgaaaagagcaaaagtactgtaaatttttcctataagacagaaactctctcaaaacctaaagatagtgaaaagcagtcaaaaaaattcgggctaaagttattccggttaagttttaaaaaagacaagaccaaacagctggccaatttttctgcccagtttcctcctgaagagtggcccctgcgagacgaggacacgccagctacgatccctcgggaagtagagatggaaatcattaggcgcattaacccagacctgaccgtggaaaatgtcatgcggcacaccgcgctcatgaagaaactggaagaagaaaaggcccagaggagtaaagccgggtcctctgcccatcacagcggaaggagtaaaaagagtaggactcatcggaagtcccatggaaagtctcggtctcacagcaagacacgggtgtctaaaggagacccttccgacggttcacatctggatatcccagctgaaagagagtatgacttttgtgatcctcttaccagggtgcccagggagggctgcttcatcattgaacacaaaggagataacttcatcatgcacagcaacacaaacgtgctcgagtcccacttccccatgacaccagaatgggatgtgtctggtgaattggctaaaaggagaactgagatgccttttcctgaaccttctaggggaagctcccactcaaaagtgcaccgaagccacagccatacacaggaccggaggtccaggaatgagagatccaacaaagccaaggagagatccaggtcgatggataactccaaaggccctctgggtgcttcttctctagggacgccggaagaccttgctgaaggctgcagccaagacgaccagacccccagccaatcctacattgacgacagtactttaaggcctgcacagaccgttagtctccaaagggctcacatttcgtccacaagctataaagaggtgtgtattccagagatagtcagtggcagcaaggaaccgtccagcgcttgcagccttttggagccaggaaaaccacccgagagtttgccatcctatggcgaactcaactcttgtccaacaaaaacagccacagatgactatttccagtgcaacacctctagtgagacggtgctcacggcaccatcacctctgggaaagaataaggaggaccatgacactctgactttggcagaaggggtgaaaaagctctccccttctgataggcaggtcccccactcctccagggagcctgtggggcacaaggaggagtcaccaaaagggccgggtgggggccccgctgcttcgggaggagtggctgaagggatcgccaacggacgcctcgtccagcaccatggtgccgagcccagcagcttggacaagaggaaagagatatttagcaaagacacactgttcaaacctcttcacagcaccttgtctgtaaacagctatcacaagtcgagcctgtccctcctcaaatctcacccgaagacacctgctgacacattgccaggccgatgtgagaaactggaaccgtccctggggacctcggcggcacaagccatgcctgcttcccagcgtcagcaggagtcaggagggaaccaggaagcctcttttgactattacaacgtctctgatgatgacgactctgaggaaggggcaaacaagaacacagaggaggagaaaaatagagaggacgtaggcaccatgcagtggctcctcgagcgggagaaggaaagagacttgcagaggaaatttgaaaagaacctcacccttcttgctccaaaagaaaccgacagcagcagcaaccagagagccacccattcagcccggctcgacagcatggacagcagcagcatcacagtggacagtggattcaactccccacgtactcgggagagcctggcttccaacacatcaagcattgttgaaagtaaccgtcgtcagaaccccgctttgagcccggcccatggtggagctggtccagccttcaacttccgagcgagcgcggagcccccgacaaatgaagctgagaagctacagaaaccttccaactgcttgcaagcttctgttactagcgtgtagtaatgaactagtccgtaacttgaaagtatttcgatttcttggctttatatatcttgtggaaaggacgagaggcgtcgctgatgatgacgtct

SEQ ID NO: 1592 - DNA, 1253 bp, Homo sapiens
  source 1..1253: mol_type = genomic DNA
accgccaccatgtccctggtagatttgggaaagaagcttttagaagcggcacgagcaggtcaagatgatgaagttcgtattttgatggcaaatggagctccctttactacagactggctgggaacttctccacttcatctagcagcacagtatggtcattattccaccacagaggtactgctgcgagctggtgtgagcagagatgccagaaccaaagtggaccgaacaccattacatatggcagcttctgagggccatgccagcatagtagaggttttacttaagcatggtgctgatgtcaatgcaaaggacatgttaaagatgacagctctccattgggccacagaacacaatcatcaagaggtggtggaacttttaatcaaatatggtgctgatgtacacacgcaaagtaaattttgtaaaactgcatttgatatttcaatagacaatggaaatgaagatttagcagagatattacagattgctatgcagaaccaaatcaacacaaacccagagagtcctgacactgtgacaatacatgctgcaacaccacagtttatcattggacctggaggggtggtgaacctaacagatgaaacgggtgtatctgctgttcagtttggaaactcttctacatcagtattagctacattagctgccttagctgaagcatctgctccattgtccaattcttcagaaactccagtagtggccacagaagaagtagttactgcagaatctgtggatggtgccattcagcaagtagttagttcagggggtcagcaagtcatcacaatagttacagatggaattcagcttggaaatttgcactctattccaaccagtggaattggtcagcccatcattgtgaccatgccagatggacaacaagtattaacagtaccagcaacagacattgctgaagaaactgttataagtgaagaaccaccagctaagagacaatgtatcgaaataattgaaaaccgggtggaatctgcagaaatagaagagagagaagctcttcagaaacagctggatgaagcaaatcgagaagcacaaaaatatcgacagcagctcctaaagaaagaacaggaagcagaggcctacagacagaagttggaagctatgactcgtcttcagactaataaagaagctgtttagtaatgaactagtccgtaacttgaaagtatttcgatttcttggctttatatatcttgtggaaaggacgaccgtgctccgccgtctttggaaac

SEQ ID NO: 1593 - DNA, 1148 bp, Homo sapiens
  source 1..1148: mol_type = genomic DNA
accgccaccatgtccctggtagatttgggaaagaagcttttagaagcggcacgagcaggtcaagatgatgaagttcgtattttgatggcaaatggagctccctttactacagactggctgggaacttctccacttcatctagcagcacagtatggtcattattccaccacagaggtactgctgcgagctggtgtgagcagagatgccagaaccaaagtggaccgaacaccattacatatggcagcttctgagggccatgccagcatagtagaggttttacttaagcatggtgctgatgtcaatgcaaaggacatgttaaagatgacagctctccattgggccacagaacacaatcatcaagaggtggtggaacttttaatcaaatatggtgctgatgtacacacgcaaagtaaattttgtaaaactgcatttgatatttcaatagacaatggaaatgaagatttagcagagatattacagattgctatgcagaaccaaatcaacacaaacccagagagtcctgacactgtgacaatacatgctgcaacaccacagtttatcattggacctggaggggtggtgaacctaacagatgaaacgggtgtatctgctgttcagtttggaaactcttctacatcagtattagctacattagctgccttagctgaagcatctgctccattgtccaattcttcagaaactccagtagtggccacagaagaagtagttactgcagaatctgtggatggtgccattcagcaagtagttagttcagggggtcagcaagtcatcacaatagttacagatggaattcagcttggaaatttgcactctattccaaccagtggaattggtcagcccatcattgtgaccatgccagatggacaacaagtattaacagtaccagcaacagacattgctgaagaaactgttataagtgaagaaccaccagctaagagacaatgtatcgaaataattgaaaaccgggtggaatctgcagaaatagaagtaaggagtcttttacccggtgtgctttgccgcagtcatccaaaatagtaatgaactagtccgtaacttgaaagtatttcgatttcttggctttatatatcttgtggaaaggacgaaccgggtccgcacccggcaatacc

SEQ ID NO: 1594 - DNA, 1184 bp, Homo sapiens
  source 1..1184: mol_type = genomic DNA
accgccaccatgtccctggtagatttgggaaagaagcttttagaagcggcacgagcaggtcaagatgatgaagttcgtattttgatggcaaatggagctccctttactacagactggctgggaacttctccacttcatctagcagcacagtatggtcattattccaccacagaggtactgctgcgagctggtgtgagcagagatgccagaaccaaagtggaccgaacaccattacatatggcagcttctgagggccatgccagcatagtagaggttttacttaagcatggtgctgatgtcaatgcaaaggacatgttaaagatgacagctctccattgggccacagaacacaatcatcaagaggtggtggaacttttaatcaaatatggtgctgatgtacacacgcaaagtaaattttgtaaaactgcatttgatatttcaatagacaatggaaatgaagatttagcagagatattacagattgctatgcagaaccaaatcaacacaaacccagagagtcctgacactgtgacaatacatgctgcaacaccacagtttatcattggacctggaggggtggtgaacctaacaggtctggtatcttcagaaaattcatccaaggcaacagatgaaacgggtgtatctgctgttcagtttggaaactcttctacatcagtattagctacattagctgccttagctgaagcatctgctccattgtccaattcttcagaaactccagtagtggccacagaagaagtagttactgcagaatctgtggatggtgccattcagcaagtagttagttcagggggtcagcaagtcatcacaatagttacagatggaattcagcttggaaatttgcactctattccaaccagtggaattggtcagcccatcattgtgaccatgccagatggacaacaagtattaacagtaccagcaacagacattgctgaagaaactgttataagtgaagaaccaccagctaagagacaatgtatcgaaataattgaaaaccgggtggaatctgcagaaatagaagtaaggagtcttttacccggtgtgctttgccgcagtcatccaaaatagtaatgaactagtccgtaacttgaaagtatttcgatttcttggctttatatatcttgtggaaaggacgaactaccgccgatgacgtacgcaga

SEQ ID NO: 1595 - DNA, 1226 bp, Homo sapiens
  source 1..1226: mol_type = genomic DNA
accgccaccatggagccaggaggagagcccacaggtgctaaagagagcagtaccctgatggagtcccttgcagctgtgaaggctgctttcctggcgcaggccccgagtggcagccggtcagccgaggtgcaggcagctcagagcacggagcctgccgcagaggcaggcgctcccgagggagagggccacagaggggggcctccccgggcgttggggtctcttggcctttgtgaaaaccaggaagccagagagaggcccggaggttcccctcgaggcccggtcacttctgagaaaactggaggacagagtggcctcgagtcagacgtccctccgaacgcaggccccggcgcagagggcgggggcagctggaaggggcggcctttcccgtgcggcgcctgtggccgcagcttcaagtgctcctcggacgcggcaaagcaccggagcatccactcgggggagaaaccgtacgagtgcagcgactgcgggaaggccttcatccacagctcgcacgtggtccggcaccagcgggcgcacagcggggagaggccctacgcgtgcgccgagtgcggcaaggccttcggccagagcttcaacctcctccggcaccagcgcgtgcacacgggcgagaagccctacgcgtgcgccgactgcggcaaggccttcggccagaggtcggacgccgccaagcaccgccgcacccacaccggggagaggctgtacgcgtgcggcgagtgcgggaagcgcttcctgcacagctcgaacgtggtccggcaccggcggacccaccacggggagaacccgtacgagtgccgggagtgcggccaggccttcagccagagctccaacctcctccagcaccagcgcgtgcacacgggggagcggcccttcgcctgccaggactgcggccgcgccttcagccgcagctccttcctccgcgagcaccgccgcatccacaccggggagaagccccaccagtgcggccactgcgggcgcgcgttccgggcgctgtcgggcttcttccggcaccagcgactccacacgggcgagaagccgttccgctgcaccgagtgcggccgcgccttccgcctgagcttccacctcatccagcaccggcgggtgcatggcgccgagtagtaatgaactagtccgtaacttgaaagtatttcgatttcttggctttatatatcttgtggaaaggacgatagtctggctatgtcgaagactaa

SEQ ID NO: 1596 - DNA, 977 bp, Homo sapiens
  source 1..977: mol_type = genomic DNA
accgccaccatggcaagaaagaaaaggagagggattatagagaaaaggcgtcgggatcggataaataacagtttatctgagttgagaagacttgtgccaactgcttttgaaaaacaaggatctgcaaagttagaaaaagctgaaatattgcaaatgacagtggatcatttgaagatgcttcaggcaacagggggtaaaggctactttgacgcacacgctcttgccatggacttcatgagcataggattccgagagtgcctaacagaagttgcgcggtacctgagctccgtggaaggcctggactcctcggatccgctgcgggtgcggcttgtgtctcatctcagcacttgcgccacccagcgggaggcggcggccatgacatcctccatggcccaccaccatcatccgctccacccgcatcactgggccgccgccttccaccacctgcccgcagccctgctccagcccaacggcctccatgcctcagagtcaaccccttgtcgcctctccacaacttcagaagtgcctcctgcccacggctctgctctcctcacggccacgtttgcccatgcggattcagccctccgaatgccatccacgggcagcgtcgccccctgcgtgccacctctctccacctctctcttgtccctctctgccaccgtccacgccgcagccgcagcagccaccgcggctgcacacagcttccctctgtccttcgcgggggcattccccatgcttcccccaaacgcagcagcagcagtggccgcggccacagccatcagcccgcccttgtcagtatcagccacgtccagtcctcagcagaccagcagtggaacaaacaataaaccttaccgaccctgggggacagaagttggagctttttagtaatgaactagtccgtaacttgaaagtatttcgatttcttggctttatatatcttgtggaaaggacgattcttcacagatccgcgaacacat

SEQ ID NO: 1597 - DNA, 746 bp, Homo sapiens
  source 1..746: mol_type = genomic DNA
accgccaccatgcctcttgaggaaagaaatgtattctggttaagtaaaggaaacctaacgggagaccaaggttactttgacgcgcacgcccttgctatggactatcggagtttgggatttcgggaatgcctggcagaagttgcgcgttatctgagcatcattgaaggactagatgcctctgacccgcttcgagttcgactggtttcgcatctcaacaactacgcttcccagcgggaagccgcgagcggcgcccacgcgggcctcggacacattccctgggggaccgtcttcggacatcacccgcacatcgcgcacccgctgttgctgccccagaacggccacgggaacgcgggcaccacggcctcacccacggaaccgcaccaccagggcaggctgggctcggcacatccggaggcgcctgctttgcgagcgccccctagcggcagcctcggaccggtgctccctgtggtcacctccgcctccaaactgtcgccgcctctgctctcctcagtggcctccctgtcggccttccccttctctttcggctccttccacttactgtctcccaatgcactgagcccttcagcacccacgcaggctgcaaaccttggcaagccctatagaccttgggggacggagatcggagctttttagtaatgaactagtccgtaacttgaaagtatttcgatttcttggctttatatatcttgtggaaaggacgagaggcaacatcatcgcctcgacac

SEQ ID NO: 1598 - DNA, 2363 bp, Homo sapiens
  source 1..2363: mol_type = genomic DNA
accgccaccatgggggaacacagtccagacaacaacatcatctactttgaggcagaggaagatgagctgacccccgatgataaaatgctcaggtttgtggataaaaacggactggtgccttcctcatctggaactgtttatgataggaccactgttcttattgagcaggaccctggcactttggaggatgaagatgacgacggacagtgcggagaacacttgccttttctagtagggggtgaagagggctttcacctgatagatcatgaagcaatgtcccagggttatgtgcagcacattatctcaccagatcagattcatttgacaataaaccctggttccacacccatgccaagaaatattgaaggtgcaaccctcactctgcagtcggaatgtccggaaacaaaacgtaaagaagtaaagcggtaccaatgtacctttgagggctgtccccgcacctacagcacagcaggcaacctgcgaacccaccagaagactcaccgaggagagtacacctttgtctgtaatcaggagggctgtggcaaagccttccttacctcttacagcctcaggatccacgtgcgagtgcacacgaaggagaagccatttgagtgtgacgtgcagggctgtgagaaggcattcaacacactgtacaggctgaaagcacatcagaggcttcacacagggaaaacgtttaactgtgaatctgaaggctgcagcaaatacttcaccacactcagtgatctgaggaagcacattcgaactcatacaggggaaaagccatttcggtgcgatcacgatggctgtggaaaagcatttgcagcaagccaccaccttaaaactcacgttcgtacacatactggtgaaagacccttcttctgccccagtaatggctgtgagaaaacattcagcactcaatacagtctcaaaagtcacatgaaaggtcatgataacaaaggacactcatacaatgcacttccacaacacaatggatcagaggatacaaatcactcactttgtctaagtgacttgagccttctgtccacagattctgaattgcgagaaaattccagtacgacccagggccaggacctcagcacaatttcaccagcaatcatctttgaatcaatgttccagaattcagatgatacggcaattcaggaagatcctcaacagacagcttccttgactgaaagttttaatggtgatgcagagtcagtcagtgatgttccgccatccacaggaaattcagcatctttatctcttccacttgtactgcaacctggcctctccgagccaccccagcctctactacctgcctcagctccgtctgctcctccgcctgctccctccctaggacctggctcccagcaagctgcatttggcaacccccctgctctcttacaacctccagaagtgcctgttccccacagcacacagtttgctgctaatcatcaagagtttcttccgcacccccaggcaccgcagcccattgtaccaggactttctgttgttgctggggcttctgcatcagcagcggcagtggcatcagctgtggcagcaccagccccaccacaaagtactactgagcccctgccagccatggtccagactctgcccctgggtgccaactctgtcctaactaataatcccacaataaccatcaccccaactcccaacacagctatcctgcagtccagcctagtcatgggagaacagaacttacaatggatattaaatggtgccaccagttctccacaaaaccaagaacaaattcagcaagcatctaaagttgagaaggtgttttttaccactgcagtaccagtagccagtagcccagggagctctgtccagcagattggcctcagtgttcctgtgatcatcatcaaacaagaagaggcatgtcagtgtcagtgtgcatgccgggactctgcaaaggagcgggcatccagcaggagaaagggctgctcctccccaccccctccagagccgagcccccaggctcctgatgggcccagcctgcagctcccagcgcagactttctcttcagcccctgttcccgggtcatcatcctctaccttgccctcctcctgtgagcaaagccgacaagcagagactccttcagaccctcagacagaaacattaagtgccatggatgtgtcagagtttctatccctccagagcctggacaccccgtccaatctgattcccattgaagcactactgcagggggaggaggagatgggcctcaccagcagcttctccaagtagtaatgaactagtccgtaacttgaaagtatttcgatttcttggctttatatatcttgtggaaaggacgatttgagagctgatttgctgttcgt

SEQ ID NO: 1599 - DNA, 2465 bp, Homo sapiens
  source 1..2465: mol_type = genomic DNA
accgccaccatggctgtgtggatacaagctcagcagctccaaggagaagcccttcatcagatgcaagcgttatatggccagcattttcccattgaggtgcggcattatttatcccagtggattgaaagccaagcatgggactcagtagatcttgataatccacaggagaacattaaggccacccagctcctggagggcctggtgcaggagctgcagaagaaggcagagcaccaggtgggggaagatgggtttttactgaagatcaagctggggcactatgccacacagctccagaacacgtatgaccgctgccccatggagctggtccgctgcatccgccatatattgtacaatgaacagaggttggtccgagaagccaacaatggtagctctccagctggaagccttgctgatgccatgtcccagaaacacctccagatcaaccagacgtttgaggagctgcgactggtcacgcaggacacagagaatgagttaaaaaagctgcagcagactcaggagtacttcatcatccagtaccaggagagcctgaggatccaagctcagtttggcccgctggcccagctgagcccccaggagcgtctgagccgggagacggccctccagcagaagcaggtgtctctggaggcctggttgcagcgtgaggcacagacactgcagcagtaccgcgtggagctggccgagaagcaccagaagaccctgcagctgctgcggaagcagcagaccatcatcctggatgacgagctgatccagtggaagcggcggcagcagctggccgggaacggcgggccccccgagggcagcctggacgtgctacagtcctggtgtgagaagttggccgagatcatctggcagaaccggcagcagatccgcagggctgagcacctctgccagcagctgcccatccccggcccagtggaggagatgctggccgaggtcaacgccaccatcacggacattatctcagccctggtgaccagcacgttcatcattgagaagcagcctcctcaggtcctgaagacccagaccaagtttgcagccactgtgcgcctgctggtgggcgggaagctgaacgtgcacatgaaccccccccaggtgaaggccaccatcatcagtgagcagcaggccaagtctctgctcaagaacgagaacacccgcaatgattacagtggcgagatcttgaacaactgctgcgtcatggagtaccaccaagccacaggcacccttagtgcccacttcaggaatatgtccctgaaacgaattaagaggtcagaccgtcgtggggcagagtcggtgacagaagaaaaatttacaatcctgtttgaatcccagttcagtgttggtggaaatgagctggtttttcaagtcaagaccctgtccctgccagtggtggtgatcgttcatggcagccaggacaacaatgcgacggccactgttctctgggacaatgcttttgcagagcctggcagggtgccatttgccgtgcctgacaaagtgctgtggccacagctgtgtgaggcgctcaacatgaaattcaaggccgaagtgcagagcaaccggggcctgaccaaggagaacctcgtgttcctggcgcagaaactgttcaacaacagcagcagccacctggaggactacagtggcctgtctgtgtcctggtcccagttcaacagggagaatttaccaggacggaattacactttctggcaatggtttgacggtgtgatggaagtgttaaaaaaacatctcaagcctcattggaatgatggggccattttggggtttgtaaacaagcaacaggcccatgacctactcattaacaagccagatgggaccttcctcctgagattcagtgactcagaaattggcggcatcaccattgcttggaagtttgattctcaggaaagaatgttttggaatctgatgccttttaccaccagagacttctccattcggtccctagccgaccgcttgggagacttgaattaccttatctacgtgtttcctgatcggccaaaagatgaagtatactccaaatactacacaccagttccctgcgagtctgctactgctaaagctgttgatggatacgtgaagccacagatcaagcaagtggtccctgagtttgtgaacgcatctgcagatgccgggggcggcagcgccacgtacatggaccaggccccctccccagctgtgtgtccccaggctcactataacatgtacccacagaaccctgactcagtccttgacaccgatggggacttcgatctggaggacacaatggacgtagcgcggcgtgtggaggagctcctgggccggccaatggacagtcagtggatcccgcacgcacaatcgtagtaatgaactagtccgtaacttgaaagtatttcgatttcttggctttatatatcttgtggaaaggacgattatcgcgagtgactctacatacg

SEQ ID NO: 1600 - DNA, 2396 bp, Homo sapiens
  source 1..2396: mol_type = genomic DNA
accgccaccatggcgggctggatccaggcccagcagctgcagggagacgcgctgcgccagatgcaggtgctgtacggccagcacttccccatcgaggtccggcactacttggcccagtggattgagagccagccatgggatgccattgacttggacaatccccaggacagagcccaagccacccagctcctggagggcctggtgcaggagctgcagaagaaggcggagcaccaggtgggggaagatgggtttttactgaagatcaagctggggcactacgccacgcagctccagtgcagctctccggctgggatcctggttgacgccatgtcccagaagcaccttcagatcaaccagacatttgaggagctgcgactggtcacgcaggacacagagaatgagctgaagaaactgcagcagactcaggagtacttcatcatccagtaccaggagagcctgaggatccaagctcagtttgcccagctggcccagctgagcccccaggagcgtctgagccgggagacggccctccagcagaagcaggtgtctctggaggcctggttgcagcgtgaggcacagacactgcagcagtaccgcgtggagctggccgagaagcaccagaagaccctgcagctgctgcggaagcagcagaccatcatcctggatgacgagctgatccagtggaagcggcggcagcagctggccgggaacggcgggccccccgagggcagcctggacgtgctacagtcctggtgtgagaagttggccgagatcatctggcagaaccggcagcagatccgcagggctgagcacctctgccagcagctgcccatccccggcccagtggaggagatgctggccgaggtcaacgccaccatcacggacattatctcagccctggtgaccagcacattcatcattgagaagcagcctcctcaggtcctgaagacccagaccaagtttgcagccaccgtacgcctgctggtgggcgggaagctgaacgtgcacatgaatcccccccaggtgaaggccaccatcatcagtgagcagcaggccaagtctctgcttaaaaatgagaacacccgcaacgagtgcagtggtgagatcctgaacaactgctgcgtgatggagtaccaccaagccacgggcaccctcagtgcccacttcaggaacatgtcactgaagaggatcaagcgtgctgaccggcggggtgcagagtccgtgacagaggagaagttcacagtcctgtttgagtctcagttcagtgttggcagcaatgagcttgtgttccaggtgaagactctgtccctacctgtggttgtcatcgtccacggcagccaggaccacaatgccacggctactgtgctgtgggacaatgcctttgctgagccgggcagggtgccatttgccgtgcctgacaaagtgctgtggccgcagctgtgtgaggcgctcaacatgaaattcaaggccgaagtgcagagcaaccggggcctgaccaaggagaacctcgtgttcctggcgcagaaactgttcaacaacagcagcagccacctggaggactacagtggcctgtccgtgtcctggtcccagttcaacagggagaacttgccgggctggaactacaccttctggcagtggtttgacggggtgatggaggtgttgaagaagcaccacaagccccactggaatgatggggccatcctaggttttgtgaataagcaacaggcccacgacctgctcatcaacaagcccgacgggaccttcttgttgcgctttagtgactcagaaatcgggggcatcaccatcgcctggaagtttgactccccggaacgcaacctgtggaacctgaaaccattcaccacgcgggatttctccatcaggtccctggctgaccggctgggggacctgagctatctcatctatgtgtttcctgaccgccccaaggatgaggtcttctccaagtactacactcctgtgctggctaaagctgttgatggatatgtgaaaccacagatcaagcaagtggtccctgagtttgtgaatgcatctgcagatgctgggggcagcagcgccacgtacatggaccaggccccctccccagctgtgtgcccccaggctccctataacatgtacccacagaaccctgaccatgtactcgatcaggatggagaattcgacctggatgagaccatggatgtggccaggcacgtggaggaactcttacgccgaccaatggacagtcttgactcccgcctctcgccccctgccggtcttttcacctctgccagaggctccctctcatagtaatgaactagtccgtaacttgaaagtatttcgatttcttggctttatatatcttgtggaaaggacgagagggacaccctagtagagaaacg

SEQ ID NO: 1601 - DNA, 2393 bp, Homo sapiens
  source 1..2393: mol_type = genomic DNA
accgccaccatggcgggctggatccaggcccagcagctgcagggagacgcgctgcgccagatgcaggtgctgtacggccagcacttccccatcgaggtccggcactacttggcccagtggattgagagccagccatgggatgccattgacttggacaatccccaggacagagcccaagccacccagctcctggagggcctggtgcaggagctgcagaagaaggcggagcaccaggtgggggaagatgggtttttactgaagatcaagctggggcactacgccacgcagctccagaaaacatatgaccgctgccccctggagctggtccgctgcatccggcacattctgtacaatgaacagaggctggtccgagaagccaacaattgcagctctccggctgggatcctggttgacgccatgtcccagaagcaccttcagatcaaccagacatttgaggagctgcgactggtcacgcaggacacagagaatgagctgaagaaactgcagcagactcaggagtacttcatcatccagtaccaggagagcctgaggatccaagctcagtttgcccagctggcccagctgagcccccaggagcgtctgagccgggagacggccctccagcagaagcaggtgtctctggaggcctggttgcagcgtgaggcacagacactgcagcagtaccgcgtggagctggccgagaagcaccagaagaccctgcagctgctgcggaagcagcagaccatcatcctggatgacgagctgatccagtggaagcggcggcagcagctggccgggaacggcgggccccccgagggcagcctggacgtgctacagtcctggtgtgagaagttggccgagatcatctggcagaaccggcagcagatccgcagggctgagcacctctgccagcagctgcccatccccggcccagtggaggagatgctggccgaggtcaacgccaccatcacggacattatctcagccctggtgaccagcacattcatcattgagaagcagcctcctcaggtcctgaagacccagaccaagtttgcagccaccgtacgcctgctggtgggcgggaagctgaacgtgcacatgaatcccccccaggtgaaggccaccatcatcagtgagcagcaggccaagtctctgcttaaaaatgagaacacccgcaacgagtgcagtggtgagatcctgaacaactgctgcgtgatggagtaccaccaagccacgggcaccctcagtgcccacttcaggaacatgtcactgaagaggatcaagcgtgctgaccggcggggtgcagagtccgtgacagaggagaagttcacagtcctgtttgagtctcagttcagtgttggcagcaatgagcttgtgttccaggtgaagggcagggtgccatttgccgtgcctgacaaagtgctgtggccgcagctgtgtgaggcgctcaacatgaaattcaaggccgaagtgcagagcaaccggggcctgaccaaggagaacctcgtgttcctggcgcagaaactgttcaacaacagcagcagccacctggaggactacagtggcctgtccgtgtcctggtcccagttcaacagggagaacttgccgggctggaactacaccttctggcagtggtttgacggggtgatggaggtgttgaagaagcaccacaagccccactggaatgatggggccatcctaggttttgtgaataagcaacaggcccacgacctgctcatcaacaagcccgacgggaccttcttgttgcgctttagtgactcagaaatcgggggcatcaccatcgcctggaagtttgactccccggaacgcaacctgtggaacctgaaaccattcaccacgcgggatttctccatcaggtccctggctgaccggctgggggacctgagctatctcatctatgtgtttcctgaccgccccaaggatgaggtcttctccaagtactacactcctgtgctggctaaagctgttgatggatatgtgaaaccacagatcaagcaagtggtccctgagtttgtgaatgcatctgcagatgctgggggcagcagcgccacgtacatggaccaggccccctccccagctgtgtgcccccaggctccctataacatgtacccacagaaccctgaccatgtactcgatcaggatggagaattcgacctggatgagaccatggatgtggccaggcacgtggaggaactcttacgccgaccaatggacagtcttgactcccgcctctcgccccctgccggtcttttcacctctgccagaggctccctctcatagtaatgaactagtccgtaacttgaaagtatttcgatttcttggctttatatatcttgtggaaaggacgatacaaggcacacgtgtctcacgtc

SEQ ID NO: 1602 - DNA, 1103 bp, Homo sapiens
  source 1..1103: mol_type = genomic DNA
accgccaccatggctgtgcgcggcgccaacaccttgacgtccttctccatccaggcgatcctcaacaagaaagaggagcgcggcgggctggccgcgccagaggggcgcccggcgcccgggggcacagcggcatcggtggccgcggctcccgctgtctgctgttggcggctctttggggagagggacgcgggcgcgttggggggcgccgaggactctctgctggcgtctcctgccggtaccagaacagctgcggggcggactgcggagagcccggaaggctgggactcggactccgcgctcagcgaggagaacgagagcaggcggcgctgcgcggacgcgcggggggccagcggggccggccttgcggggggatccttgagcctcggccagccggtctgtgagctggccgcttccaaagacctagaggaggaagccgcgggccggagcgacagcgagatgtccgccagcgtctcaggcgaccgcagcccaaggaccgaggacgacggtgttggccccagaggtgcacacgtgtccgcgctgtgcagcggggccggcggcgggggcggcagcgggccggcaggcgtcgcggaggaggaggaggagccggcggcgcccaagccacgcaagaagcgctcgcgggccgctttctcccacgcgcaggtcttcgagctggagcgccgctttaaccaccagcgctacctgtccgggcccgagcgcgcagacctggccgcgtcgctgaagctcaccgagacgcaggtgaaaatctggttccagaaccgtcgctacaagacaaagcgccggcagatggcagccgacctgctggcctcggcgcccgccgccaagaaggtggccgtaaaggtgctggtgcgcgacgaccagagacaatacctgcccggcgaagtgctgcggccaccctcgcttctgccactgcagccctcctactattacccgtactactgcctcccaggctgggcgctctccacctgcgcagctgccgcaggcacccagtagtaatgaactagtccgtaacttgaaagtatttcgatttcttggctttatatatcttgtggaaaggacgaagggtcagggtgagaggacggaag

SEQ ID NO: 1603 - DNA, 806 bp, Homo sapiens
  source 1..806: mol_type = genomic DNA
accgccaccatgctcagggttccggagccgcggcccggggaggcgaaagcggagggggccgcgccgccgaccccgtccaagccgctcacgtccttcctcatccaggacatcctgcgggacggcgcgcagcggcaaggcggccgcacgagcagccagagacagcgcgacccggagccggagccagagccagagccagagggaggacgcagccgcgccggggcgcagaacgaccagctgagcaccgggccccgcgccgcgccggaggaggccgagacgctggcagagaccgagccagaaaggcacttggggtcttatctgttggactctgaaaacacttcaggcgcccttccaaggcttccccaaacccctaagcagccgcagaagcgctcccgagctgccttctcccacactcaggtgatcgagttggagaggaagttcagccatcagaagtacctgtcggcccctgaacgggcccacctggccaagaacctcaagctcacggagacccaagtgaagatatggttccagaacagacgctataagactaagcgaaagcagctctcctcggagctgggagacttggagaagcactcctctttgccggccctgaaagaggaggccttctcccgggcctccctggtctccgtgtataacagctatccttactacccatacctgtactgcgtgggcagctggagcccagctttttggtagtaatgaactagtccgtaacttgaaagtatttcgatttcttggctttatatatcttgtggaaaggacgagtgatgcggtgtctatagacataa

SEQ ID NO: 1604 - DNA, 581 bp, Homo sapiens
  source 1..581: mol_type = genomic DNA
accgccaccatgctcagggttccggagccgcggcccggggaggccgagacgctggcagagaccgagccagaaaggcacttggggtcttatctgttggactctgaaaacacttcaggcgcccttccaaggcttccccaaacccctaagcagccgcagaagcgctcccgagctgccttctcccacactcaggtgatcgagttggagaggaagttcagccatcagaagtacctgtcggcccctgaacgggcccacctggccaagaacctcaagctcacggagacccaagtgaagatatggttccagaacagacgctataagactaagcgaaagcagctctcctcggagctgggagacttggagaagcactcctctttgccggccctgaaagaggaggccttctcccgggcctccctggtctccgtgtataacagctatccttactacccatacctgtactgcgtgggcagctggagcccagctttttggtagtaatgaactagtccgtaacttgaaagtatttcgatttcttggctttatatatcttgtggaaaggacgatgtattggatcaccatgagatgtg

SEQ ID NO: 1605 - DNA, 668 bp, Homo sapiens
  source 1..668: mol_type = genomic DNA
accgccaccatgcaccgggcgcggtggctcacgcctgtaatcccagcactttgggaggccgaggcgggcagatcacgaggtcaggaaatcgagaccatcttggctaacaagaaacaatcagctatgccttgggatcaagatccagaacaatcaactggaaattacagtgaagatgaacaaaatggaaagcagaaatggagagaagaaggagaagcaggcagaaagagagaacgagaaaaagaagaaaaaaacgaaaaggagctgcaagatgaacaggaaaacaaaaggaaaagggaaaatgagaaacagaaacagtatcccgagaaaagattagtcagcaaatccctcatgcatactctctgggcaaagtttaagttaaacaggtgccccactatacaagagagtctatcactgtcatttgaatttgacatgacacataaacagataagtcaatggttttgtaaaacgaggaagaaatataataaagaaatgtccaagagaaagcataagaaaaaacatatgagatggagatctctgtgttgccaaggctggtctcgaactcctgccctcaagtagtaatgaactagtccgtaacttgaaagtatttcgatttcttggctttatatatcttgtggaaaggacgaaaaccctcttgtctaaagatgttg

SEQ ID NO: 1606 - DNA, 1712 bp, Homo sapiens
  source 1..1712: mol_type = genomic DNA
accgccaccatggggccattgcaatttagagacgtggccatagaattctctctggaggagtggcattgcctggacactgcacagcggaatttatataggaatgtgatgttagagaactacagaaacctggtcttccttggtattgttgtctctaagccagacctcatcacctgtctggagcaaggaaaaaaacctttgaccatgaagaaacatgagatggtagccaacccctcagttacgtgttctcattttgcccgagatctttggccagagcagagcataaaagattctttccaaaaagtgacactgagaagatatgaaaactatggacatgacaatttacagtttaaaaagggctgtgaaagtgtagatgagtgtaaggtgcacaaaagaggttataatggacttaaccaatatttgacaactactcaaagcaaaatatttcagtgtgataaatatgtgaaagtcattcataaattttcaaattcaaacagacataagataagacatactggaaaaaaacctttcaaatgtatagaatgtggcaaagcttttaaccagtcttcaacccttactacacataagaaaattcatactggggagaaacccttcaaatgtgaagaatgtggcaaagccttcaactggtcctcacaccttactacacataagagaattcatactggagagaaacggtacaaatgtgaagactgtggcaaagcctttagccggttttcataccttactgcacataagataattcatagtggagagaaaccctacaaatgtgaagaatgtggcaaggcctttaagcgctcctctaaccttactacacataagataattcatactggagagaaaccctacaaatgtgaagaatgtggcaaggcctttaagcgctcctctatccttactgcgcataagataattcatagcggagagaaaccctacaaatgtgaagaatgtggcaaagcctttaagcacccctctgtccttactacacataaaagaattcatactggagagaaaccctacaaatgtgaagaatgtggcagagcctttaagtacttctcatcccttactacacacaagataattcatagtggagagaaaccctacaaatgtgaagaatgtggcaaagccttcaactggtcctcacaccttactacacataagagaattcatactggagagaaaccctacaaatgtgaagaatgtggcgaagcctttaagtactcctcttcccttactacacataagataatccatactggacagcaacccttcaagtgtgaagaatgtggcaaggcctttaagtgcttctctatccttactacacataagagaattcatactggagagaaaccctacaaatgtgaagaatgtggcaaagccttcaactcgtcctcacaccttactgcacataagagaattcatactggagagaaaccctacaaatgtgaacgatgtggcaaggcttttaagcgctcctttatccttactagacataagagaattcatactggagagaaaccctacaaatgtgaagaatgtggcaaaggctttaagtgcccctctacccttactacacataaggtaattcatactggagagaaactatagtaatgaactagtccgtaacttgaaagtatttcgatttcttggctttatatatcttgtggaaaggacgattggtttcgttaggtactgtgcac

SEQ ID NO: 1607 - DNA, 1352 bp, Homo sapiens
  source 1..1352: mol_type = genomic DNA
accgccaccatgaacctgccaagagctgagcgccctcgctccacaccgcagcgcagcctccgggactccgatggggaagacggtaaaatcgatgtcctgggagaggaggaagatgaagacgaggtggaagacgaggaggaggaggcgagacagcagttcctagagcagtcgctccagccggggctgcaggtggcccggtggggcggggttgcgcttccccgagagcacatcgagggcggcggcggcccgagtgacccttcagagtttggcaccaagttcagggcaccgccaaggtctgcggcggcctctgaagatgcccggcagccggcaaagcccccctactcgtacatcgcgctcatcaccatggccatcctgcaaaacccgcacaagcgcctcacgctcagcggcatctgcgccttcattagtggccgcttcccatactaccgccgcaagttccccgcctggcagaacagcatccgccacaacctctcgctgaacgactgcttcgttaagatcccccgcgagccgggccacccaggcaagggcaactactggagcctggaccccgcctcccaggacatgttcgacaatggcagctttctccggcgtaggaagcgtttcaagcgccaccaactgaccccgggagcccacctgccccaccccttccctctacctgctgcacacgccgccctgcacaacccccacccaggccctctgcttggggcccctgccccgccgcagccagtcccgggggcctaccccaacaccgcccccgggagacgcccttacgctctgctgcacccgcatcctcttcgctacctactgctctcggcccgcgtctatgccggggcaccgaagaaagcagaaggcgcggacctggcgaccccggcacccttcccgtgctgcagccctcacttggtcctcagccttgggaggagggcaagggtctggcgtcgccaccgggaggcggatgcttctctttcagcattgagagtattatgcaaggggtcaggggagcgggtacaggggctgcgcagagtttgtccccgaccgcgtggagctactgccacctgctccagcgaccatcaagcctgttgcatccccaaaccgctgcccctttgctgcaagtgtccgccgccgctgctgctcggacaattttgcagcaatagcagcagcatcaggaggactgcgccaacggctgcgctcccaccaagggcgcggtgctgggcgggcacctgtcggcctcgtcggcgctgctagtaatgaactagtccgtaacttgaaagtatttcgatttcttggctttatatatcttgtggaaaggacgataatcccgacatagcgaccacgga

SEQ ID NO: 1608 - DNA, 1352 bp, Homo sapiens
  source 1..1352: mol_type = genomic DNA
accgccaccatgaacctgccaagagctgagcgccctcgctccacaccgcagcgcagcctccgggactccgatggggaagacggtaaaatcgatgtcctgggagaggaggaagatgaagacgaggtggaagacgaggaggaggaggcgagacagcagttcctagagcagtcactccagccggggctgcaggtggcccggtggggcggggttgcgcttccccgagagcacatcgagggcggcggcggcccgagtgacccctcagagtttggcaccaagttcagggcaccgccaaggtctgcggcggcctctgaagatgcccggcagccggcaaagcccccctactcgtacatcgcgctcatcaccatggccatcctgcaaaacccgcacaagcgcctcacgctcagcggcatctgcgccttcattagtggccgcttcccatactaccgccgcaagttccccgcctggcagaacagcatccgccacaacctctcgctgaacgactgcttcgttaagatcccccgcgagccgggccacccaggcaagggcaactactggagcctggaccccgcctcccaggacatgttcgacaatggcagctttctccggcgtaggaagcgtttcaagcgccaccaactgaccccgggagcccacctgccccaccccttccctctacctgctgcgcacgccgccctgcacaacccccacccaggccctctgcttggggcccctgccccgccgcagccagtcccgggggcctaccccaacaccgcccccgggagatgcccttacgctctgctgcacccgcatcctcttcgctacctactgctctcggcccccgtctatgccggggcaccgaagaaagcagaaggcgcggacctggcgaccccggcacccttcccgtgctgcagccctcacttggtcctcagccttgggaggagggcaagggtctggcgtcgccaccgggaggcggatgcatctctttcagcattgagagtattatgcaaggggtcaggggagcgggtacaggggctgcgcagagtttgtccccgaccgcgtggagctactgccacctgctccagcgaccatcaagcctgttgcatccccaaaccgctgcccctttgctgcaagtgtccgccgccgctgctgctcggacaattttgcagcaatagcagcagcatcaggaggactgcgccaacggctgcgctcccaccaagggcgcggtgctgggcgggcacctgtcggcctcgtcggcgctgctagtaatgaactagtccgtaacttgaaagtatttcgatttcttggctttatatatcttgtggaaaggacgaatattggaggcgaccgacttcaca

SEQ ID NO: 1609 - DNA, 1355 bp, Homo sapiens
  source 1..1355: mol_type = genomic DNA
accgccaccatgaacctgccaagagctgagcgccttcgctccacaccgcagcgcagcctccgggactccgatggggaagacggtaaaatcgatgtcctgggagaggaggaagatgaagacgaggtggaagacgaggaggaggcggcgagccagcagttcctagagcagtcgctccagccggggctgcaggtggcccggtggggcggggttgcgcttccccgagagcacatcgagggcggcggcggcccgagcgacccctcagagtttggcaccaagttcagggcaccgccaaggtctgcggcggcctctgaagatgcccggcagccggcaaagcccccctactcgtacatcgcgctcatcaccatggccatcctgcaaaacccgcacaagcgcctcacgctcagcggcatctgcgccttcattagtggccgcttcccctactaccgccgcaagttccccgcctggcagaacagcatccgccacaacctctcgctgaacgactgcttcgttaagatcccccgcgagccgggccacccaggcaagggcaactactggagcctggaccccgcctcccaagacatgttcgacaatggcagctttctccggcgtaggaagcgtttcaagcgccaccaactgaccccgggagcccacctgccccaccccttccctctacctgctgcacacgccgccctgcacaacccccacccaggccctctgcttggggcccctgccccgccgcagccagtcccgggggcctaccccaacaccgcccccgggagacgcccttacgctctgctgcacccgcatcctcttcgctacctactgctctcggcccccgtctatgccggggcaccgaagaaagcagaaggcgcggccctggcgaccccggcacccttcccgtgctgcagccctcacttggtcctcagccttgggaggagggcaagggtctggcgtcgccaccgggaggcggatgcatctctttcagcattgagagtattatgcaaggggtcaggggagcgggtacaggggctgcgcagagtttgtccccgaccgcgtggagctactgccacctgctccagcgaccatcaagcctgttgcatccccagaccgctgcccctttgctgcaagtgtccgccgccgccgctgctcggacaattttgcagcaatagcagcagcatcaggaggaggactgcgccaacggctgcgctcccaccaagggcgcggtgctgggcgggcacctgtcggcctcgtcggccctgctagtaatgaactagtccgtaacttgaaagtatttcgatttcttggctttatatatcttgtggaaaggacgacaggattcctaacacgagcaccga

SEQ ID NO: 1610 - DNA, 1370 bp, Homo sapiens
  source 1..1370: mol_type = genomic DNA
accgccaccatgtttcgagctggggcagagggagcagagaaggagccctcaccgcggccggaatgcagagcggaccctggcccaggactgggtttccctttaggctcgggcctaccctggccctcgctgttggaatctccaggaggccgcattttagatatcccctgcaaagtgtgtggcgaccgcagctcggggaagcactacggggtctacgcctgcgacggctgctcaggttttttcaaacggagcatccgaaggaataggacctatgtctgcaaatctggaaaccagggaggctgtccggtggacaagacgcacagaaaccagtgcagggcgtgtcggctgaagaagtgtttggaagtcaacatgaacaaagacgccgtgcagcacgagcgggggcctcggacgtccaccatccgcaagcaagtggccctctacttccgtggacacaaggaggagaacggggccgccgcgcactttccctcggcggcgctccctgcgccggccttcttcaccgcggtcacgcagctggagccgcacggcctggagctggccgcggtgtccaccactccagagcggcagaccctcgtgagcctggctcagcccacgcccaagtacccccatgaagtgaatgggaccccaatgtatctctatgaagtggccacggagtcggtgtgtgaatcagctgccagacttctcttcatgagcatcaagtgggctaagagtgtgccagccttctccacgctgtctttgcaagaccagctgatgcttttggaagatgcttggagagaactgtttgttctaggaatagcacaatgggccattccggttgatgctaacactctactggctgtatctggcatgaacggtgacaacacagattcccagaagctgaacaagatcatatctgaaatacaggctttacaagaggtggtggctcgatttagacaactccggttagatgctactgaatttgcctgtctaaaatgcatcgtcactttcaaagccgttcctacacatagtggttctgaactgagaagtttccggaatgctgccgccattgcagcccttcaagatgaggctcagctaacgctcaacagctacatccataccagatatcccactcaaccctgtcgctttggaaaactcctgttgcttttgccagctttacgttctattagcccatcaactatagaagaagtgtttttcaaaaaaaccatcggcaatgtgccaattacaagactgctttcagatatgtacaaatccagtgatatctagtaatgaactagtccgtaacttgaaagtatttcgatttcttggctttatatatcttgtggaaaggacgagtgatgcctgtttcatggagtagt

SEQ ID NO: 1611 - DNA, 1205 bp, Homo sapiens
  source 1..1205: mol_type = genomic DNA
accgccaccatggagaccagaccaacagctctgatgagctccacagtggctgcagctgcgcctgcagctggggctgcctccaggaaggagtctccaggcagatggggcctgggggaggatcccacaggcgtgagcccctcgctccagtgccgcgtgtgcggagacagcagcagcgggaagcactatggcatctatgcctgcaacggctgcagcggcttcttcaagaggagcgtacggcggaggctcatctacaggtgccaggtgggggcagggatgtgccccgtggacaaggcccaccgcaaccagtgccaggcctgccggctgaagaagtgcctgcaggcggggatgaaccaggacgccgtgcagaacgagcgccagccgcgaagcacagcccaggtccacctggacagcatggagtccaacactgagtcccggccggagtccctggtggctcccccggccccggcagggcgcagcccacggggccccacacccatgtctgcagccagagccctgggccaccacttcatggccagccttataacagctgaaacctgtgctaagctggagccagaggatgctgatgagaatattgatgtcaccagcaatgaccctgagttcccctcctctccatactcctcttcctccccctgcggcctggacagcatccatgagacctcggctcgcctactcttcatggccgtcaagtgggccaagaacctgcctgtgttctccagcctgcccttccgggatcaggtgatcctgctggaagaggcgtggagtgaactctttctcctcggggccatccagtggtctctgcctctggacagctgtcctctgctggcaccgcccgaggcctctgctgccggtggtgcccagggccggctcacgctggccagcatggagacgcgtgtcctgcaggaaactatctctcggttccgggcattggcggtggaccccacggagtttgcctgcatgaaggccttggtcctcttcaagccagagacgcggggcctgaaggatcctgagcacgtagaggccttgcaggaccagtcccaagtgatgctgagccagcacagcaaggcccaccaccccagccagcccgtgaggtagtaatgaactagtccgtaacttgaaagtatttcgatttcttggctttatatatcttgtggaaaggacgagatcccaaggtgagtttatagagg

SEQ ID NO: 1612 - DNA, 1334 bp, Homo sapiens
  source 1..1334: mol_type = genomic DNA
accgccaccatggagaccagaccaacagctctgatgagctccacagtggctgcagctgcgcctgcagctggggctgcctccaggaaggagtctccaggcagatggggcctgggggaggatcccacaggcgtgagcccctcgctccagtgccgcgtgtgcggagacagcagcagcgggaagcactatggcatctatgcctgcaacggctgcagcggcttcttcaagaggagcgtacggcggaggctcatctacaggtgccaggtgggggcagggatgtgccccgtggacaaggcccaccgcaaccagtgccaggcctgccggctgaagaagtgcctgcaggcggggatgaaccaggacgccgtgcagaacgagcgccagccgcgaagcacagcccaggtccacctggacagcatggagtccaacactgagtcccggccggagtccctggtggctcccccggccccggcagggcgcagcccacggggccccacacccatgtctgcagccagagccctgggccaccacttcatggccagccttataacagctgaaacctgtgctaagctggagccagaggatgctgatgagaatattgatgtcaccagcaatgaccctgagttcccctcctctccatactcctcttcctccccctgcggcctggacagcatccatgagacctcggctcgcctactcttcatggccgtcaagtgggccaagaacctgcctgtgttctccagcctgcccttccgggatcaggtgatcctgctggaagaggcgtggagtgaactctttctcctcggggccatccagtggtctctgcctctggacagctgtcctctgctggcaccgcccgaggcctctgctgccggtggtgcccagggccggctcacgctggccagcatggagacgcgtgtcctgcaggaaactatctctcggttccgggcattggcggtggaccccacggagtttgcctgcatgaaggccttggtcctcttcaagccagagacgcggggcctgaaggatcctgagcacgtagaggccttgcaggaccagtcccaagtgatgctgagccagcacagcaaggcccaccaccccagccagcccgtgaggtttgggaaattgctcctgctcctcccgtctttgaggtttatcactgcggaacgcatcgagctcctctttttccgcaagaccatagggaatactccaatggagaagctcctttgtgatatgttcaaaaactagtaatgaactagtccgtaacttgaaagtatttcgatttcttggctttatatatcttgtggaaaggacgagggcccgcctgcccatataagggt

SEQ ID NO: 1613 - DNA, 4076 bp, Homo sapiens
  source 1..4076: mol_type = genomic DNA
accgccaccatgcatgtctttgtccagagtacctgtggagaagaaacaatggattccttagaccatatgctgacagatcctctggaacttggtccgtgtggagatggccatggcacgcgcatcatggaggattgcctcctgggaggcaccagagttagtctgcccgaggaccttctggaggatcctgagatcttctttgatgttgtcagcctctcaacatggcaggaagtgttaagtgattctcaacgtgaacacctccagcagtttctgccccagtttcctgaagacagtgctgagcagcagaatgaactcatcttagccttgttcagtggggagaacttccgctttggaaaccctctgcacattgcccagaagcttttccgagacggacactttaaccccgaggtggtcaagtaccggcagttatgcttcaagtcacagtacaagcgctacctcaactcccagcagcagtatttccatcggctgctgaagcaaattcttgcttcccggagtgatctgctggagatggcccggcggagtggccccgcccttcccttccggcagaaacgcccttcaccatcccgcacacctgaggagcgggagtggcggacccagcagcgctacttgaaggtcttaagggaagtgaaagaggagtgtggtgacacagccctgtcatctgatgaagaggccacgttggatttacaagaacaattttcttttgaagatctcagctcatggcttccgagctctccagcacgttctcctagtcctgcggtgcccctgcgggtggtgcccacactttcaaccacggatatgaaaactgcagataaagtagaactgggggacagtgacctgaagataatgttaaagaagcaccacgagaagcggaaacatcagccagatcacccggaccttttgacaggggacctgactctcaatgacatcatgactcgagtaaatgctggcaggaagggctctctggcagccttatatgacttggctgtccttaaaaaaaaggttaaggaaaaagaggaaaagaagaagaagaaaataaaaacgatcaaatcagaggcagaggacctggccgagccgctaagcagtactgaaggggtcgcacctctctcacaggccccctctccgctggcaattcctgctatcaaggaagagccccttgaagacctcaagccttgccttggaatcaatgaaatatcttccagcttcttctctcttctattagagatcttgctgctggagagtcaggctagccttcctatgctagaggagcgagttttggattggcagtcatcgccagccagctccctcaacagctggttctctgcggcccccaactgggctgagttggtactaccagccctgcagtatcttgctggagaaagtcgagctgttccttccagtttctctccatttgttgaattcaaagagaaaacccagcagtggaagttgcttggccaatcccaagataatgaaaaggaattagctgccctcttccagctatggctagagaccaaagatcaggccttctgtaagcaagaaaatgaagacagctcagatgccacaacacctgtccctcgggtaagaactgactatgtggtgcgtcccagcacgggggaggagaaacgggtttttcaggagcaggagcgttacaggtatagccaaccccataaggcgttcacctttcgcatgcacggctttgagtctgtggtggggccagtgaagggcgtgtttgacaaggagacctcgctcaacaaggctcgggagcactccctgctgcgctccgaccggcctgcctacgtcaccattctgtctcttgttcgggacgctgcggctcgactgcctaatggagaaggcacacgggcagagatctgtgaactgcttaaggactcccagtttcttgcaccagatgtcaccagcactcaggtaaatacagtagtgagtggtgcactggatcggctacattacgaaaaagatccctgtgtgaaatacgacattggacgaaagctgtggatctacctgcatcgtgaccggagtgaagaagagtttgagcggattcaccaagcacaagcagctgcagctaaagccagaaaagctcttcagcaaaaacccaagcccccatccaaggtgaagtccagtagcaaggagagctccataaaggtccttagcagtggcccttctgagcagagccagatgagcctcagtgactccagtatgccacccaccccagtcacacctgtaacccccaccacaccagcattgcccgccattcccatctcccctccacctgtatcggcagtgaacaaaagcggcccttccacagtctcagaaccagctaagtctagctcgggtgttcttctggtgtcttcaccaacaatgccacatctgggaacaatgctttccccagcttccagccagactgcacccagttctcaggctgccgcccgggtcgtgagccactctggctctgctggactgtctcaggtgcgagtggtggcccagcctagccttcctgctgttccccagcagtcgggagggccggcacagacattgccacagatgccagcaggaccgcagatccgggttccagccactgccacacagaccaaagtagtgccccagacagtaatggccactgtgcccgtcaaagcgcagactacggcagccactgtgcagcggcctggacccgggcagacagggctcacggtgacaagtctccctgccacagccagccctgtgagtaagccagccacgagttctcctgggacctctgctcccagtgcctccacggctgccgtcattcaaaatgtcacaggacagaacatcatcaagcaggtggcaatcactgggcagcttggtgtgaagccccaaacaggcaacagcattccactcacagccactaacttccgcatccagggtaaggatgtattgcgtctgccgccctcttccatcaccacagatgccaagggccagacggttctgcgaatcactccggacatgatggccacattggccaagtcccaggttaccacagtcaaattgacccaggacctcttcgggacaggaggcaacactacaggcaaaggcatctctgccaccttacacgtcacttccaatccagtacatgcagctgatagccctgccaaggccagttcagccagtgccccttcatccactccaacaggtaccactgtggtcaaagtgactcctgacctcaagccaacagaagcctcaagttcggcttttcgcttgatgccagctcttggcgtgagtgtggctgaccagaagggaaaaagcacagtggcctcttcagaagcaaaaccagctgccacgatccgcatcgtgcagggactgggagtgatgcctcccaaagcaggccagaccatcaccgttgcaacccacgccaagcaaggggcctcggtggccagtgggtctggaactgtccatacttcagcggtgtccttacccagtatgaatgctgctgtgtccaagactgtagctgtggcttctggggctgcaagcacccccatcagcatcagcacaggagcccccaccgtgcggcaggtccctgtcagcaccacggttgtgtccacgtcccaggctgggaagttgcctacacggatcacagttcccctctctgtgatcagccagccaatgaagggcaagagcgtggtcacagcccccatcatcaaaggcaaccttggagccaacctcagtgggttgggccgcaacatcatcctcacaactatgccagcaggcactaagctcattgctggcaataagcctgttagtttcctcactgctcagcagttgcagcagcttcagcagcaaggtcaggccacacaggtgcgcatccagactgtccctgcatcccatctccaacagggaacagcttctggctcctccaaagcagtctccactgttgttgtgactacagctccgtctcctaaacaggcacctgagcaacaatagtaatgaactagtccgtaacttgaaagtatttcgatttcttggctttatatatcttgtggaaaggacgatcccgctcgagtcgggcaccaggt

SEQ ID NO: 1614 - DNA, 4001 bp, Homo sapiens
  source 1..4001: mol_type = genomic DNA
accgccaccatggattccttagaccatatgctgacagatcctctggaacttggtccgtgtggagatggccatggcacgcgcatcatggaggattgcctcctgggaggcaccagagttagtctgcccgaggaccttctggaggatcctgagatcttctttgatgttgtcagcctctcaacatggcaggaagtgttaagtgattctcaacgtgaacacctccagcagtttctgccccagtttcctgaagacagtgctgagcagcagaatgaactcatcttagccttgttcagtggggagaacttccgctttggaaaccctctgcacattgcccagaagcttttccgagacggacactttaaccccgaggtggtcaagtaccggcagttatgcttcaagtcacagtacaagcgctacctcaactcccagcagcagtatttccatcggctgctgaagcaaattcttgcttcccggagtgatctgctggagatggcccggcggagtggccccgcccttcccttccggcagaaacgcccttcaccatcccgcacacctgaggagcgggagtggcggacccagcagcgctacttgaaggtcttaagggaagtgaaagaggagtgtggtgacacagccctgtcatctgatgaagaggatctcagctcatggcttccgagctctccagcacgttctcctagtcctgcggtgcccctgcgggtggtgcccacactttcaaccacggatatgaaaactgcagataaagtagaactgggggacagtgacctgaagataatgttaaagaagcaccacgagaagcggaaacatcagccagatcacccggaccttttgacaggggacctgactctcaatgacatcatgactcgagtaaatgctggcaggaagggctctctggcagccttatatgacttggctgtccttaaaaaaaaggttaaggaaaaagaggaaaagaagaagaagaaaataaaaacgatcaaatcagaggcagaggacctggccgagccgctaagcagtactgaaggggtcgcacctctctcacaggccccctctccgctggcaattcctgctatcaaggaagagccccttgaagacctcaagccttgccttggaatcaatgaaatatcttccagcttcttctctcttctattagagatcttgctgctggagagtcaggctagccttcctatgctagaggagcgagttttggattggcagtcatcgccagccagctccctcaacagctggttctctgcggcccccaactgggctgagttggtactaccagccctgcagtatcttgctggagaaagtcgagctgttccttccagtttctctccatttgttgaattcaaagagaaaacccagcagtggaagttgcttggccaatcccaagataatgaaaaggaattagctgccctcttccagctatggctagagaccaaagatcaggccttctgtaagcaagaaaatgaagacagctcagatgccacaacacctgtccctcgggtaagaactgactatgtggtgcgtcccagcacgggggaggagaaacgggtttttcaggagcaggagcgttacaggtatagccaaccccataaggcgttcacctttcgcatgcacggctttgagtctgtggtggggccagtgaagggcgtgtttgacaaggagacctcgctcaacaaggctcgggagcactccctgctgcgctccgaccggcctgcctacgtcaccattctgtctcttgttcgggacgctgcggctcgactgcctaatggagaaggcacacgggcagagatctgtgaactgcttaaggactcccagtttcttgcaccagatgtcaccagcactcaggtaaatacagtagtgagtggtgcactggatcggctacattacgaaaaagatccctgtgtgaaatacgacattggacgaaagctgtggatctacctgcatcgtgaccggagtgaagaagagtttgagcggattcaccaagcacaagcagctgcagctaaagccagaaaagctcttcagcaaaaacccaagcccccatccaaggtgaagtccagtagcaaggagagctccataaaggtccttagcagtggcccttctgagcagagccagatgagcctcagtgactccagtatgccacccaccccagtcacacctgtaacccccaccacaccagcattgcccgccattcccatctcccctccacctgtatcggcagtgaacaaaagcggcccttccacagtctcagaaccagctaagtctagctcgggtgttcttctggtgtcttcaccaacaatgccacatctgggaacaatgctttccccagcttccagccagactgcacccagttctcaggctgccgcccgggtcgtgagccactctggctctgctggactgtctcaggtgcgagtggtggcccagcctagccttcctgctgttccccagcagtcgggagggccggcacagacattgccacagatgccagcaggaccgcagatccgggttccagccactgccacacagaccaaagtagtgccccagacagtaatggccactgtgcccgtcaaagcgcagactacggcagccactgtgcagcggcctggacccgggcagacagggctcacggtgacaagtctccctgccacagccagccctgtgagtaagccagccacgagttctcctgggacctctgctcccagtgcctccacggctgccgtcattcaaaatgtcacaggacagaacatcatcaagcaggtggcaatcactgggcagcttggtgtgaagccccaaacaggcaacagcattccactcacagccactaacttccgcatccagggtaaggatgtattgcgtctgccgccctcttccatcaccacagatgccaagggccagacggttctgcgaatcactccggacatgatggccacattggccaagtcccaggttaccacagtcaaattgacccaggacctcttcgggacaggaggcaacactacaggcaaaggcatctctgccaccttacacgtcacttccaatccagtacatgcagctgatagccctgccaaggccagttcagccagtgccccttcatccactccaacaggtaccactgtggtcaaagtgactcctgacctcaagccaacagaagcctcaagttcggcttttcgcttgatgccagctcttggcgtgagtgtggctgaccagaagggaaaaagcacagtggcctcttcagaagcaaaaccagctgccacgatccgcatcgtgcagggactgggagtgatgcctcccaaagcaggccagaccatcaccgttgcaacccacgccaagcaaggggcctcggtggccagtgggtctggaactgtccatacttcagcggtgtccttacccagtatgaatgctgctgtgtccaagactgtagctgtggcttctggggctgcaagcacccccatcagcatcagcacaggagcccccaccgtgcggcaggtccctgtcagcaccacggttgtgtccacgtcccaggctgggaagttgcctacacggatcacagttcccctctctgtgatcagccagccaatgaagggcaagagcgtggtcacagcccccatcatcaaaggcaaccttggagccaacctcagtgggttgggccgcaacatcatcctcacaactatgccagcaggcactaagctcattgctggcaataagcctgttagtttcctcactgctcagcagttgcagcagcttcagcagcaaggtcaggccacacaggtgcgcatccagactgtccctgcatcccatctccaacagggaacagcttctggctcctccaaagcagtctccactgttgttgtgactacagctccgtctcctaaacaggcacctgagcaacaatagtaatgaactagtccgtaacttgaaagtatttcgatttcttggctttatatatcttgtggaaaggacgacacagagtgtagtcaattaacgcc

SEQ ID NO: 1615 - DNA, 1370 bp, Homo sapiens
  source 1..1370: mol_type = genomic DNA
accgccaccatgccgcgctcatttctcgtcaaaagcaagaaggctcacagctaccaccagccgcgctccccaggaccagactattccctccgtttagagaatgtaccggcgcctagccgagcagacagcacttcaaatgcaggcggggcgaaggcggagccccgggaccgtttgtcccccgaatcgcagctgaccgaagccccagacagagcctccgcatccccagacagctgcgaaggcagcgtctgcgaacggagctcggagtttgaggacttctggaggcccccgtcaccctccgcgtctccagcctcggagaagtcaatgtgcccatcgctggacgaagcccagcccttccccctgcctttcaaaccgtactcatggagcggcctggcgggttctgacctgcggcacctggtgcagagctaccgaccgtgtggggccctggagcgtggcgctggcctgggcctcttctgcgaacccgccccggagcctggccacccggccgcgctgtacggcccgaagcgggctgccggcggcgcgggggccggggcgccagggagctgcagcgcaggggccggtgccaccgctggccctggcctagggctctacggcgacttcgggtctgcggcagccgggctgtatgagaggcccacggcagcggcgggcttgctgtaccccgagcgtggccacgggctgcacgcagacaagggcgctggcgtcaaggtggagtcggagctgctgtgcacccgcctgctgctgggcggcggctcctacaagtgcatcaagtgcagcaaggtgttctccacgccgcacgggctcgaggtgcacgtgcgcaggtcccacagcggtaccagaccctttgcctgcgagatgtgcggcaagaccttcgggcacgcggtgagcctggagcagcacaaagccgtgcactcgcaggaacggagctttgactgtaagatctgtgggaagagcttcaagaggtcatccacactgtccacacacctgcttatccactcagacactcggccctacccctgtcagtactgtggcaagaggttccaccagaagtcagacatgaagaaacacactttcatccacactggtgagaagcctcacaagtgccaggtgtgcggcaaggcattcagccagagctccaacctcatcacccacagccgcaaacacacaggcttcaagcccttcggctgcgacctctgtgggaagggtttccagaggaaggtggacctccgaaggcaccgggagacgcagcatgggctcaaatagtaatgaactagtccgtaacttgaaagtatttcgatttcttggctttatatatcttgtggaaaggacgatttgctgtatgtctaaatcattag

SEQ ID NO: 1616 - DNA, 788 bp, Homo sapiens
  source 1..788: mol_type = genomic DNA
accgccaccatggagcgggtgaagatgatcaacgtgcagcgtctgctggaggctgccgagtttttggagcgccgggagcgagagtgtgaacatggctacgcctcttcattcccgtccatgccgagcccccgactgcagcattcaaagcccccacggaggttgagccgggcacagaaacacagcagcgggagcagcaacaccagcactgccaacagatctacacacaatgagctggaaaagaatcgacgagctcatctgcgcctttgtttagaacgcttaaaagttctgattccactaggaccagactgcacccggcacacaacacttggtttgctcaacaaagccaaagcacacatcaagaaacttgaagaagctgaaagaaaaagccagcaccagctcgagaatttggaacgagaacagagatttttaaagtggcgactggaacagctgcagggtcctcaggagatggaacgaatacgaatggacagcattggatcaactatttcttcagatcgttctgattcagagcgagaggagattgaagtggatgttgaaagcacagagttctcccatggagaagtggacaatataagtaccaccagcatcagtgacattgatgaccacagcagcctgccgagtattgggagtgacgagggttactccagtgccagtgtcaaactttcattcacttcatagtaatgaactagtccgtaacttgaaagtatttcgatttcttggctttatatatcttgtggaaaggacgaaaccgatgaccgcttatatgtacg

SEQ ID NO: 1617 - DNA, 650 bp, Homo sapiens
  source 1..650: mol_type = genomic DNA
accgccaccatgccgagcccccgactgcagcattcaaagcccccacggaggttgagccgggcacagaaacacagcagcgggagcagcaacaccagcactgccaacagacgagctcatctgcgcctttgtttagaacgcttaaaagttctgattccactaggaccagactgcacccggcacacaacacttggtttgctcaacaaagccaaagcacacatcaagaaacttgaagaagctgaaagaaaaagccagcaccagctcgagaatttggaacgagaacagagatttttaaagtggcgactggaacagctgcagggtcctcaggagatggaacgaatacgaatggacagcattggatcaactatttcttcagatcgttctgattcagagcgagaggagattgaagtggatgttgaaagcacagagttctcccatggagaagtggacaatataagtaccaccagcatcagtgacattgatgaccacagcagcctgccgagtattgggagtgacgagggttactccagtgccagtgtcaaactttcattcacttcatagtaatgaactagtccgtaacttgaaagtatttcgatttcttggctttatatatcttgtggaaaggacgattcgcaccagaacagtgcgcgatt

SEQ ID NO: 1618 - DNA, 989 bp, Homo sapiens
  source 1..989: mol_type = genomic DNA
accgccaccatgggcaaacgcgggcggccgcgcaaggaggcgcgctgcgagggcgcggggctggcccccgccgcgcccccggctgtgccccccgccgtggccgcgccccagcccccggccctgcccgaggaccccgctggggccaagcccaggtgccccttctcagacattttcaacaccagcgagaactcgatggagaagcacatcaacacttttctgcagaacgtgcagattctgctcgaggccgccagctacctggagcagatcgagaaagaaaacaaaaagtgtgaacatggctacgcctcttcattcccgtccatgccgagcccccgactgcagcattcaaagcccccacggaggttgagccgggcacagaaacacagcagcgggagcagcaacaccagcactgccaacagatctacacacaatgagctggaaaagaatcgacgagctcatctgcgcctttgtttagaacgcttaaaagttctgattccactaggaccagactgcacccggcacacaacacttggtttgctcaacaaagccaaagcacacatcaagaaacttgaagaagctgaaagaaaaagccagcaccagctcgagaatttggaacgagaacagagatttttaaagtggcgactggaacagctgcagggtcctcaggagatggaacgaatacgaatggacagcattggatcaactatttcttcagatcgttctgattcagagcgagaggagattgaagtggatgttgaaagcacagagttctcccatggagaagtggacaatataagtaccaccagcatcagtgacattgatgaccacagcagcctgccgagtattgggagtgacgagggttactccagtgccagtgtcaaactttcattcacttcatagtaatgaactagtccgtaacttgaaagtatttcgatttcttggctttatatatcttgtggaaaggacgagatcggtactgggctgcactaaag

SEQ ID NO: 1619 - DNA, 2120 bp, Homo sapiens
  source 1..2120: mol_type = genomic DNA
accgccaccatgatccagtcacagatatcatttgaggatgtggctgtggatttcacgctggaggaatggcagctacttaatcctactcagaagaacttgtacagagatgtgatgttggagaactatagcaatctggttttcttgggttttcaaattctcaaacctgatgcaatgttcaaactggaacaacaagatccatggataataggtcaagaaatcctaaatcagaacttttcagaagtctggctagataatcccaaaatgtggctccgagataatcaagacaaccttaaaagtatggagagaggccataaatatgatgtttttggaaaaatatttaattcaagcataaacattgttcatgtaggactgcgatcccataaatgtggcacaggagaaaaaagtttgaaatgtccttttgatttgcttattccaaaaaataattgtgaaagaaagaaaattgatgaactcaataagaaattattgttctgtatcaaacctggcagaacccatggtgggataaaatactgtgattgcagtacatgtagaaaatccagcaacgaagagccatggctcactgctaatcacataacacacacaggagtctatttatgcatggaatgtggcagattttttaacaagaagtcacaacttgttatacaccagagaactcatacaggagagaagccctatcaatgcagtgagtgtggaaaagccttttcacagaagtcactgctcacggttcatcaaagaactcactcaggagaaaaaccgcatgggtgcagcgaatgtcagaaagcttttagtaggaagtcactcctcattttacatcagagaattcatactggagagaagccgtatggatgcagtgaatgtggaaaagccttcagtaggaagtcgcagcttaaaagacatcagataacgcacacaatagagaaaccctacagttgcagtgagtgtgggaaagcattctcccagaaattaaaactcatcacacatcagagagcgcacacaggagagaaaccctatccatgtagtcactgtggaaaagccttcttttggaagtcgcagctgattactcatcagaggacccacacagggaagaaaccttacggatgtggtgagtgtcaaaaagccttcagcaggaactcacttctcattaggcatcagaggattcatacaggagagaagccctacgaatgcaacgaatgtggtgaagccttcatcagaaaaccacagctgattaaacatcagataactcacacaggagagaagaactatcgatgcagtgattgtgaggaggccttctttaagaagtcagagttaataagacatcaaaaaattcacttaggagagaaaccatatggatgcattcaatgtgggaaaaccttctttgggaagtcccagctcctaacgcatcacagaacacacactggggagaagccttatgaatgcagtgagtgtgggaaggccttcacccagaagtcaagcctgatatcacatcagagaacacatacaggtgagaaaccctatgaatgcagtgaatgcaggaaaaccttcagtgagaagtcaagtctcattcatcatcagagaacccatactggagaaaagccctttgaatgtagtgaatgtaggaaagcttttgcctggaagccacagcttcttaggcatcagagaattcatacaggggagaaaccctatgaatgcagtgaatgtgggaaagcatttgttcagaaagtgcagctcattaagcatcaaagaaatcacacaggagagaaaacctatggatgcagcgattgtgcaaaagctttctttgagaaggcacagctgattatacatcagagaattcatacaggagagagaccatataaatgtggtgaatgtgggaaatctttcacaagaaagtcacaccttatgaggcatcagaggattcatacaggagataaatactatggatgcaatgagtgtgggaccaccttcaacaggaagtcgcagcttatgatacatcagagaaatcatataatatagtaatgaactagtccgtaacttgaaagtatttcgatttcttggctttatatatcttgtggaaaggacgaatagttggagtataggtcgataac

SEQ ID NO: 1620 - DNA, 2027 bp, Homo sapiens
  source 1..2027: mol_type = genomic DNA
accgccaccatgatccagtcacagatatcatttgaggatgtggctgtggatttcacgctggaggaatggcagctacttaatcctactcagaagaacttgtacagagatgtgatgttggagaactatagcaatctggttttcttggaagtctggctagataatcccaaaatgtggctccgagataatcaagacaaccttaaaagtatggagagaggccataaatatgatgtttttggaaaaatatttaattcaagcataaacattgttcatgtaggactgcgatcccataaatgtggcacaggagaaaaaagtttgaaatgtccttttgatttgcttattccaaaaaataattgtgaaagaaagaaaattgatgaactcaataagaaattattgttctgtatcaaacctggcagaacccatggtgggataaaatactgtgattgcagtacatgtagaaaatccagcaacgaagagccatggctcactgctaatcacataacacacacaggagtctatttatgcatggaatgtggcagattttttaacaagaagtcacaacttgttatacaccagagaactcatacaggagagaagccctatcaatgcagtgagtgtggaaaagccttttcacagaagtcactgctcacggttcatcaaagaactcactcaggagaaaaaccgcatgggtgcagcgaatgtcagaaagcttttagtaggaagtcactcctcattttacatcagagaattcatactggagagaagccgtatggatgcagtgaatgtggaaaagccttcagtaggaagtcgcagcttaaaagacatcagataacgcacacaatagagaaaccctacagttgcagtgagtgtgggaaagcattctcccagaaattaaaactcatcacacatcagagagcgcacacaggagagaaaccctatccatgtagtcactgtggaaaagccttcttttggaagtcgcagctgattactcatcagaggacccacacagggaagaaaccttacggatgtggtgagtgtcaaaaagccttcagcaggaactcacttctcattaggcatcagaggattcatacaggagagaagccctacgaatgcaacgaatgtggtgaagccttcatcagaaaaccacagctgattaaacatcagataactcacacaggagagaagaactatcgatgcagtgattgtgaggaggccttctttaagaagtcagagttaataagacatcaaaaaattcacttaggagagaaaccatatggatgcattcaatgtgggaaaaccttctttgggaagtcccagctcctaacgcatcacagaacacacactggggagaagccttatgaatgcagtgagtgtgggaaggccttcacccagaagtcaagcctgatatcacatcagagaacacatacaggtgagaaaccctatgaatgcagtgaatgcaggaaaaccttcagtgagaagtcaagtctcattcatcatcagagaacccatactggagaaaagccctttgaatgtagtgaatgtaggaaagcttttgcctggaagccacagcttcttaggcatcagagaattcatacaggggagaaaccctatgaatgcagtgaatgtgggaaagcatttgttcagaaagtgcagctcattaagcatcaaagaaatcacacaggagagaaaacctatggatgcagcgattgtgcaaaagctttctttgagaaggcacagctgattatacatcagagaattcatacaggagagagaccatataaatgtggtgaatgtgggaaatctttcacaagaaagtcacaccttatgaggcatcagaggattcatacaggagataaatactatggatgcaatgagtgtgggaccaccttcaacaggaagtcgcagcttatgatacatcagagaaatcatataatatagtaatgaactagtccgtaacttgaaagtatttcgatttcttggctttatatatcttgtggaaaggacgaggtgcccgcatagggcgctctgac

SEQ ID NO: 1621 - DNA, 3821 bp, Homo sapiens
  source 1..3821: mol_type = genomic DNA
accgccaccatggagctccccaactacagccggcagctgctgcagcagctgtacactctgtgcaaggagcagcagttctgtgattgcaccatctccattggtaccatttacttcagggctcacaagcttgtcctggctgctgccagcctcctgttcaaaaccctgctggataacacagataccatctccatcgatgcatctgtggtgagccccgaggagtttgcgctcttgttggaaatgatgtacacgggcaaactacctgtgggcaagcacaacttctccaaaatcatctccttagcagacagtctacagatgtttgatgtagctgttagctgcaaaaatcttctgaccagccttgtaaactgctcggttcagggtcaggtggtaagggatgtctctgcgccatcctcagagacattcagaaaggaaccagagaagcctcaagtagaaatcctttcatctgaaggtgctggagagcctcattcttccccagagcttgctgccactccagggggccctgtgaaagctgagactgaggaagcagcccattcagtttcacaagagatgagtgtgaattctcccacagcccaggagagccagaggaatgcagaaaccccagcggagactcctactacagctgaagcttgttccccctcccctgctgtgcaaacctttagtgaggcaaagaagacaagcacagaaccaggatgtgaaaggaaacactaccagctgaattttcttctagaaaatgaaggtgtcttctcagatgcactcatggttacccaggatgttttaaaaaaactagaaatgtgttcagaaattaaaggtccacagaaggagatgatagtgaaatgtttcgagggtgaaggaggacattcagcattccagagaatcctgggtaaagtaagagaggaaagcctggatgttcaaactgttgtgtccctgttgaggctgtaccaatattctaatcctgcagtaaaaacagcactattagacaggaagccagaagatgtagacacagtgcagccaaaagggagcacagaggagggaaagaccttgtctgttctgttactagaacacaaagaggacctgatacagtgtgtaacacagctgagacctattatggagtccctggaaacagccaaggaggaattcctgactggcactgaaaaaagggtgattctgaattgctgtgagggcagaacacccaaggagacaatagaaaatttgttgcacagaatgactgaagagaagacgctgactgctgagggtttggtaaaactcctccaggctgtgaagacgactttcccaaacctgggccttctgctagagaagttgcagaaatcagccactttgccaagcaccacagtccaaccaagccctgatgattatgggactgagctattgagacgctatcatgaaaacctctctgagattttcacagacaaccagattttattaaagatgatctcacacatgacaagtttagcccctggagaaagagaggtcatggagaagcttgtgaaacgtgactctggttcaggtggtttcaattctctgatatcagcagttctagaaaagcagactctctctgccacagccatttggcaactgctgctggtggttcaggagacaaagacctgtccattggacctgctcatggaggaaatacgaagggagcctggtgccgatgctttcttccgggcagtgaccaccccagaacatgccactttagaaacaatcctgaggcataaccagttgatcttggaggccatccaacagaagattgagtacaagctctttacctcggaggaggagcacctggcagagactgtgaaagagattctgagcattccctctgagacagccagccctgaagcttccctgagagcagtgctgagcagagccatggaaaaatcagtcccggccattgaaatatgccacctcctgtgcagtgtccacaaatcttttccaggcctgcagcctgtcatgcaggagttggcatacattggtgtccttactaaggaagatggagagaaggaaacgtggaaggtgagtaataaatttcaccttgaagccaacaacaaagaagatgaaaaggcagccaaagaagacagccagcctggggaacagaatgatcaaggagagactggttccttgccaggacagcaagagaaagaggcttcagcctccccagaccctgccaagaagagcttcatctgtaaggcctgcgacaaaagcttccatttctactgccgcctaaaggtgcacatgaagcgctgccgggtggctaagagcaaacaggtgcagtgtaaggagtgcagtgagaccaaggattcaaagaaagagctggacaaacatcagctggaggcccatggtgcaggtggagagcccgatgcccccaagaagaagaagaagaggcttccagtgacatgtgacctctgtggcagagaatttgcccatgcctcaggcatgcagtaccataagctgacagagcacttcgatgagaagcctttctcctgtgaagagtgtggggcgaagtttgcagccaattccaccctgaagaaccaccttcgccttcacaccggggaccgcccgttcatgtgcaagcactgcctcatgaccttcacccaggcctccgccctggcctatcacaccaagaagaagcactcagaagggaaaatgtatgcatgccagtactgtgatgctgtgtttgcccagtctattgagctgtcccgccacgtgaggacccacaccggggacaagccctatgtctgcagagactgtggcaagggcttccggcaagccaatggcctctccatccatctgcacacctttcacaacatagaagatccttatgactgcaagaagtgcaggatgagtttccccactcttcaggatcaccggaagcacatccatgaggtgcactccaaagagtaccacccctgccccacgtgtgggaagatcttcagtgccccgtccatgctggagcggcacgtggtgacccacgttggagggaagcccttcagctgcgggatctgcaacaaggcctaccagcaattgtctggtttgtggtaccacaatcgaacccaccaccctgacgtatttgctgctcagaaccaccgatcttccaagttctcatcactccagtgcagctcctgtgacaaaaccttccccaacaccattgagcacaagaagcacatcaaagcagaacatgcagatatgaagttccatgaatgtgaccagtgtaaggagctcttccccacgccagccttgctgcaggttcatgtcaagtgccagcattcagggtcccagccattccggtgcttgtactgtgctgctactttccgttttcctggagcattgcagcaccatgtcaccacggagcacttcaagcagtcagagaccaccttcccctgtgagctctgtggggaactcttcacctcccaggcccagcttgacagtcacctggaatctgagcacccaaaggtgatgagcacggaaacccaggccgcagcctcacagatggcgcaggtgatccaaaccccagagccggtggccccgacagagcaggtgatcactttggaggagacccagcttgccgggtcgcaggtgtttgtgacgttgccagattctcaggcatctcaggccagctctgagctcgtggcggtgactgtggaggacttgctggatggcacagtgacgctgatctgtggtgaggccaaatagtaatgaactagtccgtaacttgaaagtatttcgatttcttggctttatatatcttgtggaaaggacgaatttcaaactgctctgctgatatc

SEQ ID NO: 1622 - DNA, 3485 bp, Homo sapiens
  source 1..3485: mol_type = genomic DNA
accgccaccatggagctccccaactacagccggcagctgctgcagcagctgtacactctgtgcaaggagcagcagttctgtgattgcaccatctccattggtaccatttacttcagggctcacaagcttgtcctggctgctgccagcctcctgttcaaaaccctgctggataacacagataccatctccatcgatgcatctgtggtgagccccgaggagtttgcgctcttgttggaaatgatgtacacgggcaaactacctgtgggcaagcacaacttctccaaaatcatctccttagcagacagtctacagatgtttgatgtagctgttagctgcaaaaatcttctgaccagccttgtaaactgctcggttcagggtcaggtggtaagggatgtctctgcgccatcctcagagacattcagaaaggaaccagagaagcctcaagtagaaatcctttcatctgaaggtgctggagagcctcattcttccccagagcttgctgccactccagggggccctgtgaaagctgagactgaggaagcagcccattcagtttcacaagagatgagtgtgaattctcccacagcccaggagagccagaggaatgcagaaaccccagcggagactcctactacagctgaagcttgttccccctcccctgctgtgcaaacctttagtgaggcaaagaagacaagcacagaaccaggatgtgaaaggaaacactaccagctgaattttcttctagaaaatgaaggtgtcttctcagatgcactcatggttacccaggatgttttaaaaaaactagaaatgtgttcagaaattaaaggtccacagaaggaggtgattctgaattgctgtgagggcagaacacccaaggagacaatagaaaatttgttgcacagaatgactgaagagaagacgctgactgctgagggtttggtaaaactcctccaggctgtgaagacgactttcccaaacctgggccttctgctagagaagttgcagaaatcagccactttgccaagcaccacagtccaaccaagccctgatgattatgggactgagctattgagacgctatcatgaaaacctctctgagattttcacagacaaccagattttattaaagatgatctcacacatgacaagtttagcccctggagaaagagaggtcatggagaagcttgtgaaacgtgactctggttcaggtggtttcaattctctgatatcagcagttctagaaaagcagactctctctgccacagccatttggcaactgctgctggtggttcaggagacaaagacctgtccattggacctgctcatggaggaaatacgaagggagcctggtgccgatgctttcttccgggcagtgaccaccccagaacatgccactttagaaacaatcctgaggcataaccagttgatcttggaggccatccaacagaagattgagtacaagctctttacctcggaggaggagcacctggcagagactgtgaaagagattctgagcattccctctgagacagccagccctgaagcttccctgagagcagtgctgagcagagccatggaaaaatcagtcccggccattgaaatatgccacctcctgtgcagtgtccacaaatcttttccaggcctgcagcctgtcatgcaggagttggcatacattggtgtccttactaaggaagatggagagaaggaaacgtggaaggtgagtaataaatttcaccttgaagccaacaacaaagaagatgaaaaggcagccaaagaagacagccagcctggggaacagaatgatcaaggagagactggttccttgccaggacagcaagagaaagaggcttcagcctccccagaccctgccaagaagagcttcatctgtaaggcctgcgacaaaagcttccatttctactgccgcctaaaggtgcacatgaagcgctgccgggtggctaagagcaaacaggtgcagtgtaaggagtgcagtgagaccaaggattcaaagaaagagctggacaaacatcagctggaggcccatggtgcaggtggagagcccgatgcccccaagaagaagaagaagaggcttccagtgacatgtgacctctgtggcagagaatttgcccatgcctcaggcatgcagtaccataagctgacagagcacttcgatgagaagcctttctcctgtgaagagtgtggggcgaagtttgcagccaattccaccctgaagaaccaccttcgccttcacaccggggaccgcccgttcatgtgcaagcactgcctcatgaccttcacccaggcctccgccctggcctatcacaccaagaagaagcactcagaagggaaaatgtatgcatgccagtactgtgatgctgtgtttgcccagtctattgagctgtcccgccacgtgaggacccacaccggggacaagccctatgtctgcagagactgtggcaagggcttccggcaagccaatggcctctccatccatctgcacacctttcacaacatagaagatccttatgactgcaagaagtgcaggatgagtttccccactcttcaggatcaccggaagcacatccatgaggtgcactccaaagagtaccacccctgccccacgtgtgggaagatcttcagtgccccgtccatgctggagcggcacgtggtgacccacgttggagggaagcccttcagctgcgggatctgcaacaaggcctaccagcaattgtctggtttgtggtaccacaatcgaacccaccaccctgacgtatttgctgctcagaaccaccgatcttccaagttctcatcactccagtgcagctcctgtgacaaaaccttccccaacaccattgagcacaagaagcacatcaaagcagaacatgcagatatgaagttccatgaatgtgaccagtgtaaggagctcttccccacgccagccttgctgcaggttcatgtcaagtgccagcattcagggtcccagccattccggtgcttgtactgtgctgctactttccgttttcctggagcattgcagcaccatgtcaccacggagcacttcaagcagtcagagaccaccttcccctgtgagctctgtggggaactcttcacctcccaggcccagcttgacagtcacctggaatctgagcacccaaaggtgatgagcacggaaacccaggccgcagcctcacagatggcgcaggtgatccaaaccccagagccggtggccccgacagagcaggtgatcactttggaggagacccagcttgccgggtcgcaggtgtttgtgacgttgccagattctcaggcatctcaggccagctctgagctcgtggcggtgactgtggaggacttgctggatggcacagtgacgctgatctgtggtgaggccaaatagtaatgaactagtccgtaacttgaaagtatttcgatttcttggctttatatatcttgtggaaaggacgaacacaatgtagagcagattggtta

SEQ ID NO: 1623 - DNA, 2831 bp, Homo sapiens
  source 1..2831: mol_type = genomic DNA
accgccaccatgaagaagaggagaaaggttacttcaaatcttgagaagatccatctaggctatcataaagattcttcagaaggaaatgttgcagtggagtgtgaccaagtgacctatactcattctgcaggaagaccaactcctgaagctcttcactgttaccaggaacttcctccctctccagatcagagaaagcttttaagttctttgcagtataataagaatttgctaaaatatttaaatgatgataggcagaagcaaccatctttttgtgatttacttatcatagtggaaggaaaagaatttagtgcacataaagtagtcgttgctgtcggcagtagttattttcatgcgtgtttgagcaaaaatccaagcactgatgttgtcaccctggatcacgtaacacattcagtttttcagcatttgcttgaatttctttacacatcagaattttttgtgtacaaatatgaaatacctcttgttttagaggctgcaaaatttttggacattatagatgcagtgaagttgttaaataacgaaaatgttgccccttttcattcagagctaactgaaaagtcatcaccagaagaaacactaaatgaattaactggaagactatcaaataatcatcagtgcaaattctgtagtagacatttttgttataaaaagtctttagagaatcatttggctaaaacccataggtcccttttattagggaaaaaacatgggttaaaaatgctggagagaagtttctccgcaagaagatcaaaaaggaatcggaagtgccctgttaagtttgatgacaccagcgatgatgaacaggaaagtggtgatgggtcagacaatttgaatcaagaaaattttgataaggaaaagtcagatagaaatgattctgaggaccctggaagtgaatataatgctgaagaagatgagctagaggaggagatgtcagatgagtactctgacattgaagaacaaagtgaaaaggatcataatgatgcagaagaagaacctgaggctggtgattctgtaggaaatgttcatgaggggttaactccagtggtcattcagaacagcaacaaaaaaatattgcagtgtcctaaatgtgataaaacatttgaccgaataggaaaatatgagagccacacccgtgttcacacaggtgagaagccctttgagtgtgatatttgtcaccagcgctattcaacaaagtctaacctaactgttcacagaaagaagcacagtaatgaaacagaatttcataagaaggagcacaagtgcccttattgtaataaacttcatgcaagcaagaagactttagccaagcatgttaagagatttcatcctgaaaatgcacaagaatttatttccattaagaagactaagagtgaaagttggaaatgtgatatttgtaagaaatcttttactcgaagaccacacttggaggaacatatgattctacattctcaagataaaccttttaagtgtacctattgtgaagaacattttaaatcacggtttgctcggttaaagcatcaagaaaagttccatctgggtccttttccatgtgatatatgtggtcgccagtttaacgacactggaaatttgaaacgtcatatagaatgtactcatggtggaaagagaaaatggacttgctttatctgtggaaaatcagtacgagaaagaactactttgaaagaacatttgagaatccacagtggagaaaagcctcacctttgtagtatttgtgggcaaagttttcgtcatggaagttcgtatagacttcacttacgagtacatcatgatgataaaagatatgagtgcgatgaatgtggaaaaacatttatccgtcatgatcaccttacaaagcacaaaaaaatacattcaggtgaaaaagctcatcagtgtgaagaatgtggaaaatgttttggtcgtagggatcatctcactgttcattacaaaagcgtacaccttggagagaaagtgtggcaaaaatataaagcaacatttcatcaatgtgatgtttgtaagaaaatttttaaaggcaaatcaagtctggaaatgcattttcgaacgcattcaggtgaaaaaccatacaagtgtcaaatttgcaatcagtcttttagaattaagaaaacattaacaaaacacctggttattcattctgatgcccgacctttcaactgtcagcactgtaatgcaacatttaagcggaaagacaagctgaaataccacattgaccatgttcatgaaataaaatctcctgatgatcctctcagtacttctgaggaaaaacttgtatccttgccagttgagtactcatctgatgacaaaatctttcaaacagaaacaaaacaatatatggaccagcccaaagtttatcagtcggaagccaagacgatgttacagaatgtatctgctgaagtatgtgttccagtaactctggttccagttcagatgcctgacactccgagtgacctagtgcgtcatactaccacactcccaccatcttctcatgagattctgtcaccacagccacagtcaactgattatccacgagcagcggatttagcttttctggaaaaatatactcttactcctcaacctgcaaatatagttcacccagttcgacctgaacaaatgctagatcctagagaacaatcttatcttggaacattactgggccttgatagcactactggtgttcaaaatatttctacgaatgagcatcattcatagtaatgaactagtccgtaacttgaaagtatttcgatttcttggctttatatatcttgtggaaaggacgacaaccgaggatttgcccattccgc

SEQ ID NO: 1624 - DNA, 1370 bp, Homo sapiens
  source 1..1370: mol_type = genomic DNA
accgccaccatggagttccctgagcacggcggacggctgctgggccgcctgagacagcagcgcgagctgggcttcctatgcgactgcaccgtgctggtgggcgacgcgcgcttcccggcccaccgtgccgtgctggccgcgtgcagcgtctacttccatctcttctacagggaccggcccgcgggcagtcgcgacacggtgcggctcaacggcgacatcgtcacggcgcccgccttcggccgcctactggacttcatgtacgagggccgcctggacctgcgcagcctgcctgtggaggacgtcctggcagccgccagctacctgcacatgtatgacatcgtcaaggtctgcaagggcaggctccaggagaaggatcgaagtctggacccggggaaccctgcccctggggcagaacctgctcagccaccgtgcccctggcctgtctggaccgcggacctctgcccagctgcccgaaaggccaagctccccccgtttggggtcaaggctgccctccctcctcgagcatctgggcctcctccctgccaggtcccagaagagtcagaccaggccctggacctgtcgttgaagtctggcccaaggcaggagcgggtccacccaccgtgcgtcctccagacacccctctgcagccagaggcagccaggggcccagccactggtgaaggacgaacgggactcactgtccgaacaggaggagagcagcagctctaggagcccccacagtcccccgaagccacctcctgttcctgcagccaagggcctggtggtgggcttgcagccgctgcccctcagcggagagggcagccgggagctggagcttggtgcagggcgactggcgagtgaggacgagctggggcctggtgggcccctctgcatctgcccgttgtgcagcaagctgtttcccagctcccacgtgctgcagctgcacctcagtgcccacttccgtgagcgagacagcacccgggcccggctctcacccgacggcgtggcacccacctgcccgctctgtgggaagaccttctcgtgcacatacacactgaagaggcacgagcggacacactcgggtgagaagccctatacgtgtgtgcagtgtggcaaaagttttcagtactcccacaacctgagccggcacaccgtagtgcacactcgagagaagccgcatgcctgccggtggtgtgagcgccgtttcacgcagtccggggacctctaccgccacgtccgcaagtttcactgtggcctcgtcaagtcccttctggtgtagtaatgaactagtccgtaacttgaaagtatttcgatttcttggctttatatatcttgtggaaaggacgactcgttattggattcgtgaatcta

SEQ ID NO: 1625 - DNA, 1814 bp, Homo sapiens
  source 1..1814: mol_type = genomic DNA
accgccaccatgggtgtgaaaacatttactcatagctcctcttcccacagccaggaaatgcttggaaagctaaatatgctgcgaaatgatggacatttttgtgatatcactattcgtgtccaggacaaaatcttccgggcacataaggtggtactagcagcttgcagtgatttctttcgcaccaaacttgtaggccaagccgaggatgagaacaagaatgtgttggatctgcatcatgttacagtgactggctttatacctcttttagaatatgcttacacagccactctatcaattaacacagaaaatattattgatgttctagcagcagccagctatatgcaaatgttcagtgttgccagcacctgctcagagttcatgaaatcaagcattttatggaatacacccaacagccaacctgaaaagggtctagatgctggacaagaaaataattctaactgcaattttacttctcgagatgggagcatttctcccgtgtcctcagagtgcagtgtggtagaaagaaccattcctgtctgccgagaatcccggagaaagcgcaaaagctacattgttatgtctcctgaaagtcctgtaaagtgtggcacacaaacaagctcaccccaggtattgaattcttcagcttcctactcagaaaatagaaaccaaccagttgactcttccttagcttttccttggacttttccttttggaattgatcgaaggattcagcctgagaaagttaagcaagcagaaaatacccggactttagaattacctggcccatctgagaccggtagaagaatggctgattatgtgacttgtgagagcacaaaaactaccttgcctttaggtaccgaagaagatgtccgggtcaaagtagaaagattaagtgatgaggaggtccatgaggaagtgtcccagcctgtcagtgcatctcagagttcgctgagtgatcagcagacagttccaggaagtgaacaagtccaagaggaccttctgattagtccacagtcttcctctataggctcagtagatgaaggcgtttctgagggcttgcctacacttcaaagcacgtctagcactaatgctcctccggatgatgatgatcgattggaaaatgttcagtatccctaccaactctacattgctccttccaccagcagtacagagcgaccaagtccaaatggtcccgacagaccttttcagtgtccaacctgcggggtgcgattcacccgtattcagaacctaaagcagcacatgctcatccactcaggaattaaaccatttcagtgtgaccgctgtgggaaaaagttcaccagggcttactcgctaaagatgcatcgcctaaagcatgaaggtaaacgctgtttccggtgccagatatgtagtgccactttcacttccttcggggaatataaacaccacatgagggtttcccggcacattatccgcaagcctcggatttacgagtgcaaaacatgtggcgccatgttcaccaactctggaaatttaatcgtgcacctgaggagtctgaaccatgaagcatcagagctagcaaactacttccagagcagtgatttcctagtaccggactacttaaaccaggaacaagaagagacccttgttcaatatgatcttggagaacacggttttgaaagcaactcctctgttcaaatgcctgtcatttcacagtaccactccaaaggcaaggaaccatagtaatgaactagtccgtaacttgaaagtatttcgatttcttggctttatatatcttgtggaaaggacgatagccctgtcctaaccttatagac

SEQ ID NO: 1626 - DNA, 1526 bp, Homo sapiens
  source 1..1526: mol_type = genomic DNA
accgccaccatgggtgtgaaaacatttactcatagctcctcttcccacagccaggaaatgcttggaaagctaaatatgctgcgaaatgatggacatttttgtgatatcactattcgtgtccaggacaaaatcttccgggcacataaggtggtactagcagcttgcagtgatttctttcgcaccaaacttgtaggccaagccgaggatgagaacaagaatgtgttggatctgcatcatgttacagtgactggctttatacctcttttagaatatgcttacacagccactctatcaattaacacagaaaatattattgatgttctagcagcagccagctatatgcaaatgttcagtgttgccagcacctgctcagagttcatgaaatcaagcattttatggaatacacccaacagccaacctgaaaagggtctagatgctggacaagaaaataattctaactgcaattttacttctcgagatgggagcatttctcccgtgtcctcagagtgcagtgtggtagaaagaaccattcctgtctgccgagaatcccggagaaagcgcaaaagctacattgttatgtctcctgaaagtcctgtaaagtgtggcacacaaacaagctcaccccaggtattgaattcttcagcttcctactcagaaaatagaaaccaaccagttgactcttccttagcttttccttggacttttccttttggaattgatcgaaggattcagcctgagaaagttaagcaagcagaaaatacccggactttagaattacctggcccatctgagaccggtagaagaatggctgattatgtgacttgtgagagcacaaaaactaccttgcctttaggtaccgaagaagatgtccgggtcaaagtagaaagattaagtgatgaggaggtccatgaggaagtgtcccagcctgtcagtgcatctcagagttcgctgagtgatcagcagacagttccaggaagtgaacaagtccaagaggaccttctgattagtccacagtcttcctctataggctcagtagatgaaggcgtttctgagggcttgcctacacttcaaagcacgtctagcactaatgctcctccggatgatgatgatcgattggaaaatgttcagtatccctaccaactctacattgctccttccaccagcagtacagagcgaccaagtccaaatggtcccgacagaccttttcagtgtccaacctgcggggtgcgattcacccgtattcagaacctaaagcagcacatgctcatccactcaggaattaaaccatttcagtgtgaccgctgtgggaaaaagttcaccagggcttactcgctaaagatgcatcgcctaaagcatgaagtaccactccaaaggcaaggaaccatgattgacaacagtcaagctgtggatgaaatgaccaggaacggagaatagtaatgaactagtccgtaacttgaaagtatttcgatttcttggctttatatatcttgtggaaaggacgatagtcggcgcgtagctgcgggtag

SEQ ID NO: 1627 - DNA, 1637 bp, Homo sapiens
  source 1..1637: mol_type = genomic DNA
accgccaccatggcggctgcagaggctgtgcatcacatacacctgcagaacttctcacgctctctgcttgagaccctcaatgggcagaggcttgggggacacttctgtgacgtgactgtgcgcattcgtgaagcttcgctgcgtgcccaccgctgcgtgctggcggccggctcacccttcttccaagacaagctgctgctcggccactctgagatccgtgtgcctccggtggtgcccgcgcagacagtgcgacagctggtagagttcctgtacagcggttcgctcgttgtggcgcagggtgaagccctgcaggtgctcacggccgcgtcagtgcttcgcatacagacagttatcgacgaatgcacgcagattatcgcccgcgctcgagccccgggcacctctgcgcccacgcccctgcccacccctgtgcccccgccactcgcacctgcgcagctgcgtcaccgcctgcgccacctgctggctgcacgtcccccggggcaccccggtgctgcacacagccgtaagcagcgccagcccgcgcgtttgcagctgccagcgcccccaacacctgccaaggctgaggggcctgatgctgacccctcactgtccgcggcccctgatgaccgaggtgacgaggatgacgaggaaagtgacgatgagaccgatggcgaggatggcgaaggtggcggcccaggcgagggccaggcacctccttccttcccagactgtgctgctggcttcctcactgctgctgctgacagcgcgtgcgaggagccccctgcacccactggcctcgctgactacagtggtgccgggagagattttcttcggggagctgggtcagctgaggacgtatttccagacagctatgtatccacttggcacgacgaggatggcgctgtccccgaaggctgtcccactgagacccctgtccagcccgactgcatactgtctggatcccgcccgcctggtgtgaagaccccagggccgcccgttgcactcttcccctttcacttgggtgcccctgggccacccgcaccacccccttcagcaccatcggggccagcccctgcgcccccacccgccttctaccccacactccagcccgaggcagcccccagtactcagctgggggaggtcccggctccctctgctgctcccaccacggccccctcaggcacccctgctcgcaccccaggtgctgagccacctacgtatgagtgcagccactgtcgcaagacgttcagctcccggaaaaactacaccaagcacatgttcatccactcgggggagaagccgcaccagtgcgccgtgtgctggcgatccttctctctacgcgactacctgctcaaacacatggtcacgcacaccggcgtgcgcgccttccagtgcgccgtctgcgccaagcgcttcacgcagaagagctcgctcaacgtgcacatgcgcactcaccggcccgagcgcgcgccctgccccgcctgcggcaaggtcttctcgcaccgcgcgctgctggagcgccacctggcggcgcaccctgcgccctagtaatgaactagtccgtaacttgaaagtatttcgatttcttggctttatatatcttgtggaaaggacgacggtgacctagcatccgttcttgc

SEQ ID NO: 1628 - DNA, 1871 bp, Homo sapiens
  source 1..1871: mol_type = genomic DNA
accgccaccatgaacaaccgaaaggaagatatggaaatcacgtcccactaccggcacctgctgcgggagctcaacgagcagaggcagcacggcgtcctgtgcgacgtctgcgtggtcgtggagggcaaggtcttcaaggcgcacaagaacgtcctgctgggcagcagccgctacttcaagacgctctactgccaggtgcagaagacgtcggagcaggccacggtcacgcacctggacatcgtcacggcccagggcttcaaggccatcatcgacttcatgtactcagcgcacctggcgctcaccagcaggaacgtcatcgaggtgatgtcagccgccagcttcctgcagatgacggacatcgtgcaagcctgccacgacttcatcaaggcggcgctggacatcagcatcaagtcggacgcctcagatgagcttgcggagttcgagatcggcgcctcgtccagcagcagcacggaagctctcatctcggccgtgatggctgggaggagcatctccccgtggctggcacggcgaacgagtcctgccaattcttccggagactcggccatcgccagctgtcacgacggagggagcagctacgggaaagaggatcaggagcccaaggccgatggccctgatgatgtttcttcacagcctctatggcctggagacgtgggctacgggcctctgcgcatcaaggaagagcaggtttcaccgtctcagtacggagggagcgagctgccttctgccaaggacggtgcagtacagaactctttctcagagcagagtgctggtgatgcctggcagcccacgggccgaaggaagaatcggaaaaacaaagagaccgtccggcacatcacacagcaggtggaagatgacagccgggccagctccccggtgccgtccttcctgccgacgtcggggtggccgttcagcagccgagactcaaatgcggacctgtccgtcaccgaagccagcagctccgacagccgaggagagagggccgagctctatgcacaggtggaggagggtctcctgggaggagaagccagctatctgggccctcccctcaccccagagaaggacgacgccctgcatcaggccaccgcggtggccaacctgcgcgcggcgctcatgagtaagaacagcctgctgtcgctgaaggccgacgtgctgggggatgacggctccctgctgttcgagtacctgcccagaggggcccactcgctgtccctgaatgagttcacggtgatcaggaagaagttcaagtgtccgtactgcagcttctcggccatgcaccagtgcatcctcaagcgacacatgcgctcgcacacgggagagcggccctacccctgcgagatctgcgggaagaagttcacgcggcgcgagcacatgaagcgccacacgctggtccacagcaaggacaagaagtatgtgtgcaaggtgtgcagccgcgtcttcatgtccgccgccagcgtgggcatcaggcatggctccaggcgccacggtgtgtgcaccgactgtgctggccgcggcatggccgggcccctggaccatggcggcggaggcggcgagggctctccagaggcgctgttcccaggcgacgggccctatctggaggaccctgaggacccacgaggggaggcggaggagctgggcgaggacgacgagggcctggcccctgaggatgcgctgttggcggacgacaaggatgaggaagactcgccgcggccgcgcagccccccaggaggccctgacaaggacttcgcctggctctcctagtaatgaactagtccgtaacttgaaagtatttcgatttcttggctttatatatcttgtggaaaggacgatttcctcagccaagaccattctat

SEQ ID NO: 1629 - DNA, 2345 bp, Homo sapiens
  source 1..2345: mol_type = genomic DNA
accgccaccatgggccgcctgaacgagcagcgcctcttccagcctgacctctgcgacgtggacttggtgctggtgccccagcgcagcgtctttccggcacacaagggtgtgctagccgcctacagccagttcttccactcactcttcacccagaacaagcagctgcagcgtgtggagctgtccctggaggcactggcacctggtggcctgcagcagatcctcaacttcatctatacgtccaagctgctggtcaacgcggccaacgtccacgaggtgctcagcgccgcctcattgctgcagatggctgacatcgctgcgtcctgccaagagctgctggacgcccgctctctaggcccaccaggtccgggcactgtggccctggcccagccggctgccagctgcactccagctgcgccgccctactactgtgacatcaagcaggaggccgacaccccaggcctgcccaagatctatgcccgcgagggccctgacccttactcggtgcgtgttgaggacggggcagggactgctggtggcacagtgcctgccaccattgggccagcccagcccttctttaaggaggagaaggagggtggtgtcgaggaggccggtgggcccccagccagcttgtgcaagctggagggtggagaagagttggaggaagagcttgggggttctggcacctacagccgcagggagcaatcccagatcatcgtggaggtgaacctcaacaaccagacactgcacgtgtccacggggccagaggggaagccaggtgccgggccaagcccagccaccgtggttctgggccgggaggacgggctgcagagacactcggacgaggaggaggaggacgacgaggaggaggaggaggaagaagaggaagaggaaggtggtggcagtggacgggaggaggaggaggaggaagagggtggcagtcagggagaagaggaagaagaggaggaggacgggcacagtgagcaggaagaggaagaggaggaggaagaggaggaagggcctagtgagcaggatcaagagagctctgaggaggaggagggggaggagggggaggctgggggcaagcaggggccacggggaagccgaagcagccgggcagacccccctccccacagtcacatggccacacggtcccgggagaacgcccggcgccggggtacccctgaacctgaagaagctgggcggcggggtgggaagaggccaaagccaccccctggagtggcctctgcatcggcccgagggccgccagccactgatgggctgggggccaaggtgaagctggaggagaagcagcaccatccatgccagaagtgcccacgagttttcaacaaccgctggtacctggagaaacacatgaatgtgacccacagccgcatgcagatctgcgaccagtgcggcaagcgcttcctgctggagagcgagctgctgctgcacaggcagacagactgcgagcgcaacatccagtgtgtgacatgtggcaaagctttcaagaagctttggtccctccatgagcataacaagattgtgcacggctacgcagagaagaagttctcatgcgagatctgtgagaagaagttctacaccatggcccacgtgcgtaagcacatggttgcccacaccaaggacatgcccttcacctgcgagacctgcggaaagtccttcaagcgcagcatgtccctcaaggtgcactcactgcagcactcaggggagaagccgttcagatgtgagaactgcaatgagcgcttccagtacaagtaccagctgcggtcacacatgagcatccacattggccacaagcagttcatgtgccaatggtgcggcaaggacttcaacatgaagcagtacttcgatgagcacatgaagacccacacaggagagaagccgtacatctgcgagatctgtggcaagagcttcaccagccggcccaacatgaagcggcaccggcgcacgcacacgggcgagaagccgtacccgtgcgacgtgtgtggccagcgcttccgcttctccaacatgctcaaggcccacaaggagaagtgcttccgcgtcagccacaccctggccggcgacggcgtccccgctgccccaggcctgcccccaacccagccccaggcgcacgcactgcccctgctcccggggctgccccagaccctgccgcccccgccccacctgccgcccccgcctccgctcttccccaccactgccagccccggcgggaggatgaacgccaacaactagtaatgaactagtccgtaacttgaaagtatttcgatttcttggctttatatatcttgtggaaaggacgaattaaacgggattccaaggccacg

SEQ ID NO: 1630 - DNA, 2399 bp, Homo sapiens
  source 1..2399: mol_type = genomic DNA
accgccaccatggaccctgttgctacccacagctgccatctgctccagcaactgcatgagcagcgaatccaaggcctgctttgtgactgtatgttggtggtaaaaggagtctgctttaaagcgcataagaatgtcctggcagcattcagccagtattttaggagcctctttcagaattcttcaagccagaagaatgatgtttttcacttggatgttaaaaatgtcagtggcatagggcagatcctggacttcatgtacacttctcatctagatcttaaccaggacaatatacaagtaatgctggacacagcacagtgtttgcaagttcaaaatgttctgagtctgtgtcacacatttttaaaatcagccactgtagtacagccacctggcatgccttgtaatagtacattgtctctacaaagcaccctgaccccagatgccacttgtgttatcagtgaaaactacccccctcatttactgcaggaatgttcagcagatgcacagcagaacaaaacgttggatgaatcgcatccgcatgcttcaccatcagttaatcgtcatcactccgcaggtgaaatctcaaaacaagctcctgatacttcagatggcagctgcacagaactgcctttcaaacagccaaattactattacaaactcagaaacttttacagtaagcagtaccataaacacgcagctggtcccagtcaggagagagttgttgagcagccttttgctttcagcacctctacagaccttaccacggtagagagccagccttgtgccgtcagtcattctgaatgcatcctggagtctcccgagcacttaccttccaacttcctggcccagcctgtgaatgactctgccccacaccctgagtcagacgccacatgccaacaacctgtcaagcagatgaggctcaaaaaggccattcatctgaagaagctcaatttcctgaagtcacagaaatacgcagagcaagtatctgaacccaagtcagatgatggtttgacaaagaggttggaatctgctagtaaaaataccctagagaaagctagcagccaaagtgctgaagaaaaagaaagtgaagaagtcgtcagttgtgagaattttaattgcattagtgagacggagaggcctgaagacccggctgccctggaagaccagtcccagacacttcagtcccagagacaatacgcgtgtgaattatgcgggaaaccttttaaacacccaagcaacttggagcttcacaaacggtctcatacaggtgagaaaccttttgaatgtaacatttgtgggaaacatttctctcaggcaggtaacttgcagactcacttacgacggcattctggtgaaaaaccatacatctgcgagatctgtggaaagaggtttgcagcctctggcgacgtccagcgtcacattattattcactcaggagaaaaaccacacttgtgtgacatctgtggtcgagggtttagtaacttcagtaatttgaaggagcacaaaaagacacacacggctgataaagtcttcacctgtgatgagtgtggaaagtcttttaatatgcaaaggaagttagtaaagcacagaattcggcacacgggggagcggccttacagctgctctgcctgcgggaaatgttttgggggatcaggtgacctccgcaggcatgtccgcactcacactggggagaagccgtacacatgtgagatctgtaacaagtgctttacccgctctgcggtgctccggcggcacaagaagatgcactgcaaagctggtgacgagagcccagatgtgctggaggagctcagccaagccatcgagacctccgacctcgagaaatctcagagctcagactctttctcccaagacacgtctgtgacgctgatgccagtgtcggttaaactccctgtccacccagtggaaaattctgtggcagaatttgatagccactctggcggctcctattgtaagttacggtccatgatccaacctcatggagttagtgaccaggagaagctgagtttggatcctggtaaacttgccaagccccagatgcagcagacacagcctcaggcctatgcttactcggatgtggacaccccagccggtggcgaaccactgcaggccgatggcatggccatgatccgttcctctctggctgctttggacaaccacggcggtgaccccctgggcagtcgagcatcttccaccacttataggaactcagagggtcagtttttctccagcatgactctctgggggctagcgatgaagacgctgcagaatgaaaacgagttagaccagtagtaatgaactagtccgtaacttgaaagtatttcgatttcttggctttatatatcttgtggaaaggacgaagcaagtcccgggaactgcaaagc

SEQ ID NO: 1631 - DNA, 1463 bp, Homo sapiens
  source 1..1463: mol_type = genomic DNA
accgccaccatggaccctgttgctacccacagctgccatctgctccagcaactgcatgagcagcgaatccaaggcctgctttgtgactgtatgttggtggtaaaaggagtctgctttaaagcgcataagaatgtcctggcagcattcagccagtattttaggagcctctttcagaattcttcaagccagaagaatgatgtttttcacttggatgttaaaaatgtcagtggcatagggcagatcctggacttcatgtacacttctcatctagatcttaaccaggacaatatacaagtaatgctggacacagcacagtgtttgcaagttcaaaatgttctgagtctgtgtcacacatttttaaaatcagccactgtagtacagccacctggcatgccttgtaatagtacattgtctctacaaagcaccctgaccccagatgccacttgtgttatcagtgaaaactacccccctcatttactgcaggaatgttcagcagatgcacagcagaacaaaacgttggatgaatcgcatccgcatgcttcaccatcagttaatcgtcatcactccgcaggtgaaatctcaaaacaagctcctgatacttcagatggcagctgcacagaactgcctttcaaacagccaaattactattacaaactcagaaacttttacagtaagcagtaccataaacacgcagctggtcccagtcaggagagagttgttgagcagccttttgctttcagcacctctacagaccttaccacggtagagagccagccttgtgccgtcagtcattctgaatgcatcctggagtctcccgagcacttaccttccaacttcctggcccagcctgtgaatgactctgccccacaccctgagtcagacgccacatgccaacaacctgtcaagcagatgaggctcaaaaaggccattcatctgaagaagctcaatttcctgaagtcacagaaatacgcagagcaagtatctgaacccaagtcagatgatggtttgacaaagaggttggaatctgctagtaaaaataccctagagaaagctagcagccaaagtgctgaagaaaaagaaagtgaagaagtcgtcagttgtgagaattttaattgcattagtgagacggagaggcctgaagacccggctgccctggaagaccagtcccagacacttcagtcccagagacaatacgcgtgtgaattatgcgggaaaccttttaaacacccaagcaacttggagcttcacaaacggtctcatacaggtttgcagcctctggcgacgtccagcgtcacattattattcactcaggagaaaaaccacacttgtgtgacatctgtggtcgagggtttagtaacttcagtaatttagtaatgaactagtccgtaacttgaaagtatttcgatttcttggctttatatatcttgtggaaaggacgagcgggcatgcgctaaggatcttga

SEQ ID NO: 1632 - DNA, 1670 bp, Homo sapiens
  source 1..1670: mol_type = genomic DNA
accgccaccatggagacagatttggctgaaatgcctgagaaaggagttctgtcttcccaggattctccccatttccaagagaagagcacagaagagggagaagtggctgctctgcgcctcacggccagatcccaggcggcggcggcggcggcggcgcccgggagccggagccttcgcggcgtccacgtccctcccccgctgcaccccgccccggcgcgagaggagatcaaatccacttgctccttgaaggcatgcttttcactttcattaactcttacctattacagaactgcctttttgttgagcacagaaaacgaaggaaatttgcatttccaatgtccttcagacgtggagactagaccacagagcaaggattcaacttcagtgcaagatttttccaaagcagaatcatgcaaagttgcaataatagacagactgacacggaatagtgtctatgactctaacttggaagcagcccttgaatgtgaaaattggttagagaagcagcaaggaaatcaggagagacatttgagagaaatgttcactcacatgaattcactctctgaggaaacagaccatgagcatgatgtatactggaaaagcttcaatcagaaatctgtccttatcactgaagacagagttcccaaaggatcttatgccttccatacacttgaaaaaagcttgaaacaaaaatcaaacttaatgaaaaagcagagaacttataaagagaaaaaacctcataaatgtaatgattgtggtgaactcttcacctgccattcagtgcatattcaacaccagagagtccatactggagagaaaccctatacctgcaatgaatgtgggaaatcttttagccacagagctaatttaactaaacaccagagaactcatactagaattctctttgaatgccgtgaatgtaagaaaaccttcacagaaagctcatcccttgcaacacatcagagaattcacgttggagagagaccttatgaatgcaatgaatgtgggaaaggttttaatcgaagtacacatcttgtgcagcatcagttgattcatactggagtgaggccttatgaatgtaatgaatgtgataaagcttttattcattcatcagcactcattaaacatcaaagaactcatactggagagaaaccttataaatgtcaagaatgtgggaaagcctttagccattgctcatccctaactaagcatcagagagttcatactggagaaaagccatatgaatgcagtgaatgtggaaaaacttttagtcagagcacacatcttgttcaacatcagagaattcacactggagagaaaccctatgagtgtagtgaatgtgggaaaaccttcagccagagctccaattttgctaaacatcaaagaattcatattggaaagaaaccgtacaaatgtagtgagtgtggaaaagccttcattcattcatcagctcttattcaacatcagagaactcataccggagagaaaccctttagatgtaatgagtgtgggaaaagctttaagtgcagttcatctctcatcagacatcaaagagttcacactgaagagcaaccctagtaatgaactagtccgtaacttgaaagtatttcgatttcttggctttatatatcttgtggaaaggacgaacggttctctaggctgcaagaccc

SEQ ID NO: 1633 - DNA, 2558 bp, Homo sapiens
  source 1..2558: mol_type = genomic DNA
accgccaccatggcccttactcaggtacggttgacatttagggatgtggccatagaattctctcaggaggagtggaaatgcctggaccctgctcagaggatcttatacagggacgtgatgttggagaactactggaaccttgtttctctgggactgtgtcattttgatatgaatattatctccatgttggaggaagggaaagagccctggactgtgaagagctgtgtgaaaatagcaagaaaaccaagaacgccggaatgtgtcaaaggcgtggtcacagatatccctcctaaatgtacaatcaaggatttgctaccaaaagagaagagcagtacagaagcagtattccacacagtggtgttggaaagacacgaaagccctgacattgaagacttttccttcaaggaaccccagaaaaatgtgcatgattttgagtgtcaatggagagatgacacaggaaattacaagggagtgcttatggcccagaaagaaggtaaaagagatcaacgcgacagaagagacatagaaaacaagcttatgaacaatcagcttggagtaagctttcattctcatctgcctgaactgcagctatttcaaggtgaggggaaaatgtatgaatgtaatcaagttgagaagtctaccaacaatggttcctcagtgtcaccacttcaacaaattccttctagtgtccaaacccacaggtctaaaaaatatcatgaacttaaccatttttcattactcacacaaagacgaaaagcaaacagttgtggaaaaccttataaatgtaatgaatgtggcaaggcgttcactcagaattcgaaccttacaagtcataggagaattcatagtggagagaagccttacaaatgcagtgagtgcggcaaaacctttactgttcgttcaaatctaactattcatcaggtcatccatactggagaaaaaccttacaaatgtcatgagtgtggcaaggtcttcaggcacaattcataccttgcaactcatcggcgaattcatactggagagaaaccttacaagtgtaatgagtgtggaaaagcctttagaggacattcaaacctaactacccatcagttaattcatactggagaaaaaccgttcaaatgtaatgaatgtggcaagctcttcactcaaaattcacaccttataagtcattggagaattcacactggagagaaaccttacaagtgcaatgagtgcggcaaagcctttagtgttcgttcaagcctagcaatccatcagacaatccacactggagaaaaaccttacaaatgtaatgaatgtggcaaagtctttaggtacaattcatacctcggaaggcatcggagagttcatactggtgagaaaccttacaagtgtaatgaatgtggcaaagccttcagtatgcattcaaacctagctacccatcaggtcatccatactggaacaaaacctttcaaatgcaatgaatgcagcaaggttttcactcaaaattcacaacttgcaaatcatcgaagaattcatactggagagaaaccttacaagtgtaatgagtgtgggaaagccttcagtgttcgttcaagtctgactacccatcaggcaatccattctggagagaaaccttacaaatgtattgaatgtggcaagagcttcactcaaaaatcacaccttagaagtcatcggggaattcattctggagagaaaccttacaagtgtaatgaatgtggtaaagtcttcgctcaaacatcacaacttgcaaggcattggagagttcatactggagaaaaaccttacaagtgtaatgactgtggcagagcctttagtgatcgttcaagcctaacttttcatcaggcaatacatactggagagaaaccttacaaatgtcatgaatgcggcaaggtttttaggcacaattcataccttgcaactcatcggcgaattcatactggagagaaaccttacaagtgtaatgagtgtgggaaagcctttagtatgcattcaaacctaactacccataaggtcatccatactggagagaagccttacaaatgtaatcaatgtggcaaggtcttcactcagaactcacaccttgcaaatcatcaaaggactcacaccggagagaaaccttaccgatgcaatgagtgtgggaaagccttcagtgttcgttcaagcctaaccacccatcaggcaatccatactgggaaaaaaccttacaaatgtaatgaatgtggcaaggtctttactcaaaatgctcacctggcaaatcaccgaagaattcatactggggagaaaccttacaggtgtacagagtgtgggaaagcctttagggtaagatcaagtctaactacccatatggcaatccacactggagaaaagcgttacaaatgtaatgagtgtggcaaggtcttcaggcagagttcaaatcttgcaagtcatcacagaatgcataccggagagaaaccttacaaatagtaatgaactagtccgtaacttgaaagtatttcgatttcttggctttatatatcttgtggaaaggacgactaaaggattcaggatccgcttta

SEQ ID NO: 1634 - DNA, 545 bp, Homo sapiens
  source 1..545: mol_type = genomic DNA
accgccaccatggcccttactcaggtacggttgacatttagggatgtggccatagaattctctcaggaggagtggaaatgcctggaccctgctcagaggatcttatacagggacgtgatgttggagaactactggaaccttgtttctctgggactgtgtcattttgatatgaatattatctccatgttggaggaagggaaagagccctggactgtgaagagctgtgtgaaaatagcaagaaaaccaagaacgccggaatgtgtcaaaggcgtggtcacagacctgctcaggagatggaaacattggctgctgctccttggcatctgctgccccaaacctcatggaagagtctccagccgtctccgcctgtcgaggtccctcggccatttcttccattctgcttttgccactttcatgggggtgtgtgataagcgagtgggttctatcttctagtaatgaactagtccgtaacttgaaagtatttcgatttcttggctttatatatcttgtggaaaggacgaaaatgcaatttgctccggtgtggc

SEQ ID NO: 1635 - DNA, 2450 bp, Homo sapiens
  source 1..2450: mol_type = genomic DNA
accgccaccatgttggagaactactggaaccttgtttctctgggactgtgtcattttgatatgaatattatctccatgttggaggaagggaaagagccctggactgtgaagagctgtgtgaaaatagcaagaaaaccaagaacgccggaatgtgtcaaaggcgtggtcacagatatccctcctaaatgtacaatcaaggatttgctaccaaaagagaagagcagtacagaagcagtattccacacagtggtgttggaaagacacgaaagccctgacattgaagacttttccttcaaggaaccccagaaaaatgtgcatgattttgagtgtcaatggagagatgacacaggaaattacaagggagtgcttatggcccagaaagaaggtaaaagagatcaacgcgacagaagagacatagaaaacaagcttatgaacaatcagcttggagtaagctttcattctcatctgcctgaactgcagctatttcaaggtgaggggaaaatgtatgaatgtaatcaagttgagaagtctaccaacaatggttcctcagtgtcaccacttcaacaaattccttctagtgtccaaacccacaggtctaaaaaatatcatgaacttaaccatttttcattactcacacaaagacgaaaagcaaacagttgtggaaaaccttataaatgtaatgaatgtggcaaggcgttcactcagaattcgaaccttacaagtcataggagaattcatagtggagagaagccttacaaatgcagtgagtgcggcaaaacctttactgttcgttcaaatctaactattcatcaggtcatccatactggagaaaaaccttacaaatgtcatgagtgtggcaaggtcttcaggcacaattcataccttgcaactcatcggcgaattcatactggagagaaaccttacaagtgtaatgagtgtggaaaagcctttagaggacattcaaacctaactacccatcagttaattcatactggagaaaaaccgttcaaatgtaatgaatgtggcaagctcttcactcaaaattcacaccttataagtcattggagaattcacactggagagaaaccttacaagtgcaatgagtgcggcaaagcctttagtgttcgttcaagcctagcaatccatcagacaatccacactggagaaaaaccttacaaatgtaatgaatgtggcaaagtctttaggtacaattcatacctcggaaggcatcggagagttcatactggtgagaaaccttacaagtgtaatgaatgtggcaaagccttcagtatgcattcaaacctagctacccatcaggtcatccatactggaacaaaacctttcaaatgcaatgaatgcagcaaggttttcactcaaaattcacaacttgcaaatcatcgaagaattcatactggagagaaaccttacaagtgtaatgagtgtgggaaagccttcagtgttcgttcaagtctgactacccatcaggcaatccattctggagagaaaccttacaaatgtattgaatgtggcaagagcttcactcaaaaatcacaccttagaagtcatcggggaattcattctggagagaaaccttacaagtgtaatgaatgtggtaaagtcttcgctcaaacatcacaacttgcaaggcattggagagttcatactggagaaaaaccttacaagtgtaatgactgtggcagagcctttagtgatcgttcaagcctaacttttcatcaggcaatacatactggagagaaaccttacaaatgtcatgaatgcggcaaggtttttaggcacaattcataccttgcaactcatcggcgaattcatactggagagaaaccttacaagtgtaatgagtgtgggaaagcctttagtatgcattcaaacctaactacccataaggtcatccatactggagagaagccttacaaatgtaatcaatgtggcaaggtcttcactcagaactcacaccttgcaaatcatcaaaggactcacaccggagagaaaccttaccgatgcaatgagtgtgggaaagccttcagtgttcgttcaagcctaaccacccatcaggcaatccatactgggaaaaaaccttacaaatgtaatgaatgtggcaaggtctttactcaaaatgctcacctggcaaatcaccgaagaattcatactggggagaaaccttacaggtgtacagagtgtgggaaagcctttagggtaagatcaagtctaactacccatatggcaatccacactggagaaaagcgttacaaatgtaatgagtgtggcaaggtcttcaggcagagttcaaatcttgcaagtcatcacagaatgcataccggagagaaaccttacaaatagtaatgaactagtccgtaacttgaaagtatttcgatttcttggctttatatatcttgtggaaaggacgaactgagactctcgaactcgggtct

SEQ ID NO: 1636 - DNA, 2018 bp, Homo sapiens
  source 1..2018: mol_type = genomic DNA
accgccaccatgtttggttccagcagatacttgggttcctctgaacagcccagagctaattcactgggtcccagtgacaggaccttggttttgtgctccctagtggaaggggaagataaggtcaacccctccgaaccacatggactgagaatggaggagaaatggttgctcaaaggaaaactgaggaatcagaggaaccaaaacaagctcctgtccccaaacaagaagcagaggaaaaaccacactagcaagctgcaagagttggcactgctgctgcccatagccctgaagacggggaccaagaagctcacaaagaaggagattctggtgcatgtcctgcagtacattcagtacctccagagaaacatcgatgccgccaaggccttgttcaaatgccacatcaccactggggaaggtggacttgcggggctgggtcagaaaccagcctggggcccagccaggcggaggagacactctaccccctccagctccccaagctctcagaagtcctgtctccagggggcgtgccagaagcctcggaagaagaagctgacccaggcatcagaaagccagactcggaccccgaagcctcgccgctctctggccctgaacaagcctgagaagctggtggccccatccccagaccagaaaggaagtggcacaggggggaccactacccctccaaggtgccctgactcctgcggtcacccgaggcctgcatcatcctcacctccaggtgacagaaaaggaggacagtcccagctgacgctgttggatctggccgaggacaccatccactgtgacatctcaagctgctggtgccagggcagtgtccaggatgacgcacctttccctgcgctcctggctcaggaagatgtggcgaggatccattttctcaacaagacccagccccatcccaggcagaagctggtgttctatgattccagcgaggatgtggacaaagggtccctagacgctgacccttggctccctgcctggaccccagagaacagcccccaagggagcccactgttcctggggcctccccagattgatgtctggagtggaacaggccacccaagtgagatcctcgggctcagccctagccttttcagctccccagggaaactgctgccagacgagatcttggaggatgacatggagtacctgacccaagcggctttctttgaagaagtgtgcttagatctggagtcttcaccttcagcctacacgcaggaggctccacaggaaaaggacacagcctccaaggcccccaaagaccctcctgagtcccacagcctgcaccggtcctcagtctcgctggaccactgctacctctcgctgagcgggaacagcaaggcgccatccagctccagctccagctccagctccagctccagctcggaggacagcgactcggagcccctgtggaagcagcgagaggatatgcaggccaaccctgtgggcacgccgggctccagcgaagaggacgaagacaccacatggacccccacccggctggcctcacccctgctggcagctgagaaaaaggccacgaagggccaagtagccagggcccctgtgaagcccaaggagaagaagaaaggcccctgcccaccccagatgaagaagaagtgtgtcaacggcttcatcatgttctgcaggatgaaccggaagcagtacatccgatcctgccctggaaccgcttccacagctgccaccaaggagctggcccagctgtggcgggtgatgacccagcaggagcggaggccatactgcaccaaggctcgcaggttcagccgccagcacaaccgcatcgtgaagcaggacggctccagcagcgaggctgaggactgggagacgccaaagcccttctaccagctgctggccgagaaggccttgccgctgcccccgcacctccagtagtaatgaactagtccgtaacttgaaagtatttcgatttcttggctttatatatcttgtggaaaggacgacccatgggtgtaatgccagaggtc

SEQ ID NO: 1637 - DNA, 3353 bp, Homo sapiens
  source 1..3353: mol_type = genomic DNA
accgccaccatgtcggacagcgaggacagcaacttttccgaggaggaggacagcgagcgcagcagtgacggcgaggaggccgaggtagacgaagagcggcggagtgcagcgggcagtgagaaagaagaagagcctgaggacgaagaggaggaggaagaggaggaggaatacgatgaggaagaggaggaagaagatgatgaccgaccccccaagaaaccccgccatggaggcttcattctggacgaggctgatgttgacgatgagtatgaggacgaggaccagtgggaggatggagcagaggacattctagagaaagcctccaatatcgataatgttgtcctggatgaagatcgttctggggctcgccgcctgcaaaacctctggagggaccagcgagaagaagaactgggcgagtattacatgaagaaatacgccaagtcatctgtgggagagacggtgtatggaggatctgatgagctctcagacgacatcacccagcagcagctgctcccaggagtcaaggatcccaatctgtggactgtcaaatgtaagattggggaggaacgggccacggccatttccttgatgcgcaagttcattgcctaccagttcacagacacgcccctgcagatcaagtcagtagtggcaccagagcatgtgaagggctacatctacgtggaggcctacaagcagacccacgtgaagcaggccattgagggggtgggcaacctgcggcttggctactggaaccagcagatggtgcccatcaaggagatgacagacgtgctcaaagtggtgaaggaggtggccaacctgaaaccaaagtcctgggtccgcctcaagcggggcatctacaaggatgacattgctcaggtggactacgtggagcccagccagaacaccatctccctgaagatgatcccacgcatcgactacgatcgcatcaaggcccgcatgagcttgaaagactggtttgccaaaaggaagaagtttaagcggcctccacagaggctgtttgatgctgagaagatcaggtccctggggggtgatgttgcctctgatggtgacttcctcatctttgaggggaaccgttacagccggaagggctttctgttcaagagcttcgccatgtctgctgtgatcacggagggtgtgaagccaacactctctgagctggaaaagtttgaggaccagccagagggcattgacctggaggtggtgactgagagcacagggaaggagcgggagcacaacttccaacctggggacaacgtggaggtctgtgagggtgagctcatcaacctgcagggcaagatcctcagcgtggatggcaacaagatcaccatcatgcccaagcatgaggacctcaaggacatgttggagttcccagcccaggaacttagaaaatacttcaagatgggggaccacgtgaaggtgattgctggccgattcgagggcgacacaggcctcattgtgcgggtggaggagaatttcgttatcctgttctctgacctcaccatgcatgagctgaaggtgctcccccgggacctgcagctctgctcagagacagcatcaggtgtggatgttgggggccagcatgaatggggcgagctggtgcagctggatccccagactgtgggtgtcatcgtgcgactagaacgggagaccttccaggtgctgaacatgtacgggaaggtggtgactgtcagacatcaggctgtgacccggaagaaggacaaccgctttgctgtggccttggactcagagcagaacaacatccatgtgaaagacatcgttaaggtcattgatggcccccactcaggccgagaaggggagattcgccatctcttccgaagcttcgccttcctacattgcaagaaactggtggagaacgggggcatgtttgtctgcaagacccgccacctggtgctggctgggggctcaaagccccgtgatgtgaccaacttcaccgtgggtggctttgcgcctatgagtccccggatcagcagccccatgcaccccagtgctggaggtcagcgtggcggctttggtagcccaggtggcggcagtggtggcatgagcaggggccggggccggagggacaacgaactcatcggccagaccgtgcgcatctcccaggggccctacaaaggctacatcggtgtggtgaaagatgccacagagtccacggcccgtgtggagctgcactccacctgccagaccatctctgtggaccgtcagcggctcaccacggtgggctcacggcgcccgggcggcatgacctcgacctatgggaggacgcccatgtatggctcccagacgcccatgtatggctctggctcccgaacacccatgtacggctcacagacacccctccaggatggtagccgcaccccacactacggctcacagacgcccctgcatgatggcagccgcactcctgcccagagtggggcctgggaccccaacaaccccaacacgccgtcacgggctgaggaagaatatgagtatgctttcgatgatgagcccaccccgtccccgcaggcctatgggggaacccccaatccccaaacacctggctacccagacccctcgtccccacaggtcaacccacaatacaacccgcagacgccagggacgccggccatgtacaacacagaccagttctctccctatgctgccccctccccacaaggttcctaccagcccagccccagcccccagagctaccaccaggtggcgccaagcccagcaggctaccagaatacccactccccagccagctaccaccctacaccgtcgcccatggcctatcaggctagccccagcccgagccccgttggctacagtcctatgacacctggagctccctcccctggtggctacaacccacacacgccaggctcaggcatcgagcagaactccagcgactgggtaaccactgacattcaggtgaaggtgcgggacacctacctggatacacaggtggtgggacagacaggtgtcatccgcagtgtcacggggggcatgtgctctgtgtacctgaaggacagtgagaaggttgtcagcatttccagtgagcacctggagcctatcacccccaccaagaacaacaaggtgaaagtgatcctgggcgaggatcgggaagccacgggcgtcctactgagcattgatggtgaggatggcattgtccgtatggaccttgatgagcagctcaagatcctcaacctccgcttcctggggaagctcctggaagcctagtaatgaactagtccgtaacttgaaagtatttcgatttcttggctttatatatcttgtggaaaggacgaacctgcgagattcttgaacgagaa

SEQ ID NO: 1638 - DNA, 890 bp, Homo sapiens
  source 1..890: mol_type = genomic DNA
accgccaccatgcctctgcacgtgaagtggccgttccccgcggtgccgccgctcacctggaccctggccagcagcgtcgtcatgggcttggtgggcacctacagctgcttctggaccaagtacatgaaccacctgaccgtgcacaacagggaggtgctgtacgagctcatcgagaagcgaggcccggccacgcccctcatcaccgtgtccaatcaccagtcctgcatggacgaccctcatctctgggggatcctgaaactccgccacatctggaacctgaagttgatgcgttggacccctgcagctgcagacatctgcttcaccaaggagctacactcccacttcttcagcttgggcaagtgtgtgcctgtgtgccgaggagatggcgtctaccagaaggggatggacttcattttggagaagctcaaccatggggactgggtgcatatcttcccagaagggaaagtgaacatgagttccgaattcctgcgtttcaagtggggaatcgggcgcctgattgctgagtgtcatctcaaccccatcatcctgcccctgtggcatgtcggaatgaatgacgtccttcctaacagtccgccctacttcccccgctttggacagaaaatcactgtgctgatcgggaagcccttcagtgccctgcctgtactcgagcggctccgggcggagaacaagtcggctgtggagatgcggaaagccctgacggacttcattcaagaggaattccagcatctgaagactcaggcagagcagctccacaaccacctccagcctgggagatagtaatgaactagtccgtaacttgaaagtatttcgatttcttggctttatatatcttgtggaaaggacgagataaatgtgggcccagtatctga

SEQ ID NO: 1639 - DNA, 848 bp, Homo sapiens
  source 1..848: mol_type = genomic DNA
accgccaccatgcctctgcacgtgaagtggccgttccccgcggtgccgccgctcacctggaccctggccagcagcgtcgtcatgggcttggtgggcacctacagctgcttctggaccaagtacatgaaccacctgaccgtgcacaacagggaggtgctgtacgagctcatcgagaagcgaggcccggccacgcccctcatcaccgtgtccaatcaccagtcctgcatggacgaccctcatctctgggggatcctgaaactccgccacatctggaacctgaagttgatgcgttggacccctgcagctgcagacatctgcttcaccaaggagctacactcccacttcttcagcttgggcaagtgtgtgcctgtgtgccgaggagatggcgtctaccagaaggggatggacttcattttggagaagctcaaccatggggactgggtgcatatcttcccagaaggaatcgggcgcctgattgctgagtgtcatctcaaccccatcatcctgcccctgtggcatgtcggaatgaatgacgtccttcctaacagtccgccctacttcccccgctttggacagaaaatcactgtgctgatcgggaagcccttcagtgccctgcctgtactcgagcggctccgggcggagaacaagtcggctgtggagatgcggaaagccctgacggacttcattcaagaggaattccagcatctgaagactcaggcagagcagctccacaaccacctccagcctgggagatagtaatgaactagtccgtaacttgaaagtatttcgatttcttggctttatatatcttgtggaaaggacgagctgggatggtagaacgtatggcc

SEQ ID NO: 1640 - DNA, 938 bp, Homo sapiens
  source 1..938: mol_type = genomic DNA
accgccaccatgcctctgcacgtgaagtggccgttccccgcggtgccgccgctcacctggaccctggccagcagcgtcgtcatgggcttggtgggcacctacagctgcttctggaccaagtacatgaaccacctgaccgtgcacaacagggaggtgctgtacgagctcatcgagaagcgaggcccggccacgcccctcatcaccgtgtccaatcaccagtcctgcatggacgaccctcatctctgggggatcctgaaactccgccacatctggaacctgaagttgatgcgttggacccctgcagctgcagacatctgcttcaccaaggagctacactcccacttcttcagcttgggcaagtgtgtgcctgtgtgccgaggagcagaatttttccaagcagagaatgaggggaaaggtgttctagacacaggcaggcacatgccaggtgctggaaaaagaagagagaaaggagatggcgtctaccagaaggggatggacttcattttggagaagctcaaccatggggactgggtgcatatcttcccagaaggaatcgggcgcctgattgctgagtgtcatctcaaccccatcatcctgcccctgtggcatgtcggaatgaatgacgtccttcctaacagtccgccctacttcccccgctttggacagaaaatcactgtgctgatcgggaagcccttcagtgccctgcctgtactcgagcggctccgggcggagaacaagtcggctgtggagatgcggaaagccctgacggacttcattcaagaggaattccagcatctgaagactcaggcagagcagctccacaaccacctccagcctgggagatagtaatgaactagtccgtaacttgaaagtatttcgatttcttggctttatatatcttgtggaaaggacgagcagccttactatcctaaggtctc

SEQ ID NO: 1641 - DNA, 980 bp, Homo sapiens
  source 1..980: mol_type = genomic DNA
accgccaccatgcctctgcacgtgaagtggccgttccccgcggtgccgccgctcacctggaccctggccagcagcgtcgtcatgggcttggtgggcacctacagctgcttctggaccaagtacatgaaccacctgaccgtgcacaacagggaggtgctgtacgagctcatcgagaagcgaggcccggccacgcccctcatcaccgtgtccaatcaccagtcctgcatggacgaccctcatctctgggggatcctgaaactccgccacatctggaacctgaagttgatgcgttggacccctgcagctgcagacatctgcttcaccaaggagctacactcccacttcttcagcttgggcaagtgtgtgcctgtgtgccgaggagcagaatttttccaagcagagaatgaggggaaaggtgttctagacacaggcaggcacatgccaggtgctggaaaaagaagagagaaaggagatggcgtctaccagaaggggatggacttcattttggagaagctcaaccatggggactgggtgcatatcttcccagaagggaaagtgaacatgagttccgaattcctgcgtttcaagtggggaatcgggcgcctgattgctgagtgtcatctcaaccccatcatcctgcccctgtggcatgtcggaatgaatgacgtccttcctaacagtccgccctacttcccccgctttggacagaaaatcactgtgctgatcgggaagcccttcagtgccctgcctgtactcgagcggctccgggcggagaacaagtcggctgtggagatgcggaaagccctgacggacttcattcaagaggaattccagcatctgaagactcaggcagagcagctccacaaccacctccagcctgggagatagtaatgaactagtccgtaacttgaaagtatttcgatttcttggctttatatatcttgtggaaaggacgaagagcgtttaactccgcctttcgc

SEQ ID NO: 1642 - DNA, 1769 bp, Homo sapiens
  source 1..1769: mol_type = genomic DNA
accgccaccatggggaggggcttcaggatgttcaccatgacaagagccatggaagaggctctttttcagcacttcatgcaccagaagctggggatcgcctatgccatacacaagccatttcccttctttgaaggcctcctagacaactccatcatcactaagagaatgtacatggaatctctggaagcctgtagaaatttgatccctgtatccagagtggtgcacaacattctcacccaactggagaggacttttaacctgtctcttctggtgacattgttcagtcaaattaacctgcgtgaatatcccaatctggtgacgatttacagaagcttcaaacgtgttggtgcttcctatgaatggcagagcagagacacaccaatcctacttgaagccccaactggcctagcagaaggaagctccctccataccccactggcgctgcccccaccacaaccccctcaaccaagctgttcaccctgtgcgccaagagtcagtgagcctggaacatcctcccagcaaagcgatgagatcctgagtgagtcgcccagcccatctgaccctgtcctgcctctccctgcactcatccaggaaggaagaagcacttcagtgaccaatgacaagttaacatccaaaatgaatgcggaagaagactcagaagagatgcccagcctcctcactagcactgtgcaagtggccagtgacaacctgatcccccaaataagagataaagaagaccctcaagagatgccccactctcccttgggctctatgccagagataagagataattctccagaaccaaatgacccagaagagccccaggaggtgtccagcacaccttcagacaagaaaggaaagaaaagaaaaagatgtatctggtcaactccaaaaaggagacataagaaaaaaagcctcccaggagggacagcctcatctagacacggaatccaaaagaagctcaaaagggtggatcaggttcctcaaaagaaagatgactcaacttgtaactccacggtagagacaagggcccaaaaggcgagaactgaatgtgcccgaaagtcgagatcagaggagatcattgatggcacttcagaaatgaatgaaggaaagaggtcccagaagacgcctagtacaccacgaagggtcacacaaggggcagcctcacctgggcatggcatccaagagaagctccaagtggtggataaggtgactcaaaggaaagacgactcaacctggaactcagaggtcatgatgagggtccaaaaggcaagaactaaatgtgcccgaaagtccagattgaaagaaaagaaaaaggagaaagatatctgttcaagctcaaaaaggagatttcagaaaaatattcaccgaagaggaaaacccaaaagtgacactgtggattttcactgttctaagctccccgtgacctgtggtgaggcgaaagggattttatataagaagaaaatgaaacacggatcctcagtgaagtgcattcggaatgaggatggaacttggttaacaccaaatgaatttgaagtcgaaggaaaaggaaggaacgcaaagaactggaaacggaatatacgttgtgaaggaatgaccctaggagagctgctgaagagtggacttttgctctgtcctccaagaataaatctcaagagagagttaaatagcaagtagtaatgaactagtccgtaacttgaaagtatttcgatttcttggctttatatatcttgtggaaaggacgaggagggctatatgacatgagtagc

SEQ ID NO: 1643 - DNA, 1751 bp, Homo sapiens
  source 1..1751: mol_type = genomic DNA
accgccaccatgttcaccatgacaagagccatggaagaggctctttttcagcacttcatgcaccagaagctggggatcgcctatgccatacacaagccatttcccttctttgaaggcctcctagacaactccatcatcactaagagaatgtacatggaatctctggaagcctgtagaaatttgatccctgtatccagagtggtgcacaacattctcacccaactggagaggacttttaacctgtctcttctggtgacattgttcagtcaaattaacctgcgtgaatatcccaatctggtgacgatttacagaagcttcaaacgtgttggtgcttcctatgaatggcagagcagagacacaccaatcctacttgaagccccaactggcctagcagaaggaagctccctccataccccactggcgctgcccccaccacaaccccctcaaccaagctgttcaccctgtgcgccaagagtcagtgagcctggaacatcctcccagcaaagcgatgagatcctgagtgagtcgcccagcccatctgaccctgtcctgcctctccctgcactcatccaggaaggaagaagcacttcagtgaccaatgacaagttaacatccaaaatgaatgcggaagaagactcagaagagatgcccagcctcctcactagcactgtgcaagtggccagtgacaacctgatcccccaaataagagataaagaagaccctcaagagatgccccactctcccttgggctctatgccagagataagagataattctccagaaccaaatgacccagaagagccccaggaggtgtccagcacaccttcagacaagaaaggaaagaaaagaaaaagatgtatctggtcaactccaaaaaggagacataagaaaaaaagcctcccaggagggacagcctcatctagacacggaatccaaaagaagctcaaaagggtggatcaggttcctcaaaagaaagatgactcaacttgtaactccacggtagagacaagggcccaaaaggcgagaactgaatgtgcccgaaagtcgagatcagaggagatcattgatggcacttcagaaatgaatgaaggaaagaggtcccagaagacgcctagtacaccacgaagggtcacacaaggggcagcctcacctgggcatggcatccaagagaagctccaagtggtggataaggtgactcaaaggaaagacgactcaacctggaactcagaggtcatgatgagggtccaaaaggcaagaactaaatgtgcccgaaagtccagattgaaagaaaagaaaaaggagaaagatatctgttcaagctcaaaaaggagatttcagaaaaatattcaccgaagaggaaaacccaaaagtgacactgtggattttcactgttctaagctccccgtgacctgtggtgaggcgaaagggattttatataagaagaaaatgaaacacggatcctcagtgaagtgcattcggaatgaggatggaacttggttaacaccaaatgaatttgaagtcgaaggaaaaggaaggaacgcaaagaactggaaacggaatatacgttgtgaaggaatgaccctaggagagctgctgaagagtggacttttgctctgtcctccaagaataaatctcaagagagagttaaatagcaagtagtaatgaactagtccgtaacttgaaagtatttcgatttcttggctttatatatcttgtggaaaggacgacgcaacacctttaccctcttaggg

SEQ ID NO: 1644 - DNA, 2171 bp, Homo sapiens
  source 1..2171: mol_type = genomic DNA
accgccaccatgttcaccatgacaagagccatggaagaggctctttttcagcacttcatgcaccagaagctggggatcgcctatgccatacacaagccatttcccttctttgaaggcctcctagacaactccatcatcactaagagaatgtacatggaatctctggaagcctgtagaaatttgatccctgtatccagagtggtgcacaacattctcacccaactggagaggacttttaacctgtctcttctggtgacattgttcagtcaaattaacctgcgtgaatatcccaatctggtgacgatttacagaagcttcaaacgtgttggtgcttcctatgaatggcagagcagagacacaccaatcctacttgaagccccaactggcctagcagaaggaagctccctccataccccactggcgctgcccccaccacaaccccctcaaccaagctgttcaccctgtgcgccaagagtcagtgagcctggaacatcctcccagcaaagcgatgagatcctgagtgagtcgcccagcccatctgaccctgtcctgcctctccctgcactcatccaggaaggaagaagcacttcagtgaccaatgacaagttaacatccaaaatgaatgcggaagaagactcagaagagatgcccagcctcctcactagcactgtgcaagtggccagtgacaacctgatcccccaaataagagataaagaagaccctcaagagatgccccactctcccttgggctctatgccagagataagagataattctccagaaccaaatgacccagaagagccccaggaggtgtccagcacaccttcagacaagaaaggaaagaaaagaaaaagatgtatctggtcaactccaaaaaggagacataagaaaaaaagcctcccaggagggacagcctcatctagacacggaatccaaaagaagctcaaaagggtggatcaggttcctcaaaagaaagatgactcaacttgtaactccacggtagagacaagggcccaaaaggcgagaactgaatgtgcccgaaagtcgagatcagaggagatcattgatggcacttcagaaatgaatgaaggaaagaggtcccagaagacgcctagtacaccacgaagggtcacacaaggggcagcctcacctgggcatggcatccaagagaagctccaagtggtggataaggttactcaaaggaaagacgactcaacctggaactcagaggtcatgatgagggtccaaaaggcaagaactaaatgtgcccgaaagtccagattgaaagaaaagaaaaaggagaaagatatctgttcaagctcaaaaaggagatttcagaaaaatattcaccgaagaggaaaacccaaaagtgacactgtggattttcactgttctaagctccccgtgacctgtggtgaggcgaaagggattttatataagaagaaaatgaaacacggatcctcagtgaagtgcattcggaatgaggatggaacttggttaacaccaaatgaatttgaagtcgaaggaaaaggaaggaacgcaaagaactggaaacggaatatacgttgtgaaggaatgaccctaggagagctgctgaagcggaaaaactcggatgaatgcgaggtgtgctgtcaagggggacaacttctctgctgcggtacttgtccacgagtcttccatgaggactgtcacatcccccctgtggaagccaagaggatgctgtggagttgcaccttctgcaggatgaagaggtcttcaggaagccaacagtgccatcatgtatctaagaccctggagaggcagatgcagcctcaggaccagctgattcgagattacggtgagccctttcaggaagcaatgtggttggacctggttaaggaaaggctgattacggaaatgtacacggtggcatggtttgtgcgagacatgcgcctgatgtttcgcaaccataaaacattttacaaggcttctgactttggccaggtaggacttgacttagaggcagaatttgaaaaagatctcaaagacgtgctcggttttcatgaagccaatgacggcggtttctggactcttccttagtaatgaactagtccgtaacttgaaagtatttcgatttcttggctttatatatcttgtggaaaggacgataagcattgaattacgactaggat

SEQ ID NO: 1645 - DNA, 2243 bp, Homo sapiens
  source 1..2243: mol_type = genomic DNA
accgccaccatgttcaccatgacaagagccatggaagaggctctttttcagcacttcatgcaccagaagctggggatcgcctatgccatacacaagccatttcccttctttgaaggcctcctagacaactccatcatcactaagagaatgtacatggaatctctggaagcctgtagaaatttgatccctgtatccagagtggtgcacaacattctcacccaactggagaggacttttaacctgtctcttctggtgacattgttcagtcaaattaacctgcgtgaatatcccaatctggtgacgatttacagaagcttcaaacgtgttggtgcttcctatgaatggcagagcagagacacaccaatcctacttgaagccccaactggcctagcagaaggaagctccctccataccccactggcgctgcccccaccacaaccccctcaaccaagctgttcaccctgtgcgccaagagtcagtgagcctggaacatcctcccagcaaagcgatgagatcctgagtgagtcgcccagcccatctgaccctgtcctgcctctccctgcactcatccaggaaggaagaagcacttcagtgaccaatgacaagttaacatccaaaatgaatgcggaagaagactcagaagagatgcccagcctcctcactagcactgtgcaagtggccagtgacaacctgatcccccaaataagagataaagaagaccctcaagagatgccccactctcccttgggctctatgccagagataagagataattctccagaaccaaatgacccagaagagccccaggaggtgtccagcacaccttcagacaagaaaggaaagaaaagaaaaagatgtatctggtcaactccaaaaaggagacataagaaaaaaagcctcccaggagggacagcctcatctagacacggaatccaaaagaagctcaaaagggtggatcaggttcctcaaaagaaagatgactcaacttgtaactccacggtagagacaagggcccaaaaggcgagaactgaatgtgcccgaaagtcgagatcagaggagatcattgatggcacttcagaaatgaatgaaggaaagaggtcccagaagacgcctagtacaccacgaagggtcacacaaggggcagcctcacctgggcatggcatccaagagaagctccaagtggtggataaggtgactcaaaggaaagacgactcaacctggaactcagaggtcatgatgagggtccaaaaggcaagaactaaatgtgcccgaaagtccagattgaaagaaaagaaaaaggagaaagatatctgttcaagctcaaaaaggagatttcagaaaaatattcaccgaagaggaaaacccaaaagtgacactgtggattttcactgttctaagctccccgtgacctgtggtgaggcgaaagggattttatataagaagaaaatgaaacacggatcctcagtgaagtgcattcggaatgaggatggaacttggttaacaccaaatgaatttgaagtcgaaggaaaaggaaggaacgcaaagaactggaaacggaatatacgttgtgaaggaatgaccctaggagagctgctgaagcggaaaaactcggatgaatgcgaggtgtgctgtcaagggggacaacttctctgctgcggtacttgtccacgagtcttccatgaggactgtcacatcccccctgtggaagccaagaggatgctgtggagttgcaccttctgcaggatgaagaggtcttcaggaagccaacagtgccatcatgtatctaagaccctggagaggcagatgcagcctcaggaccagctgaaatgtgagttcctcctcttgaaggcctactgtcatccacaaagctccttttttacgggcatcccatttaatattcgagattacggtgagccctttcaggaagcaatgtggttggacctggttaaggaaaggctgattacggaaatgtacacggtggcatggtttgtgcgagacatgcgcctgatgtttcgcaaccataaaacattttacaaggcttctgactttggccaggtaggacttgacttagaggcagaatttgaaaaagatctcaaagacgtgctcggttttcatgaagccaatgacggcggtttctggactcttccttagtaatgaactagtccgtaacttgaaagtatttcgatttcttggctttatatatcttgtggaaaggacgatgaaacgtgccctgaagaatcata

SEQ ID NO: 1646 - DNA, 464 bp, Homo sapiens
  source 1..464: mol_type = genomic DNA
accgccaccatgggagacaagaagagccccaccaggccgaagcggcagccgaagccgtcctcggatgagggttactgggactgtagcgtctgcaccttccggaacagcgccgaggccttcaagtgcatgatgtgcgatgtgcggaagggcacctccacccgaatgaagaatcatgaaatcataagtttcttgaaggaaggagagaagaaaaagctggatcacttaccagtaactggagttctcctattgggtaatctccacagatccacattgtttgaagttattgtgagtgcctcgaggaccaaggaaccgttgaaatttccaatttcaggaagttccagtggatgcccatcaggaagattctcatgctagtaatgaactagtccgtaacttgaaagtatttcgatttcttggctttatatatcttgtggaaaggacgagggccgtcgttaagaaagacagac

SEQ ID NO: 1647 - DNA, 644 bp, Homo sapiens
  source 1..644: mol_type = genomic DNA
accgccaccatgggagacaagaagagccccaccaggccgaagcggcagccgaagccgtcctcggatgagggttactgggactgtagcgtctgcaccttccggaacagcgccgaggccttcaagtgcatgatgtgcgatgtgcggaagggcacctccacccggaaacctcgacctgtctcccagttggttgcacagcaggttactcagcagtttgtgcctcctacacagtcaaagaaagagaaaaaagataaagtagaaaaagaaaaaagtgaaaaggaaacaactagcaaaaagaatagccataagaaaaccaggccaagattgaaaaatgtggatcggagtagtgctcagcatttggaagttactgttggagatctgacagtcattattacagactttaaggagaaaacaaagtcaccgcctgcatctagtgctgcttctgcagatcaacacagtcaaagcggctctagctctgataacacagagagaggaatgtccaggtcatcttcacccagaggagaagcctcatcattgaatggagaatctcattagtaatgaactagtccgtaacttgaaagtatttcgatttcttggctttatatatcttgtggaaaggacgaatatttgcggtgagatgagagcac

SEQ ID NO: 1648 - DNA, 455 bp, Homo sapiens
  source 1..455: mol_type = genomic DNA
accgccaccatgggagacaagaagagccccaccaggccgaagcggcagccgaagccgtcctcggatgagggttactgggactgtagcgtctgcaccttccggaacagcgccgaggccttcaagtgcatgatgtgcgatgtgcggaagggcacctccacccgggacagcaaggaaggggggaagctggtgtcctactccacagccagtcttggggttagaggaaccctgagaaatagagtaggtggtggcagctcagaagagaagaaacaggctgaatacctggcacctggaagaagaaggaatatagtacacaggggagttggcccaggacagagaagtgggcctagtttaaaagaggcttagtaatgaactagtccgtaacttgaaagtatttcgatttcttggctttatatatcttgtggaaaggacgagtcactcaagagtaggttggtggt

SEQ ID NO: 1649 - DNA, 518 bp, Homo sapiens
  source 1..518: mol_type = genomic DNA
accgccaccatgggagacaagaagagccccaccaggaaacctcgacctgtctcccagttggttgcacagcaggttactcagcagtttgtgcctcctacacagtcaaagaaagagaaaaaagataaagtagaaaaagaaaaaagtgaaaaggaaacaactagcaaaaagaatagccataagaaaaccaggccaagattgaaaaatgtggatcggagtagtgctcagcatttggaagttactgttggagatctgacagtcattattacagactttaaggagaaaacaaagtcaccgcctgcatctagtgctgcttctgcagatcaacacagtcaaagcggctctagctctgataacacagagagaggaatgtccaggtcatcttcacccagaggagaagcctcatcattgaatggagaatctcattagtaatgaactagtccgtaacttgaaagtatttcgatttcttggctttatatatcttgtggaaaggacgatatcccacatggttctcgttcgcc

SEQ ID NO: 1650 - DNA, 671 bp, Homo sapiens
  source 1..671: mol_type = genomic DNA
accgccaccatggctgctgaaccagtagaagacaattgcatcaactttgtggcaatgaaatttattgacaatacgctttactttatagaaaacctggaatcagattactttggcaagcttgaatctaaattatcagtcataagaaatttgaatgaccaagttctcttcattgaccaaggaaatcggcctctatttgaagatatgactgattctgactgtagagataatgcaccccggaccatatttattataagtatgtataaagatagccagcctagaggtatggctgtaactatctctgtgaagtgtgagaaaatttcaactctctcctgtgagaacaaaattatttcctttaaggaaatgaatcctcctgataacatcaaggatacaaaaagtgacatcatattctttcagagaagtgtcccaggacatgataataagatgcaatttgaatcttcatcatacgaaggatactttctagcttgtgaaaaagagagagacctttttaaactcattttgaaaaaagaggatgaattgggggatagatctataatgttcactgttcaaaacgaagactagtaatgaactagtccgtaacttgaaagtatttcgatttcttggctttatatatcttgtggaaaggacgagcaacgctgcgaggatgcgatcca

SEQ ID NO: 1651 - DNA, 932 bp, Homo sapiens
  source 1..932: mol_type = genomic DNA
accgccaccatggcgccgcccccagccccgctcctggcgccgaggcccggggagacccggcctggttgcaggaagcccgggactgtgagcttcgcggacgtggccgtgtacttctccccggaggagtggggctgtctgcggcccgcgcagagggctctgtaccgggacgtgatgcaggagacctacggccacctgggcgcgctcggattcccaggccccaaaccagccctcatctcttggatggaacaggagagtgaggcttggagccccgccgcccaggatcctgagaagggggaaagactgggaggagctcggagaggagatgtcccaaacaggaaggaagaggaaccggaggaagtcccaagagccaaagggcctagaaaggctcctgtgaaggagagtcctgaagtgctggtggaacgcaaccctgacccagctattagcgtggccccggcacgggcacagccacccaaaaatgctgcctgggacccgaccacaggagcacagcccccggcacccatacccagcatggatgctcaggccggccagcggcgccacgtgtgcacggactgcggccgccgcttcacctacccctcactgctggtcagccacaggcgcatgcactcgggggagcggcctttcccctgccccgagtgtggcatgcgcttcaagaggaagttcgcagtggaagcgcaccagtggatccaccgctcctgctccggggggcggcggggccggaggcctgggatccgggctgtgcctcgggcccccgtccgaggtgaccgggacccgcctgtgctcttccggcactacccagacatcttcgaggagtgcggctagtaatgaactagtccgtaacttgaaagtatttcgatttcttggctttatatatcttgtggaaaggacgaccagtctcgatcaatcgctcttgc

SEQ ID NO: 1652 - DNA, 890 bp, Homo sapiens
  source 1..890: mol_type = genomic DNA
accgccaccatgccgaggtctccgctgcgctccagtctgtcaacagaggcttcaggaccgcggggtcccttcaaatgccccgccagtcccaggccaatcaccgcgcagcttcttccgggatcgtcgccaatcatcggccgttgcgtattgcgggtacagaggggattcccaggccccaaaccagccctcatctcttggatggaacaggagagtgaggcttggagccccgccgcccaggatcctgagaagggggaaagactgggaggagctcggagaggagatgtcccaaacaggaaggaagaggaaccggaggaagtcccaagagccaaagggcctagaaaggctcctgtgaaggagagtcctgaagtgctggtggaacgcaaccctgacccagctattagcgtggccccggcacgggcacagccacccaaaaatgctgcctgggacccgaccacaggagcacagcccccggcacccatacccagcatggatgctcaggccggccagcggcgccacgtgtgcacggactgcggccgccgcttcacctacccctcactgctggtcagccacaggcgcatgcactcgggggagcggcctttcccctgccccgagtgtggcatgcgcttcaagaggaagttcgcagtggaagcgcaccagtggatccaccgctcctgctccggggggcggcggggccggaggcctgggatccgggctgtgcctcgggcccccgtccgaggtgaccgggacccgcctgtgctcttccggcactacccagacatcttcgaggagtgcggctagtaatgaactagtccgtaacttgaaagtatttcgatttcttggctttatatatcttgtggaaaggacgactccgtggaagagaacgccgaacg

SEQ ID NO: 1653 - DNA, 1616 bp, Homo sapiens
  source 1..1616: mol_type = genomic DNA
accgccaccatgttttgttttgtttttcaggaactgttgacattcagggatgtgaccatagaattctctctggaggagtgggagtttctgaaccctgctcagcagagtttgtataggaaagtgatgctagagaactacagaaacctggtctctctgggtcttactgtttctaagccagaactgattagccgtctggagcaaagacaggagccctggaatgtgaagagacatgagaccatagccaaacccccagctatgtcttctcattacactgaagaccttttgccagaacagtgcatgcaagattcattccaaaaagtgatactgagaagatatggaagctgtggacttgaggatttacacttaaggaaggatggggaaaatgtgggtgagtgtaaggatcaaaaagaaatttataatggacttaaccaatgtttgtcaactctacctagcaaaattttcccatataataaatgtgtgaaagtctttagtaaatcatcaaatctaaatagagaaaacataagacatactacagagaaacttttcaaatgtatgcaatgtggcaaagtctttaaatctcactcaggcctttcttatcataagataattcacactgaagagaaactctgcatatgtgaggaatgtggcaaaacctttaagtggttctcataccttactaaacataagagaattcacactggagagaaaccatacaaatgtgaagaatgtggcaaagcttttaactggtgctcgagtcttactaaacataagagaatccatactggtgagaaaccctacaaatgtgaagaatgtggaaaagcctttcactggtgttcaccctttgttagacataagaaaattcatacaggagaaaaaccctatacatgtgaagactgtggcagagcgtttaaccggcactcacatctcaccaaacataagacaattcacactggaaagaaaccctacaaatgtaaagaatgtgggaaagcctttaaccactgctcactacttactatacatgagagaacccatacgggagagaaaccctataaatgtgaagaatgtggcaaagcttttaactcatcatcaattcttactgaacataaggtaattcatagcggagagaaaccctacaaatgtgaaaaatgtgacaaagtctttaagaggttctcataccttactaaacacaagagaattcacactggagagaaaccctacaaatgtgaagaatgtggcaaagcttttaactggtcctcaatccttactgaacataagagaattcatactggagagaaaccctacaactgtgaagaatgtggaaaagcctttaatcggtgctcacaccttactagacataagaaaattcatactgccgtcaaacgctataaatgtgaagaatgtggcaaagcttttaaacggtgctcacatcttaatgaacataagagagttcaaagaggagagaaatcctgcaagtataaaaaatgtggggaagcttttaatcactgctcaaaccttactacgtagtaatgaactagtccgtaacttgaaagtatttcgatttcttggctttatatatcttgtggaaaggacgaccgacagagggaacgtggaaactg

SEQ ID NO: 1654 - DNA, 1598 bp, Homo sapiens
  source 1..1598: mol_type = genomic DNA
accgccaccatggaactgttgacattcagggatgtgaccatagaattctctctggaggagtgggagtttctgaaccctgctcagcagagtttgtataggaaagtgatgctagagaactacagaaacctggtctctctgggtcttactgtttctaagccagaactgattagccgtctggagcaaagacaggagccctggaatgtgaagagacatgagaccatagccaaacccccagctatgtcttctcattacactgaagaccttttgccagaacagtgcatgcaagattcattccaaaaagtgatactgagaagatatggaagctgtggacttgaggatttacacttaaggaaggatggggaaaatgtgggtgagtgtaaggatcaaaaagaaatttataatggacttaaccaatgtttgtcaactctacctagcaaaattttcccatataataaatgtgtgaaagtctttagtaaatcatcaaatctaaatagagaaaacataagacatactacagagaaacttttcaaatgtatgcaatgtggcaaagtctttaaatctcactcaggcctttcttatcataagataattcacactgaagagaaactctgcatatgtgaggaatgtggcaaaacctttaagtggttctcataccttactaaacataagagaattcacactggagagaaaccatacaaatgtgaagaatgtggcaaagcttttaactggtgctcgagtcttactaaacataagagaatccatactggtgagaaaccctacaaatgtgaagaatgtggaaaagcctttcactggtgttcaccctttgttagacataagaaaattcatacaggagaaaaaccctatacatgtgaagactgtggcagagcgtttaaccggcactcacatctcaccaaacataagacaattcacactggaaagaaaccctacaaatgtaaagaatgtgggaaagcctttaaccactgctcactacttactatacatgagagaacccatacgggagagaaaccctataaatgtgaagaatgtggcaaagcttttaactcatcatcaattcttactgaacataaggtaattcatagcggagagaaaccctacaaatgtgaaaaatgtgacaaagtctttaagaggttctcataccttactaaacacaagagaattcacactggagagaaaccctacaaatgtgaagaatgtggcaaagcttttaactggtcctcaatccttactgaacataagagaattcatactggagagaaaccctacaactgtgaagaatgtggaaaagcctttaatcggtgctcacaccttactagacataagaaaattcatactgccgtcaaacgctataaatgtgaagaatgtggcaaagcttttaaacggtgctcacatcttaatgaacataagagagttcaaagaggagagaaatcctgcaagtataaaaaatgtggggaagcttttaatcactgctcaaaccttactacgtagtaatgaactagtccgtaacttgaaagtatttcgatttcttggctttatatatcttgtggaaaggacgaatgtcatgtctcacatgctgtcta

SEQ ID NO: 1655 - DNA, 1370 bp, Homo sapiens
  source 1..1370: mol_type = genomic DNA
accgccaccatgtcttctcattacactgaagaccttttgccagaacagtgcatgcaagattcattccaaaaagtgatactgagaagatatggaagctgtggacttgaggatttacacttaaggaaggatggggaaaatgtgggtgagtgtaaggatcaaaaagaaatttataatggacttaaccaatgtttgtcaactctacctagcaaaattttcccatataataaatgtgtgaaagtctttagtaaatcatcaaatctaaatagagaaaacataagacatactacagagaaacttttcaaatgtatgcaatgtggcaaagtctttaaatctcactcaggcctttcttatcataagataattcacactgaagagaaactctgcatatgtgaggaatgtggcaaaacctttaagtggttctcataccttactaaacataagagaattcacactggagagaaaccatacaaatgtgaagaatgtggcaaagcttttaactggtgctcgagtcttactaaacataagagaatccatactggtgagaaaccctacaaatgtgaagaatgtggaaaagcctttcactggtgttcaccctttgttagacataagaaaattcatacaggagaaaaaccctatacatgtgaagactgtggcagagcgtttaaccggcactcacatctcaccaaacataagacaattcacactggaaagaaaccctacaaatgtaaagaatgtgggaaagcctttaaccactgctcactacttactatacatgagagaacccatacgggagagaaaccctataaatgtgaagaatgtggcaaagcttttaactcatcatcaattcttactgaacataaggtaattcatagcggagagaaaccctacaaatgtgaaaaatgtgacaaagtctttaagaggttctcataccttactaaacacaagagaattcacactggagagaaaccctacaaatgtgaagaatgtggcaaagcttttaactggtcctcaatccttactgaacataagagaattcatactggagagaaaccctacaactgtgaagaatgtggaaaagcctttaatcggtgctcacaccttactagacataagaaaattcatactgccgtcaaacgctataaatgtgaagaatgtggcaaagcttttaaacggtgctcacatcttaatgaacataagagagttcaaagaggagagaaatcctgcaagtataaaaaatgtggggaagcttttaatcactgctcaaaccttactacgtagtaatgaactagtccgtaacttgaaagtatttcgatttcttggctttatatatcttgtggaaaggacgatttaaatctattgaggttagtggc

SEQ ID NO: 1656 - DNA, 1502 bp, Homo sapiens
  source 1..1502: mol_type = genomic DNA
accgccaccatgctagagaactacagaaacctggtctctctgggtcttactgtttctaagccagaactgattagccgtctggagcaaagacaggagccctggaatgtgaagagacatgagaccatagccaaacccccagctatgtcttctcattacactgaagaccttttgccagaacagtgcatgcaagattcattccaaaaagtgatactgagaagatatggaagctgtggacttgaggatttacacttaaggaaggatggggaaaatgtgggtgagtgtaaggatcaaaaagaaatttataatggacttaaccaatgtttgtcaactctacctagcaaaattttcccatataataaatgtgtgaaagtctttagtaaatcatcaaatctaaatagagaaaacataagacatactacagagaaacttttcaaatgtatgcaatgtggcaaagtctttaaatctcactcaggcctttcttatcataagataattcacactgaagagaaactctgcatatgtgaggaatgtggcaaaacctttaagtggttctcataccttactaaacataagagaattcacactggagagaaaccatacaaatgtgaagaatgtggcaaagcttttaactggtgctcgagtcttactaaacataagagaatccatactggtgagaaaccctacaaatgtgaagaatgtggaaaagcctttcactggtgttcaccctttgttagacataagaaaattcatacaggagaaaaaccctatacatgtgaagactgtggcagagcgtttaaccggcactcacatctcaccaaacataagacaattcacactggaaagaaaccctacaaatgtaaagaatgtgggaaagcctttaaccactgctcactacttactatacatgagagaacccatacgggagagaaaccctataaatgtgaagaatgtggcaaagcttttaactcatcatcaattcttactgaacataaggtaattcatagcggagagaaaccctacaaatgtgaaaaatgtgacaaagtctttaagaggttctcataccttactaaacacaagagaattcacactggagagaaaccctacaaatgtgaagaatgtggcaaagcttttaactggtcctcaatccttactgaacataagagaattcatactggagagaaaccctacaactgtgaagaatgtggaaaagcctttaatcggtgctcacaccttactagacataagaaaattcatactgccgtcaaacgctataaatgtgaagaatgtggcaaagcttttaaacggtgctcacatcttaatgaacataagagagttcaaagaggagagaaatcctgcaagtataaaaaatgtggggaagcttttaatcactgctcaaaccttactacgtagtaatgaactagtccgtaacttgaaagtatttcgatttcttggctttatatatcttgtggaaaggacgaggcgttaggcgaggaggtttgggc

SEQ ID NO: 1657 - DNA, 1676 bp, Homo sapiens
  source 1..1676: mol_type = genomic DNA
accgccaccatgaaggaagaatcagctgcacaattaggttgttgtcataggcccatggccctgggaggtacagggggctccctgtcccccagcctggacttccagctcttccgaggtgaccaggtcttctcagcctgcagaccacttccagacatggtggatgctcatggcccatcctgtgccagctggctgtgtcccttgcccctggcaccgggcaggtctgcactgctggcctgcctacaggacctggacctgaacctgtgcaccccacagccggcacccctgggcacagacctgcagggcctccaagaggacgccttgagcatgaagcacgagccaccagggctgcaggccagctccaccgatgacaagaaattcacagtcaagtacccacagaacaaggacaagctgggaaaacagccagaaagagctggcgagggggccccctgcccagccttctcctctcataacagctcttccccaccaccgctgcagaacagaaagagccccagccccttggctttctgcccctgtccccctgtcaactccatctccaaggagctcccatttctcctccacgccttctaccctggatacccacttctcctgcctccaccccacctgttcacctatggggccctaccttctgaccaatgtccccacctcctcatgctgccccaagacccctcctaccccaccatggctatgcctagcctgctgatgatggtcaatgagctggggcaccccagcgctcggtgggagaccctgcttccctacccaggggccttccaagcctctggccaagctctgccttcccaggcccgaaatccaggtgctggagctgccccaaccgactccccaggcctggagcgtggtggcatggcatctccagcaaagcgggtcccattgagttcccagacaggcaccgcagccttgccttacccgctgaaaaagaagaatggcaaaatcctgtacgagtgcaacatatgtggcaagagctttgggcagctctccaatctcaaggtccacctgcgtgtgcacagtggagagcgtccattccagtgtgccttgtgccagaagagcttcactcaacttgcccacctgcagaagcaccacctggtgcacactggggagcggccccacaagtgctcgataccgtgggttccaggaagaaatcactggaaaagcttccaggcctggagggaaagagaggtgtgccacaagcgcttcagcagctccagtaacctcaagacccacctgcgcctgcactccggggcccggcccttccagtgcagtgtctgccggagtcgcttcacccagcacatccacctgaagctgcaccatcggctgcatgccccacagccctgtggcctggtgcacacccagctgcccctggcctctctggcctgccttgcccaatggcaccagggggcactagatcttatggcggtggcatctgagaaacacatgggctatgacatagatgaggtcaaagtgtcctcgacatcccaggggaaagcaagagcagtgagcctgagcagtgccgggactcccctggtgatggggcaggaccagaacaattagtaatgaactagtccgtaacttgaaagtatttcgatttcttggctttatatatcttgtggaaaggacgacgtagcggtggatctctaacttca

SEQ ID NO: 1658 - DNA, 1616 bp, Homo sapiens
  source 1..1616: mol_type = genomic DNA
accgccaccatgaaggaagaatcagctgcacaattaggttgttgtcataggcccatggccctgggaggtacagggggctccctgtcccccagcctggacttccagctcttccgaggtgaccaggtcttctcagcctgcagaccacttccagacatggtggatgctcatggcccatcctgtgccagctggctgtgtcccttgcccctggcaccgggcaggtctgcactgctggcctgcctacaggacctggacctgaacctgtgcaccccacagccggcacccctgggcacagacctgcagggcctccaagaggacgccttgagcatgaagcacgagccaccagggctgcaggccagctccaccgatgacaagaaattcacagtcaagtacccacagaacaaggacaagctgggaaaacagccagaaagagctggcgagggggccccctgcccagccttctcctctcataacagctcttccccaccaccgctgcagaacagaaagagccccagccccttggctttctgcccctgtccccctgtcaactccatctccaaggagctcccatttctcctccacgccttctaccctggatacccacttctcctgcctccaccccacctgttcacctatggggccctaccttctgaccaatgtccccacctcctcatgctgccccaagacccctcctaccccaccatggctatgcctagcctgctgatgatggtcaatgagctggggcaccccagcgctcggtgggagaccctgcttccctacccaggggccttccaagcctctggccaagctctgccttcccaggcccgaaatccaggtgctggagctgccccaaccgactccccaggcctggagcgtggtggcatggcatctccagcaaagcgggtcccattgagttcccagacaggcaccgcagccttgccttacccgctgaaaaagaagaatggcaaaatcctgtacgagtgcaacatatgtggcaagagctttgggcagctctccaatctcaaggtccacctgcgtgtgcacagtggagagcgtccattccagtgtgccttgtgccagaagagcttcactcaacttgcccacctgcagaagcaccacctggtgcacactggggagcggccccacaagtgctcggtgtgccacaagcgcttcagcagctccagtaacctcaagacccacctgcgcctgcactccggggcccggcccttccagtgcagtgtctgccggagtcgcttcacccagcacatccacctgaagctgcaccatcggctgcatgccccacagccctgtggcctggtgcacacccagctgcccctggcctctctggcctgccttgcccaatggcaccagggggcactagatcttatggcggtggcatctgagaaacacatgggctatgacatagatgaggtcaaagtgtcctcgacatcccaggggaaagcaagagcagtgagcctgagcagtgccgggactcccctggtgatggggcaggaccagaacaattagtaatgaactagtccgtaacttgaaagtatttcgatttcttggctttatatatcttgtggaaaggacgaggtgactcgcgtgaacatatgaaa

SEQ ID NO: 1659 - DNA, 473 bp, Homo sapiens
  source 1..473: mol_type = genomic DNA
accgccaccatgccaggaccacctggaagcctagaaatgggaccactgacatttagggatgtggccatagaattctctctggaggagtggcaatgcctggacactgcacaacggaatttatataggaaagtgatgtttgagaactacagaaacctggtcttcctgggtattgctgtctctaagcctcacctgataacctgtttggagcaaggaaaagagccctggaataggaagagacaggagatggtagccaaacccccagagtcttactgtgttgctcaggctgatcttgaactcctggtctcaagttatcttactgccttggcctccctaaagatgtgggattacagaaataatccactttgccaggctactatgtagtaatgaactagtccgtaacttgaaagtatttcgatttcttggctttatatatcttgtggaaaggacgacagttgccacgtctctgcgtcgcg

SEQ ID NO: 1660 - DNA, 1694 bp, Homo sapiens
  source 1..1694: mol_type = genomic DNA
accgccaccatgccaggaccacctggaagcctagaaatgggaccactgacatttagggatgtggccatagaattctctctggaggagtggcaatgcctggacactgcacaacggaatttatataggaaagtgatgtttgagaactacagaaacctggtcttcctgggtattgctgtctctaagcctcacctgataacctgtttggagcaaggaaaagagccctggaataggaagagacaggagatggtagccaaacccccagttatatattctcatttcactgaagacctttggccagagcatagcataaaagattcttttcaaaaagtgatactgagaggatatggaaaatgtggacatgagaatttacaattaagaataagttgtaaaagtgtggatgagtctaaggtgttcaaagaaggttataatgaacttaaccaatgtttgagaactacccagagcaaaatatttcaatgtgataaatacgtgaaagtctttcataaattttcaaattcaaacagtcataagaaaagaaatactggaaagaaggttttcaaatgtaaagaatgtggcaaatcattttgcatgctttcacatctaacacaacatataagaattcacactagagagaattcttacaaatgtgaggaatgtggcaaagttcttaactggttctcagagcttattaaacataagggaattcatatgggagagaaaccctacaaatgtgaggaatgtggcaaagcctttaaccaatcctcaacccttattaaacataagaaaattcatattgaagagaaacccttcaaatgtgaagaatgtggcaaagcctttagtttattctcaatccttagtaaacataagataattcatactggagacaaaccttacaaatgtgatgaatgtcacaaagcctttaactggtttgcaacccttactaaccataagagaattcatactggagagaaacccttcaaatgtgaagaatgtggcaaagactttaaccagttttcaaaccttactaaacataagaaaattcatactggagagaaaccctacaaatgtgaagaatgtggcaaagcttttaaccagtttgcaaaccttactagacataagaaaattcatactggagagaaatcctacaaatgtgaagaatgcggcaaagcttttatacagtcctcaaaccttactgaacatatgagaattcatactggagagaaaccctacaaatgtgaagaatgtggcaaagcttttaatgggtgctccagccttactcgacataagagaattcacactagagagaatacctacaaatgtgaagaatgtggcaaaggctttactttattttcaacccttactaaccataaagtaattcatactggagagaaatcctacaaatgtgatgaatgtggcaatgtttttaactggcctgcaactcttgctaatcataagagaattcatgctagagagaaaccctacaaatgtgaagaatgtggcaaagcttttaaccggtcctcacaccttactagacataagaaaattcatactggtgagaaactctacaaacctgaaaaatgtgacaataattttgataacacctagtaatgaactagtccgtaacttgaaagtatttcgatttcttggctttatatatcttgtggaaaggacgaggaaggttcaggcgatggttcggc

SEQ ID NO: 1661 - DNA, 2039 bp, Homo sapiens
  source 1..2039: mol_type = genomic DNA
accgccaccatggaaccattgaaatttagggatgtggccatagaattctctctggaggagtggcaatgcctggacactatacagcagaatttatataggaatgtgatgttagagaactacagaaacctggtcttcttgggtattgttgtctctaagccagacctgatcacctgtctggaacaagaaaaagagccttggactagaaagagacataggatggtggccgaacccccagttatttgttctcattttgcccaagacttttcaccagagcagaacataaaagattctttccaaaaagtgacaccaagaagatatggaaaatgtgaacatgagaatttacagttaagtaaaagtgtggatgagtgcaaagtgcaaaaaggaggttataatggacttaaccaatgtttgccaactacccagagcaaaatatttcaatgtgataaatatatgaaaatctttcataaattttcaaatttaaatggacataaggtaagacacaccagaaaaaaaccttttaaatataaagaatttggcaaatcattttgcatattttcaaacctaactcaacataaaataatttgtactagagtaaatttctacaaatgtgaagactgtggaaaagcctttaatggatcctcaatctttactaaacataaaagaattcatattggagagaaatcgtacatatgtgaagaatgtggcaaagcctgtaaccagttcacaaaccttactacacataagataatttatactagagacaaactctacaaacgtgaagaatgtagcaaagcctttaacctgtcgtcacacattacaacacatacaataattcatactggagagaatccctacaaacgtgaagaatgtgacaaagcctttaatcagtccttaacccttactacacataagataattcataccagagagaaactcaatgaatataaggaatgtggcaaagctttcaaccagtcctcacaccttaccagacataagataattcatactggagagaaaccctacaaatgtgaagaatgtggcaaagcctttaaccagtcctcacaccttaccagacataagataattcatactggagagaagccctacagatgtgaagaatgtggcaaagcctttaggcagtcctcacaccttactacacataagataattcatactggagagaaaccctacaaatgtgaagaatgtggcaaagcttttaacaagtcctcacaccttactagacataagagcattcatactggagaaaaaccctaccagtgtgaaaaatgtggcaaagcttctaaccaatcctcaaaccttactgaacataagaatattcatactgaagagaaaccatacaaatgtgaagaatgtgggaaagcctttaaccagttctcaaaccttactacacataaaagaattcatactggagagaaaccctacaaatgtgaagaatgtggcaaagcttttaaccagtcctcaatccttactacacataagagaattcatactggagagaaatcctacaaatgtgaagaatgtggcaaagctttctatcgatcctcaaaacttactgaacataagaaaattcatactggagagaaaccctacacatgtgaagaatgtggcaaagcctttaaccattcctcacatcttgctacacataaggtaattcatactggagagaaaccctaccaatgtgaagaatgtggtaaagcctttaaccagtcctcacaccttactagacataagagaattcatactggagagaaaccctaccaatgtgaaaaatgtggcaaagcttttaaccagtcctcaaaccttactggacataagaaaattcatactggtgagaaactctacaaacctaaaagatgtaacagtgattttgaaaacacttcaaagttttctaaacataaaagaaattatgctggtgagaaatcttagtaatgaactagtccgtaacttgaaagtatttcgatttcttggctttatatatcttgtggaaaggacgactctccggatacattgccgagaga

SEQ ID NO: 1662 - DNA, 3815 bp, Homo sapiens
  source 1..3815: mol_type = genomic DNA
accgccaccatgggggatatgaagacccctgattttgatgacctccttgctgcctttgacatccctgacattgatgcgaatgaagccatccattctgggccagaagaaaatgaggggcctggaggcccagggaagccagaaccaggtgtaggaagtgaatctgaagacacagcagcagcctctgctggggatggccctggagttccagcccaggcctctgaccatggcctgccaccgccagacatttctgtagtcagtgtcattgtcaagaacactgtgtgtcccgagcagtctgaggccctggctggaggctcagcaggagacggggcccaggctgctggggtaactaaagaagggcctgtggggcctcatcgaatgcagaatggttttgggagccctgaaccttccctcccaggaactccccactctcctgctcctcccagtgggggcacctggaaagaaaaaggcatggaaggcaaaactcccttggacctgtttgctcattttggccctgagccaggggaccactcagatccgctgcctccctctgcaccctctcccactcgggagggggctctgaccccgcctcctttcccctcttcctttgagctggcccaggagaatggcccaggcatgcagccacctgtttcttccccaccattgggggccttgaagcaggagagctgcagcccccatcatccccaggtcctagcccaacaaggctcaggctccagccctaaggccacggacatccctgccagtgcctcgcctcccccagttgctggggtgcccttcttcaagcagtctccagggcaccagagccctcttgcctcccccaaagtgcccgtctgtcagcccttgaaggaagaagatgatgatgaggggccagtggacaagtcttccccaggaagtccccagagtccctctagtggggccgaggctgcagatgaggacagcaatgactcccctgcctccagctcctctaggcctcttaaggtgcggatcaagaccattaaaacatcctgcgggaatatcacaaggactgtaactcaggtcccctcagatcctgatccacctgcccccttggctgagggggccttcttggctgaggctagcctcttgaagctgtcccctgcaacacctacttctgagggtccaaaggtggtgagcgtacagttgggtgatggtacaaggctgaaaggcactgtgctgcctgtggccaccatccagaacgccagtactgccatgctgatggcagccagtgtggctcgcaaggctgtggtgctgcctggggggactgccaccagccctaagatgattgctaagaacgtgctaggcctggtgccccaagccctgcctaaggctgacgggcgggcagggctggggactgggggacagaaggtgaatggtgcctcggtggtgatggtgcaaccttcaaagacagctactgggccaagtacagggggcggcacagtgatatcacggacccagtccagcctggtggaggccttcaacaagatcctcaacagcaagaacctgctccctgcctataggccaaacctgagcccaccagctgaggctgggctggccctgcctcccaccggctaccgctgcctggagtgtggggatgccttctcattggagaagagcctggcacggcactatgaccgtcggagcatgcgcatcgaggtcacctgcaaccactgcgcccgccgcctggtcttcttcaacaagtgcagcctgctcctgcatgcacgtgaacacaaggacaaggggctcgtcatgcagtgctcacatttggtcatgaggcctgtagcccttgaccagatggtggggcagccggacatcacaccgctgctgcctgtagctgtcccacctgtctctggacctctggccttgcctgccttgggcaagggtgagggggccatcacctcctctgccattactacagttgctgctgaggcccctgtcctgccgctctccacagagccgcctgctgccccggccacctctgcttacacatgctttcgctgcctggagtgcaaggaacagtgccgggacaaggctggcatggcagctcacttccagcagctcggcccccctgcccctggggccaccagcaatgtgtgcccaacctgccccatgatgctccccaatcgctgcagcttcagcgcccaccagcgcatgcataagaatcgacccccccatgtctgtcctgagtgtgggggcaacttcctgcaagccaattttcagacccatctccgggaggcctgtctgcacgtctctcgccgtgtaggatacaggtgccccagctgttcagtggtgtttgggggtgtgaactccatcaagtcccacatccagacgtcgcactgcgaggttttccacaagtgccccatctgccccatggccttcaagtctgggccaagtgcccatgcccacctctactcccagcatcccagcttccaaactcagcaggccaagctgatctacaagtgcgccatgtgcgacacagtcttcactcacaaacccctcctctcctcacacttcgaccagcacttgctgccccagcgtgtcagtgtctttaagtgcccgtcttgtcctctgctctttgcccaaaaaaggaccatgctggaacatctcaagaacacccatcagtctgggcgcttggaggagactgctgggaaaggggccgggggtgccctgctgacccccaagactgagcctgaggagctggctgtttctcagggaggggcagcccctgctactgaggagtcgtcttcatcttcagaagaggaggaagtacccagctcccctgagcccccccgtccagccaaacggcctcggcgggaactagggagcaaaggcctcaagggtgggggtggggggcctggaggctggacctgtggcctgtgtcactcctggttccctgagcgtgatgaatacgtggcccacatgaagaaggagcatggcaagtcagtgaaaaagttcccctgtcgcctgtgtgagcgctccttctgctccgcccccagcctgaggcgccatgtcagagttaatcacgagggcatcaagcgagtttacccctgcaggtattgcacagagggaaaacgcaccttcagcagccgcctgatcctagagaaacatgtccaggtccggcacggcttgcagcttggggcccagtcccctggccgggggaccaccttggctcggggttccagtgccagagcccaggggccaggtcggaaacgccgccagtcttctgactcttgcagtgaggagcctgacagcacgacaccgccagccaagtcccccaggggcggacctggatctggaggccatggccctctgcgctaccggagcagcagctccacagaacagagcctcatgatggggttgagggtggaggatggtgcccagcagtgcctcgactgtggcttgtgctttgcctcccctggctccctgagccgacaccgtttcatcagccacaagaagagacggggtgtgggtaaagccagtgccctggggctgggggatggggaggaagaggcccctccatcaaggtctgaccccgatggtggagactcacccctgcctgcttctggaggcccactgacctgtaaggtctgtggcaagagctgcgacagccctctaaacctcaagacccacttccgcacgcatggcatggcgttcatcagggctcggcagggggctgttggggacaactagtaatgaactagtccgtaacttgaaagtatttcgatttcttggctttatatatcttgtggaaaggacgaagcgggaggagtaacgtagcgcag

SEQ ID NO: 1663 - DNA, 1238 bp, Homo sapiens
  source 1..1238: mol_type = genomic DNA
accgccaccatgatcagcttccaggaatcagtgacattccaggatgtggctgtggatttcactgcagaggagtggcagctgcttgattgtgctgagagaaccctgtattgggatgtgatgttggagaactatagaaacctcatctcagtgggatgtccaattaccaaaacaaaagtgatcctcaaggtagagcaaggacaagagccatggatggtggagggagcgaatccacacgagagctctccagaatctgactacccacttgttgatgaaccagggaagcatcgggaaagcaaagacaattttttgaagtcagttttgctcacattcaataaaattctgactatggagagaatccaccattataatatgagcacaagtcttaatccaatgagaaaaaaatcatataaatcgtttgagaagtgtttgccacctaatttagacttacttaaatataatagaagttatactgtagaaaacgcttatgaatgcagtgaatgcgggaaagccttcaaaaagaagtttcatttcattagacatgaaaaaaatcatacaaggaaaaaaccttttgaatgcaatgactgtggaaaagcctatagcaggaaggcacaccttgcaactcatcagaaaattcataatggagagagaccctttgtgtgcaatgattgtgggaaggcgtttatgcataaagcccaactcgtggtccaccagagacttcacactggagagaagccttatgagtgcagtcaatgtgggaaaacattcacttggaactcctcatttaatcaacacgtgaaatctcatacacttgagaagtcatttgaatgtaaggaatgtgggaaaaccttcaggtatagttcatccctttataaacattccagatttcatacaggagagaaaccctaccagtgtatcatatgtggcaaagcttttggcaacacatccgtgcttgttacacaccaaagaattcatacaggagagaaaccttacagttgtattgaatgtggcaaagccttcatcaagaagtcccatctcctcagacatcagataactcatacaggagagaagccctatgaatgtaacagatgtgggaaagcattttcccagaagtcaaatcttattgtacatcagaaaattcatacatagtaatgaactagtccgtaacttgaaagtatttcgatttcttggctttatatatcttgtggaaaggacgaaggcagaatagttctaacgcggat

SEQ ID NO: 1664 - DNA, 806 bp, Homo sapiens
  source 1..806: mol_type = genomic DNA
accgccaccatggcagctaaaatggagataactttaagctccaacactgaagcttcctccaagcaagagagacacataatagccaaactagaagagaaacggggccctcctctgcaaaaaaactgcccagatcctgagctctgccgccagagcttcagacgcttttgttatcaagaggtgtctggaccccaagaggctctctcccagctccgacagctctgccgtcagtggttgcaacccgagctgcacaccaaggagcagattttggagcttctggtgatggagcagttcctgaccatcctgcccccggagatccaggctcgggtcaggcatcgatgtccaatgagcagcaaggagattgtgaccctcgtggaagattttcacagagcatccaagaaaccaaagcagtgggtggccgtttgtatgcaggggcaaaaggtgctcttggagaaaactggatctcagcttggagaacaggaactgccagactttcaaccgcagactcctaggagagatctcagggagagctctccagcagagccttcccaggcaggagcttatgaccggctgagcccccatcattgggagaaatccccactcctccaagaaccaacccccaaattggctgggacagaacttcttatagaaaagacagatccaaatatggccacagatgaacttccatgcaagctatggctgagtttcattgcttagtaatgaactagtccgtaacttgaaagtatttcgatttcttggctttatatatcttgtggaaaggacgatgggcgtgtagaactggattcgat

SEQ ID NO: 1665 - DNA, 1325 bp, Homo sapiens
  source 1..1325: mol_type = genomic DNA
accgccaccatggcagctaaaatggagataactttaagctccaacactgaagcttcctccaagcaagagagacacataatagccaaactagaagagaaacggggccctcctctgcaaaaaaactgcccagatcctgagctctgccgccagagcttcagacgcttttgttatcaagaggtgtctggaccccaagaggctctctcccagctccgacagctctgccgtcagtggttgcaacccgagctgcacaccaaggagcagattttggagcttctggtgatggagcagttcctgaccatcctgcccccggagatccaggctcgggtcaggcatcgatgtccaatgagcagcaaggagattgtgaccctcgtggaagattttcacagagcatccaagaaaccaaagcagtgggtggccgtttgtatgcaggggcaaaaggtgctcttggagaaaactggatctcagcttggagaacaggaactgccagactttcaaccgcagactcctaggagagatctcagggagagctctccagcagagccttcccaggcaggagcttatgaccggctgagcccccatcattgggagaaatccccactcctccaagaaccaacccccaaattggctgggacagaggcccccagaatgagaagtgacaacaaggaaaatccacaacaggaaggggctaaaggagcaaagccatgtgcagtgtcagctggcagatccaaagggaatggtctgcagaatcctgaaccaagaggggcaaatatgagtgaacctcggttgtcacggaggcaggtcagctccccaaatgctcaaaagccatttgctcactaccagagacattgcagggtggaatacatcagcagccccctaaaaagccacccactgagagagctaaagaaaagcaaaggaggtaaacggagtctgagcaaccgtttgcaacatcttggtcaccagcccacccgctcagcaaagaaaccctacaaatgtgatgactgtgggaaaagcttcacgtggaattcagagctgaagagacacaagagagtccacacaggagagagaccctacacgtgcggagagtgtggaaactgctttgggcggcagtcaaccctgaagctgcaccagaggatccacactggagagaagccataccagtgtggccagtgtgggaaaagctttcgccagagctcaaaccttcaccagcatcaccgacttcaccatggggactagtaatgaactagtccgtaacttgaaagtatttcgatttcttggctttatatatcttgtggaaaggacgaaccatgggacggtctttcacgtga

SEQ ID NO: 1666 - DNA, 1547 bp, Homo sapiens
  source 1..1547: mol_type = genomic DNA
accgccaccatggctgcagggtggctgacaacctggtcacagaactcagtaaccttccaggaagtggcagtggacttttcccaggaggagtgggcattgctggaccctgctcaaaaaaatctatacaaagatgtgatgctggagaactttaggaacctggcctcagtagggtatcagctctgcagacacagtctgatctccaaggtggatcaagaacagctgaagacagatgaaagaggaattttacaaggtgactgtgcagactgggaaactcaacttaaaccaaaagatacaattgctatgcagaacattcctgggggaaaaacatccaatggcataaacacggcagaaaatcaacctggtgagcactccctggagtgtaaccattgtgggaaattcagaaagaacactcgctttatttgtacaagatattgcaagggagagaaatgctataaatatataaagtatagcaaagtcttcaaccatccctcaactcttaggagtcatgtgagcattcacattggagagaaaactcttgaatttactgattgtagaaaagctttcaatcaagagtcatccctcaggaaacacttaagaactcccacaggacagaagtttcaggagtatgagcaatgtgatatgtccttcagcctacactcttcctgctcagtacgtgagcaaatacctactggagagaaaggtgatgaatgcagtgactatggcaaaatatctccccttagtgtccacacaaaaactggtagtgtggaggagggtttggaatgtaatgaacatgagaaaactttcactgaccctttgtcccttcagaactgtgtcagaactcactctggagagatgccctatgaatgcagtgactgtgggaaagccttcatttttcagtcttcccttaagaaacacatgagatctcatactggagagaagccttatgagtgtgatcactgtggaaaatcctttagccagagctctcatctgaatgtgcacaaaagaactcacactggagagaaaccctatgactgtaaggaatgtgggaaggctttcactgttccttcatcccttcagaaacatgtgagaacccacactggagagaaaccctatgaatgcagtgactgtggaaaagccttcatcgatcagtcatcccttaagaaacacacacgctctcacactggagagaagccttatgagtgtaaccagtgtggaaagtccttcagcacaggctcttaccttattgtgcacaagagaactcacactggtgagaaaacctatgagtgtaaagaatgtgggaaggcctttaggaattcctcttgcctgagggtacacgtgagaactcacactggagagaagccttataaatgtattcagtgtgaaaaagcctttagcacaagcactaaccttataatgcacaagcgaatccacaatggccagaaactccatgaatagtaatgaactagtccgtaacttgaaagtatttcgatttcttggctttatatatcttgtggaaaggacgaccaggctgctactgaaccgcgtag

SEQ ID NO: 1667 - DNA, 2648 bp, Homo sapiens
  source 1..2648: mol_type = genomic DNA
accgccaccatgaacagcagcagcgccaacatcacctacgccagtcgcaagcggcggaagccggtgcagaaaacagtaaagccaatcccagctgaaggaatcaagtcaaatccttccaagcggcatagagaccgacttaatacagagttggaccgtttggctagcctgctgcctttcccacaagatgttattaataagttggacaaactttcagttcttaggctcagcgtcagttacctgagagccaagagcttctttgatgttgcattaaaatcctcccctactgaaagaaacggaggccaggataactgtagagcagcaaatttcagagaaggcctgaacttacaagaaggagaattcttattacaggctctgaatggctttgtattagttgtcactacagatgctttggtcttttatgcttcttctactatacaagattatctagggtttcagcagtctgatgtcatacatcagagtgtatatgaacttatccataccgaagaccgagctgaatttcagcgtcagctacactgggcattaaatccttctcagtgtacagagtctggacaaggaattgaagaagccactggtctcccccagacagtagtctgttataacccagaccagattcctccagaaaactctcctttaatggagaggtgcttcatatgtcgtctaaggtgtctgctggataattcatctggttttctggcaatgaatttccaagggaagttaaagtatcttcatggacagaaaaagaaagggaaagatggatcaatacttccacctcagttggctttgtttgcgatagctactccacttcagccaccatccatacttgaaatccggaccaaaaattttatctttagaaccaaacacaaactagacttcacacctattggttgtgatgccaaaggaagaattgttttaggatatactgaagcagagctgtgcacgagaggctcaggttatcagtttattcatgcagctgatatgctttattgtgccgagtcccatatccgaatgattaagactggagaaagtggcatgatagttttccggcttcttacaaaaaacaaccgatggacttgggtccagtctaatgcacgcctgctttataaaaatggaagaccagattatatcattgtaactcagagaccactaacagatgaggaaggaacagagcatttacgaaaacgaaatacgaagttgccttttatgtttaccactggagaagctgtgttgtatgaggcaaccaacccttttcctgccataatggatcccttaccactaaggactaaaaatggcactagtggaaaagactctgctaccacatccactctaagcaaggactctctcaatcctagttccctcctggctgccatgatgcaacaagatgagtctatttatctctatcctgcttcaagtacttcaagtactgcaccttttgaaaacaactttttcaacgaatctatgaatgaatgcagaaattggcaagataatactgcaccgatgggaaatgatactatcctgaaacatgagcaaattgaccagcctcaggatgtgaactcatttgctggaggtcacccagggctctttcaagatagtaaaaacagtgacttgtacagcataatgaaaaacctaggcattgattttgaagacatcagacacatgcagaatgaaaaatttttcagaaatgatttttctggtgaggttgacttcagagacattgacttaacggatgaaatcctgacgtatgtccaagattctttaagtaagtctcccttcataccttcagattatcaacagcaacagtccttggctctgaactcaagctgtatggtacaggaacacctacatctagaacagcaacagcaacatcaccaaaagcaagtagtagtggagccacagcaacagctgtgtcagaagatgaagcacatgcaagttaatggcatgtttgaaaattggaactctaaccaattcgtgcctttcaattgtccacagcaagacccacaacaatataatgtctttacagacttacatgggatcagtcaagagttcccctacaaatctgaaatggattctatgccttatacacagaactttatttcctgtaatcagcctgtattaccacaacattccaaatgtacagagctggactaccctatggggagttttgaaccatccccataccccactacttctagtttagaagattttgtcacttgtttacaacttcctgaaaaccaaaagcatggattaaatccacagtcagccataataactcctcagacatgttatgctggggccgtgtcgatgtatcagtgccagccagaacctcagcacacccacgtgggtcagatgcagtacaatccagtactgccaggccaacaggcatttttaaacaagtttcagaatggagttttaaatgaaacatatccagctgaattaaataacataaataacactcagactaccacacatcttcagccacttcatcatccgtcagaagccagaccttttcctgatttgacatccagtggattcctgtagtaatgaactagtccgtaacttgaaagtatttcgatttcttggctttatatatcttgtggaaaggacgattattccaatggatacatatcggt

SEQ ID NO: 1668 - DNA, 2375 bp, Homo sapiens
  source 1..2375: mol_type = genomic DNA
accgccaccatggcagcccctgacctggcccacggaggtcatgtttctagggactcagtctgccttcatgaagaacagacacaggcagcagggatggtggctggctggctgataaattgttaccaggacgcggtgacctttgacgacgtggctgtggacttcacccaggaggaatggactttactggacccatctcagagagacctctacagagatgtgatgctggaaaactacgagaacctggcctcagtaggacatcacctgttccaacccagtgtgatctattggctggagcaggaagaggagttgagggcagggcggagagcagttctccaagaatggcgacttaaaaccaaagggccagcacttcggcaggatagatcttggttcagagcatcaaatgagacacagacggcaagaagccacaatggagggcagctctgtgaccgcacgcagtgtggagaagctttcagtgaacactcaggcctcagcacacacgtgagaactcaaaatacaggagacagttgtgtgtctaatcattatgaaagggacttttttattccatgccagaaaaccttgttcaaaattggagagcagttttccgtgttgggtcagtgtggaaaagccttcagctctactccaaatgttgtttcccagcaagcatgcactcgggacagatctcttgactacagcagctgtggggaagtgttccttaatcagtcataccttcaggcacgtgcgggaagtcacaacggagaagaaacatggaaatggaagccgtgtgggaaagctctaactcactccatgggctgcgccacacctgttgaaatgcatgccgtcaggaatccccacgtatgtagggaatgtgggaaggcctttaggtacactgcctaccttactggtcgcgtgcaagtccaccctggggaaaagccctgtgaattggaagaatgtggaaaagcctcccctgtttcttccagcctaactcaacatgtaagaattcatgctgcagagaaaccctgtgaatgtaaagaatgcggaaaagccttcactggactctcaggtctttctaaacacgtccaaacagaccctggacagaagccctatgaatgtaaggactgtgggaaagcctgcggtgggttttatctactgaatgagcatggaaaaactcacacgagggagaagccctttgcatgtgtggtttgcggaaaatattttagaaattcctcatgccttaataatcatgttcgaattcacactggaataaaaccctatacatgcagctactgtgggaaggccttcactgtgcgctgtggccttactagacacgtacgaacacacacgggcgagaagccatacacgtgtaaggactgcgggaaagccttctgtacatcctcgggccttactgagcatgtaaggactcacactggagagaaaccatatgaatgtaaagattgtgggaaatccttcactgtttcttcaagcctgactgagcacgcgagaatccataccggagagaaaccctacgaatgtaagcagtgtggcaaagccttcacagggcgctcaggcctcactaaacacatgcggacacacaccggggagaagccctatgaatgtaaggactgtgggaaagcctacaatagggtttatctactgaatgagcatgtgaaaactcacacagaggagaagccctttatatgtacggtatgcaggaaatccttcagaaattcctcgtgcctgaataagcacattcagattcacactggaataaaaccttatgaatgtaaggactgtgggaaaacattcactgtttcttcgagcctaaccgagcacatacgaactcacactggagagaaaccttatgaatgtaaagtatgcggaaaggccttcaccacatcctcacaccttatcgtgcacataagaacccacaccggtgagaaaccctacatatgtaaggagtgtgggaaagcctttgcttcctcctcacaccttatcgaacacagaaggactcacacaggagagaaaccttacatatgtaacgagtgtgggaaagccttccgtgcctcctctcacctgcataaacatggaagaattcacactgggcagaaaccctataaatgtaaggaatgtgggaaagcatacaataggttttatctactaaaagaacatttaaaaacttacactgaagagcaggtttttgtatgtaaggactgtggaaaatcttttaagaattcctcatgccttaaccatcacactcaaattcacactgatgagaaacctttctagtaatgaactagtccgtaacttgaaagtatttcgatttcttggctttatatatcttgtggaaaggacgactggtcgctaaagcgccaagccgt

SEQ ID NO: 1669 - DNA, 2165 bp, Homo sapiens
  source 1..2165: mol_type = genomic DNA
accgccaccatgctggaaaactacgagaacctggcctcagtaggacatcacctgttccaacccagtgtgatctattggctggagcaggaagaggagttgagggcagggcggagagcagttctccaagaatggcgacttaaaaccaaagggccagcacttcggcaggatagatcttggttcagagcatcaaatgagacacagacggcaagaagccacaatggagggcagctctgtgaccgcacgcagtgtggagaagctttcagtgaacactcaggcctcagcacacacgtgagaactcaaaatacaggagacagttgtgtgtctaatcattatgaaagggacttttttattccatgccagaaaaccttgttcaaaattggagagcagttttccgtgttgggtcagtgtggaaaagccttcagctctactccaaatgttgtttcccagcaagcatgcactcgggacagatctcttgactacagcagctgtggggaagtgttccttaatcagtcataccttcaggcacgtgcgggaagtcacaacggagaagaaacatggaaatggaagccgtgtgggaaagctctaactcactccatgggctgcgccacacctgttgaaatgcatgccgtcaggaatccccacgtatgtagggaatgtgggaaggcctttaggtacactgcctaccttactggtcgcgtgcaagtccaccctggggaaaagccctgtgaattggaagaatgtggaaaagcctcccctgtttcttccagcctaactcaacatgtaagaattcatgctgcagagaaaccctgtgaatgtaaagaatgcggaaaagccttcactggactctcaggtctttctaaacacgtccaaacagaccctggacagaagccctatgaatgtaaggactgtgggaaagcctgcggtgggttttatctactgaatgagcatggaaaaactcacacgagggagaagccctttgcatgtgtggtttgcggaaaatattttagaaattcctcatgccttaataatcatgttcgaattcacactggaataaaaccctatacatgcagctactgtgggaaggccttcactgtgcgctgtggccttactagacacgtacgaacacacacgggcgagaagccatacacgtgtaaggactgcgggaaagccttctgtacatcctcgggccttactgagcatgtaaggactcacactggagagaaaccatatgaatgtaaagattgtgggaaatccttcactgtttcttcaagcctgactgagcacgcgagaatccataccggagagaaaccctacgaatgtaagcagtgtggcaaagccttcacagggcgctcaggcctcactaaacacatgcggacacacaccggggagaagccctatgaatgtaaggactgtgggaaagcctacaatagggtttatctactgaatgagcatgtgaaaactcacacagaggagaagccctttatatgtacggtatgcaggaaatccttcagaaattcctcgtgcctgaataagcacattcagattcacactggaataaaaccttatgaatgtaaggactgtgggaaaacattcactgtttcttcgagcctaaccgagcacatacgaactcacactggagagaaaccttatgaatgtaaagtatgcggaaaggccttcaccacatcctcacaccttatcgtgcacataagaacccacaccggtgagaaaccctacatatgtaaggagtgtgggaaagcctttgcttcctcctcacaccttatcgaacacagaaggactcacacaggagagaaaccttacatatgtaacgagtgtgggaaagccttccgtgcctcctctcacctgcataaacatggaagaattcacactgggcagaaaccctataaatgtaaggaatgtgggaaagcatacaataggttttatctactaaaagaacatttaaaaacttacactgaagagcaggtttttgtatgtaaggactgtggaaaatcttttaagaattcctcatgccttaaccatcacactcaaattcacactgatgagaaacctttctagtaatgaactagtccgtaacttgaaagtatttcgatttcttggctttatatatcttgtggaaaggacgatcttggtcctacgcaattgtacct

SEQ ID NO: 1670 - DNA, 2291 bp, Homo sapiens
  source 1..2291: mol_type = genomic DNA
accgccaccatggcagcccctgacctggcccacggaggtcatgtttctagggactcagtctgccttcatgaagaacagacacaggcagcagggatggtggctggctggctgataaattgttaccaggacgcggtgacctttgacgacgtggctgtggacttcacccaggaggaatggactttactggacccatctcagagagacctctacagagatgtgatgctggaaaactacgagaacctggcctcagtagaatggcgacttaaaaccaaagggccagcacttcggcaggatagatcttggttcagagcatcaaatgagacacagacggcaagaagccacaatggagggcagctctgtgaccgcacgcagtgtggagaagctttcagtgaacactcaggcctcagcacacacgtgagaactcaaaatacaggagacagttgtgtgtctaatcattatgaaagggacttttttattccatgccagaaaaccttgttcaaaattggagagcagttttccgtgttgggtcagtgtggaaaagccttcagctctactccaaatgttgtttcccagcaagcatgcactcgggacagatctcttgactacagcagctgtggggaagtgttccttaatcagtcataccttcaggcacgtgcgggaagtcacaacggagaagaaacatggaaatggaagccgtgtgggaaagctctaactcactccatgggctgcgccacacctgttgaaatgcatgccgtcaggaatccccacgtatgtagggaatgtgggaaggcctttaggtacactgcctaccttactggtcgcgtgcaagtccaccctggggaaaagccctgtgaattggaagaatgtggaaaagcctcccctgtttcttccagcctaactcaacatgtaagaattcatgctgcagagaaaccctgtgaatgtaaagaatgcggaaaagccttcactggactctcaggtctttctaaacacgtccaaacagaccctggacagaagccctatgaatgtaaggactgtgggaaagcctgcggtgggttttatctactgaatgagcatggaaaaactcacacgagggagaagccctttgcatgtgtggtttgcggaaaatattttagaaattcctcatgccttaataatcatgttcgaattcacactggaataaaaccctatacatgcagctactgtgggaaggccttcactgtgcgctgtggccttactagacacgtacgaacacacacgggcgagaagccatacacgtgtaaggactgcgggaaagccttctgtacatcctcgggccttactgagcatgtaaggactcacactggagagaaaccatatgaatgtaaagattgtgggaaatccttcactgtttcttcaagcctgactgagcacgcgagaatccataccggagagaaaccctacgaatgtaagcagtgtggcaaagccttcacagggcgctcaggcctcactaaacacatgcggacacacaccggggagaagccctatgaatgtaaggactgtgggaaagcctacaatagggtttatctactgaatgagcatgtgaaaactcacacagaggagaagccctttatatgtacggtatgcaggaaatccttcagaaattcctcgtgcctgaataagcacattcagattcacactggaataaaaccttatgaatgtaaggactgtgggaaaacattcactgtttcttcgagcctaaccgagcacatacgaactcacactggagagaaaccttatgaatgtaaagtatgcggaaaggccttcaccacatcctcacaccttatcgtgcacataagaacccacaccggtgagaaaccctacatatgtaaggagtgtgggaaagcctttgcttcctcctcacaccttatcgaacacagaaggactcacacaggagagaaaccttacatatgtaacgagtgtgggaaagccttccgtgcctcctctcacctgcataaacatggaagaattcacactgggcagaaaccctataaatgtaaggaatgtgggaaagcatacaataggttttatctactaaaagaacatttaaaaacttacactgaagagcaggtttttgtatgtaaggactgtggaaaatcttttaagaattcctcatgccttaaccatcacactcaaattcacactgatgagaaacctttctagtaatgaactagtccgtaacttgaaagtatttcgatttcttggctttatatatcttgtggaaaggacgatcagaaggccatgctgcggtcatc

SEQ ID NO: 1671 - DNA, 2573 bp, Homo sapiens
  source 1..2573: mol_type = genomic DNA
accgccaccatggcggcctcggaggcggcggcggcggcggggtccgcggctctggcggcgggtgcccgggccgtcccggcggccacgacaggagccgccgccgccgcctcgggcccgtgggtgcccccgggaccccgactgaggggcagccggccgcggcccgcgggggcgacgcagcagcccgctgtccccgcgccgccggcgggggagctgatccagccgtcggtgagcgagctgtcccgggccgtgcggaccaacatcctgtgcaccgtgcgcggctgcggcaagatcctgcccaacagccccgcgctcaacatgcacctagtcaagagccaccgcctgcaggatggcatagtcaatccaacaataagaaaagatttgaaaactggaccgaaattctactgctgtccaattgaaggctgccccagaggccctgagagaccgttttctcagttttctctcgtaaaacagcactttatgaaaatgcatgctgagaagaagcacaaatgtagtaagtgcagcaattcgtacggtacagaatgggacctgaaaagacatgcagaggactgtggcaagaccttccggtgcacatgcggctgtccctacgccagtagaacagcactgcagtctcacatctaccgaactgggcacgagatacctgcagaacacagggacccacctagtaagaaaaggaaaatggaaaactgtgcacaaaaccagaagttatccaacaagaccattgaatcattgaacaaccaaccaatccctagaccagacactcaagaactagaagcttcagaaataaagctagaaccatcttttgaagactcttgtggctctaacactgacaagcagactcttacaacaccaccgagatatcctcagaagttgcttttaccaaagcccaaagtggctttggttaaactacccgtgatgcagttttctgtcatgcctgtctttgtgcctacagccgactcctcagcccagcctgtggtgttaggtgttgatcagggctctgccacaggggctgtgcacttaatgcccttgtcagtaggaaccctgatcctcggcctagattcagaggcttgctctcttaaggagagcctacctcttttcaaaattgctaatcctattgctggtgagccaataagtactggtgttcaagtgaactttggtaaaagtccatctaatcctttacaagaactagggaacacgtgtcaaaagaatagcatttcttcaatcaacgtgcagacagatctgtcttatgcctcacaaaactttataccttctgcacagtgggccactgctgattcctctgtgtcgtcttgttctcaaactgatttgtcgtttgattctcaagtgtctcttcccattagtgttcacactcagacatttttgcccagctctaaggtaacttcatctatagctgctcagactgatgcatttatggacacctgtttccagtcaggtggggtctccagagaaactcaaaccagtgggatagaaagtccaacggatgaccatgtacagatggaccaagctggaatgtgcggagacatttttgagagtgttcattcatcatataatgttgctacaggtaacattataagcaacagtttagtagcagagacagtaactcatagtttgttacctcagaatgagcctaagactttaaatcaagatattgagaaatctgcaccaattataaatttcagtgcacagaatagtatgcttccttcacagaacatgacagataatcagacccaaaccatagatttattaagtgatttggaaaacatcttgtcaagtaatctgcctgctcagacattggatcatcgtagtcttttgtctgacacaaatcctggacctgacacccagctcccatctggcccagcccagaaccccggaatcgattttgatatcgaagagttcttttcggcctcaaatatccagactcaaactgaagagagtgaacttagcaccatgaccaccgagccagtcttggagtcactggacatagagactcaaacggacttcttactcgcagatacctctgctcagtcctatgggtgtaggggaaattctaacttcttaggccttgagatgtttgacacacagacacagacagacttaaactttttcttagacagtagccctcatctgcctctgggaagtattctgaaacactccagcttttccgtgagtactgattcatctgacacagagacccaaactgaaggagtctccactgctaaaaatatacctgctctagaaagcaaagttcagttgaacagtacagaaacacagaccatgagttctgggtttgaaaccctggggagcttgttcttcaccagcaacgaaactcagacagcaatggatgactttcttctggctgatctggcctggaacacgatggagtctcagttcagctctgtagaaacccagacttctgcggaaccacacacagtctccaacttctagtaatgaactagtccgtaacttgaaagtatttcgatttcttggctttatatatcttgtggaaaggacgagcatgggcccgttcgctatgtcac

SEQ ID NO: 1672 - DNA, 2597 bp, Homo sapiens
  source 1..2597: mol_type = genomic DNA
accgccaccatggagaaccaacgctcatcacctctgtcgttccccagtgttccacaagaagaaaccttacgtcaggcccctgctggactcccccgagaaactctgttccaatcccgcgttcttcctcccaaagaaattccttctttgtctcccaccattccccgtcaaggctccctgccccaaacttccagtgctcccaagcaagagacttctggccggatgccacatgtgctccagaagggaccctcactcctgtgttctgccgcttctgagcaagagacttctctccagggccccctggcttcccaggaagggacccagtatccacccccagctgctgctgaacaagaagtctcccttctctcccactccccccaccaccaggaagcccccgttcactcccctgaagctcctgagaaagaccccctgaccctttccccaacagttcccgagactgacatggacccgctgctccagagcccggtttcccaaaaggacacccctttccagatctcttctgcagtccagaaggaacagccgctccccacggcagagatcacccgcttggctgtgtgggctgccgtccaagcagtggagaggaagctggaggcccaggccatgaggctactgaccctggaaggcaggacggggacaaatgaaaagaagatagccgactgcgagaagacagccgtggagttcgcgaaccatctggagagcaagtgggtcgtgttggggaccctgctgcaggagtatgggctgctgcagaggcggctggagaacatggagaacctgctgaaaaacagaaatttctggatcctgcggctgccccccggcagcaatggagaagttcccaaggtccctgtcacatttgatgatgttgctgtgcacttctcggagcaggagtggggaaacctgtctgagtggcagaaggagctctacaagaacgtgatgaggggcaactacgagtccctggtttccatggactatgcaatttccaaaccagacctcatgtcacagatggagcgcggggagcggcccaccatgcaggagcaggaagactctgaggagggcgaaacgccgacagatcccagtgctgcgcacgatgggatcgtgattaagatcgaggtacagaccaacgacgagggctcagaaagtttggagacacctgagcccctgatgggacaggtggaagagcacggcttccaggactcagagctgggtgacccctgtggggaacagccagacctggacatgcaggagccagagaacacgctggaggagtccacggaaggctccagcgagttcagcgaactgaagcagatgctggtgcagcagaggaactgcacggaggggatcgtgatcaagacagaggaacaagacgaggaggaagaagaggaggaggaggatgagctgccgcagcacttgcaatcccttgggcagctgtccgggagatatgaggccagtatgtaccagaccccgctgcccggggagatgtcccccgagggcgaggagagccccccgcccctgcagctaggaaaccccgcagtgaaaaggctggcgccctccgtgcacggtgagcggcacctgagcgagaaccgcggggcctcgagccagcagcagcggaaccggcgcggcgagcggcccttcacatgcatggagtgcggcaagagcttccgcctgaagatcaacctcatcatccaccagcgcaaccacatcaaggaggggccctacgagtgcgccgaatgcgagatcagcttccggcacaagcaacagctcacgctgcaccagcgcatccaccgcgtgcgcggaggctgcgtctcacccgaacgcgggcccacgttcaaccccaagcacgcgctcaagccgcgtcccaagtcacccagctctggtagcggcggcggtggccctaagccctacaagtgccccgagtgcgacagcagcttcagccacaagtccagcctgaccaaacaccagatcacgcacacgggtgagcggccctacacgtgccccgagtgcaagaagagcttccgcctgcacatcagcttggtgatccatcagcgcgtgcacgcgggcaagcatgaggtctccttcatctgcagcctgtgcggcaagagcttcagccgcccctcgcacctgctgcgccaccagcggactcacacaggcgagcggcccttcaagtgccccgagtgcgagaagagcttcagcgagaagtccaagctcaccaaccactgccgcgtgcactcgcgcgagcggccgcacgcctgccccgagtgcggcaagagcttcatccgcaagcaccacctcctggaacaccggcgcatccacacaggcgagcggccctaccactgcgccgagtgcggcaagcgcttcacgcagaagcatcacctgctggagcaccagcgcgcgcacacgggcgagcggccctacccctgcacgcactgcgccaagtgcttccgctacaagcagtcgctcaagtaccacctgcggacccacacgggcgagtagtaatgaactagtccgtaacttgaaagtatttcgatttcttggctttatatatcttgtggaaaggacgattcctaagccggtcatatcatgac

SEQ ID NO: 1673 - DNA, 1553 bp, Homo sapiens
  source 1..1553: mol_type = genomic DNA
accgccaccatgtggctggggacttcagggaagagtgggttacctggacactgcttagagaatcctctccaggaatgccacccagcacagttagaagaatgggctctcaaaggaatttccaggcctagtgtaatctcccagccggagcagaaagaagagccatgggtcctaccactccaaaactttgaggcgaggaagatcccgagggaaagccacacagactgtgagcatcaggtggcaaagctcaatcaggacaattctgaaacagcagaacaatgtggaacatcctcagaaaggaccaataaagatctttctcatactcttagttggggaggaaactgggagcaaggcctagaattagaagggcaacatggaacccttccaggagagggccagctggagtccttttcacaggagagggatttaaacaagctcctggatggatatgtaggagagaagcctatgtgtgcagaatgcgggaaaagctttaaccagagttcctatctcataagacacctaagaacccacactggcgagaggccctatacgtgcattgagtgtgggaaaggcttcaaacagagctcagaccttgtcacccatcgcagaacacacacaggagagaagccctaccaatgcaaggggtgtgagaagaaattcagcgacagctcaacactcatcaaacatcagagaacccacacaggggagagaccctatgagtgcccagagtgtggaaagacttttgggcggaagccacacctcataatgcaccaaagaacccacacaggcgagaagccctacgcgtgcctggaatgtcacaaaagcttcagtcgaagctcaaatttcatcactcaccagaggacccacacaggggtgaagccttacaggtgtaatgactgtggggagagttttagccagagctcggatttgattaagcaccaacgaacccacacgggagaacggcccttcaaatgcccggagtgcgggaagggcttcagagatagttctcattttgtagctcacatgagcactcattcaggagagaggcctttcagttgtcctgactgccacaaaagcttcagtcagagctcacatttggtcacgcaccaaagaacacacacaggtgagagaccttttaagtgcgaaaactgtgggaaaggattcgccgacagctccgccctcattaagcaccaacgaatccacaccggagaaagaccctacaaatgtggagagtgtgggaagagcttcaatcagagctcccactttattacccatcagcgaatccacttaggagacaggccctatcgatgtcctgagtgtggcaagaccttcaatcagcgttcccatttcctcacacaccagagaacgcatacaggagaaaaacctttccactgtagtaaatgtaacaagagcttccgtcagaaagcgcatcttttatgccatcaaaacacccatttgatttagtaatgaactagtccgtaacttgaaagtatttcgatttcttggctttatatatcttgtggaaaggacgacaacgtaatgcggatccaccacgc

SEQ ID NO: 1674 - DNA, 1715 bp, Homo sapiens
  source 1..1715: mol_type = genomic DNA
accgccaccatggagagtggcctggctggcaacggcacaggagctgggctggtgatgaaggtcaagcaggagaagccggagcggctgctgcagacgctggcgccgcaggccatgcttgtggagaaggacaaggagaacatatttcagcagcaccggggcctcccgccacgccagaccatggggcggcctcgagccctggggggacaggaggagtctgggagtccaaggtgggcccctcccactgagcaggatgcggggctggcaggccgggctcccgggtcagcctccggccccctgagcccctcgctttcctccggcgagggtcactttgtatgcctggactgcgggaagaggttcagctggtggtcgtccctgaagatccaccagcgcacccacaccggggagaagccgtacctctgcggcaagtgcggcaagagcttcagccagaagccgaacctggcgcgccaccagcggcaccacacgggcgagcgacccttctgctgccccgagtgcgcgcggcgcttcagccagaagcagcacctgctcaagcaccagaagacccactcccggcccgccacccactcgtgccccgagtgcgagcgctgcttccgtcaccaggtgggcctccgcatccaccagcgcgcgcacgcccgggaccgccagggctcccgcgccggcctgcacgagctgattcaggacgcggcggcgcgccgggcctgtcgcctgcagccggggccgccgcgggggcgccccgagtgggcctggctggggctctgccagggctggtggggccagcccggggcccgggccgcggtctccggccccgaggggccgggcgagccgcgccagttcatctgcaacgagtgtggcaagagcttcacctggtggtcgtcgctgaacatccaccagcgcatccacactggcgagcgcccctatgcgtgccccgagtgcggccgccgcttcagccagaagcccaacttgacgcggcacctgcgcaaccacacaggcgagcgcccgcacccctgcccgcactgtggccgcggcttccgccagaagcagcacctgctcaagcacctgcgcacgcacctgcccggcgcccaggctgcgccctgccccagctgcggtaagagctgccgcagccgcgccgcgctgcgcgcccaccagcgcgcccacgctgtcgctgagcccgccgttccggccggggaaccgggcgaccagccgcaggccgaggccatcccgggcttggccgcgaggccgcggagctcccaacggtccccgggggcccgggacacgctgtggggccggggacaagcgggcctcgctgggcctggcgagccgcgccagttcatctgcaacgagtgcggcaagagcttctcgtggtggtcggcgctcaccatccaccagcgcatccacacgggtgagcggccctacccgtgccccgagtgcggccgccgcttcagccagaagcccaacctgacgcggcaccggcgcaaccacacaggcgagcggccctacctgtgtcccgcctgcggccgcggcttcagccagaagcagcacctgctcaagcaccagcgcgtgcaccgcgcggcccctgcgtgcagccccaaggaggaggcgcgctagtaatgaactagtccgtaacttgaaagtatttcgatttcttggctttatatatcttgtggaaaggacgagaagggataaaggaaccatggcgt

SEQ ID NO: 1675 - DNA, 1448 bp, Homo sapiens
  source 1..1448: mol_type = genomic DNA
accgccaccatggcggcggctgagccgatgggcccggcacaggttcccatgaactcagaagtaattgtggaccctatacaggggcaggtgaactttgaggacgtgttcgtgtacttctcccaggaggagtgggtgctccttgatgaggctcagaggctcctgtaccgtgatgtgatgctggagaactttgcacttatggcctctctgggttgttggcatggaatggaggatgaagagataccttttgagcagagcttttctataggaatgtcacagatcaggattcccaagggaggtccttctactcagaaggcttacccctgtgggacatgtggcctggtcttaaaagacattttgcacttggctgagcaccaggaaacacacccagggcagaaaccatacatgtgtgtgctgtgtgggaaacagttctgcttcagtgcaaaccttcaccagcaccagaagcagcacagtggagagaaaccctttagaagtgataagagcaggccctttcttctgaacaactgtgctgtgcaatcaatggagatgtcttttgtgacaggggaggcttgtaaggacttcctagccagctcaagcattttcgagcaccatgcccctcacaatgagtggaagccacacagcaacaccaagtgtgaggaggcctctcactgtggaaaaaggcattacaaatgcagtgaatgtgggaaaaccttcagccgcaaagactcacttgttcaacaccagagagtccacactggagaaaggccttatgagtgcggtgaatgtgggaaaacctttagccgcaaacccatacttgctcagcaccagagaatccacactggagaaatgccttatgagtgtggcatatgtgggaaagtttttaatcatagctctaaccttattgtacatcaaagagtacacactggagcaaggccttacaagtgcagtgaatgtgggaaagcctatagtcacaaatctacacttgttcagcatgagagtatccatactggagaaaggccatatgagtgcagcgaatgtggaaaatactttggtcacaaatacagactcattaaacattggagtgttcatactggagcaaggccttatgagtgcatcgcatgtgggaagttctttagccaaagctctgaccttattgcacatcaaagagttcataatggtgaaaagccttatgtgtgcagtgaatgtggaaaagcctttagccacaaacatgtacttgttcagcatcatagaattcacactggagaaaggccatataagtgcagtgaatgtgggaaggccttcaggcagagggcttccctcatccgccactggaaaattcacactggagaaaggccttagtaatgaactagtccgtaacttgaaagtatttcgatttcttggctttatatatcttgtggaaaggacgatgcggcagatttcatcttaccagg

SEQ ID NO: 1676 - DNA, 1571 bp, Homo sapiens
  source 1..1571: mol_type = genomic DNA
accgccaccatggcggcggctgagccgatgggcccggcacaggttcccatgaactcagaagtaattgtggaccctatacaggggcaggtgaactttgaggacgtgttcgtgtacttctcccaggaggagtgggtgctccttgatgaggctcagaggctcctgtaccgtgatgtgatgctggagaactttgcacttatggcctctctgggacatacatctttcatgtcccacatagttgcctcactggtgatgggtagtgagccctgggtacctgactgggtggacatgaccctagctgttgccacagagactccaggtgggagtgaccctggttgttggcatggaatggaggatgaagagataccttttgagcagagcttttctataggaatgtcacagatcaggattcccaagggaggtccttctactcagaaggcttacccctgtgggacatgtggcctggtcttaaaagacattttgcacttggctgagcaccaggaaacacacccagggcagaaaccatacatgtgtgtgctgtgtgggaaacagttctgcttcagtgcaaaccttcaccagcaccagaagcagcacagtggagagaaaccctttagaagtgataagagcaggccctttcttctgaacaactgtgctgtgcaatcaatggagatgtcttttgtgacaggggaggcttgtaaggacttcctagccagctcaagcattttcgagcaccatgcccctcacaatgagtggaagccacacagcaacaccaagtgtgaggaggcctctcactgtggaaaaaggcattacaaatgcagtgaatgtgggaaaaccttcagccgcaaagactcacttgttcaacaccagagagtccacactggagaaaggccttatgagtgcggtgaatgtgggaaaacctttagccgcaaacccatacttgctcagcaccagagaatccacactggagaaatgccttatgagtgtggcatatgtgggaaagtttttaatcatagctctaaccttattgtacatcaaagagtacacactggagcaaggccttacaagtgcagtgaatgtgggaaagcctatagtcacaaatctacacttgttcagcatgagagtatccatactggagaaaggccatatgagtgcagcgaatgtggaaaatactttggtcacaaatacagactcattaaacattggagtgttcatactggagcaaggccttatgagtgcatcgcatgtgggaagttctttagccaaagctctgaccttattgcacatcaaagagttcataatggtgaaaagccttatgtgtgcagtgaatgtggaaaagcctttagccacaaacatgtacttgttcagcatcatagaattcacactggagaaaggccatataagtgcagtgaatgtgggaaggccttcaggcagagggcttccctcatccgccactggaaaattcacactggagaaaggccttagtaatgaactagtccgtaacttgaaagtatttcgatttcttggctttatatatcttgtggaaaggacgaccaacggcccgaatatacttcttt

SEQ ID NO: 1677 - DNA, 1235 bp, Homo sapiens
  source 1..1235: mol_type = genomic DNA
accgccaccatggaggatgaagagataccttttgagcagagcttttctataggaatgtcacagatcaggattcccaagggaggtccttctactcagaaggcttacccctgtgggacatgtggcctggtcttaaaagacattttgcacttggctgagcaccaggaaacacacccagggcagaaaccatacatgtgtgtgctgtgtgggaaacagttctgcttcagtgcaaaccttcaccagcaccagaagcagcacagtggagagaaaccctttagaagtgataagagcaggccctttcttctgaacaactgtgctgtgcaatcaatggagatgtcttttgtgacaggggaggcttgtaaggacttcctagccagctcaagcattttcgagcaccatgcccctcacaatgagtggaagccacacagcaacaccaagtgtgaggaggcctctcactgtggaaaaaggcattacaaatgcagtgaatgtgggaaaaccttcagccgcaaagactcacttgttcaacaccagagagtccacactggagaaaggccttatgagtgcggtgaatgtgggaaaacctttagccgcaaacccatacttgctcagcaccagagaatccacactggagaaatgccttatgagtgtggcatatgtgggaaagtttttaatcatagctctaaccttattgtacatcaaagagtacacactggagcaaggccttacaagtgcagtgaatgtgggaaagcctatagtcacaaatctacacttgttcagcatgagagtatccatactggagaaaggccatatgagtgcagcgaatgtggaaaatactttggtcacaaatacagactcattaaacattggagtgttcatactggagcaaggccttatgagtgcatcgcatgtgggaagttctttagccaaagctctgaccttattgcacatcaaagagttcataatggtgaaaagccttatgtgtgcagtgaatgtggaaaagcctttagccacaaacatgtacttgttcagcatcatagaattcacactggagaaaggccatataagtgcagtgaatgtgggaaggccttcaggcagagggcttccctcatccgccactggaaaattcacactggagaaaggccttagtaatgaactagtccgtaacttgaaagtatttcgatttcttggctttatatatcttgtggaaaggacgacctttctagcagttctagtactca

SEQ ID NO: 1678 - DNA, 1430 bp, Homo sapiens
  source 1..1430: mol_type = genomic DNA
accgccaccatggcggcggccacgctgagggaccccgctcagcagggctatgtgacctttgaggacgtggctgtctacttctcccaggaggaatggagattgcttgatgacgctcagaggctcctctaccgcaatgtgatgctggagaactttacacttctggcctctctgggacttgcatcttccaagacccatgaaataacccagctggagtcatgggaggagcccttcatgcctgcttgggaagttgtgacttcagccatactgagaggtagttggcaaggagccaaggctgaggcagctgctgagcagagtgcttctgtagaagtgcccagttcaaacgttcagcaacaccagaagcagcactgtggagagaaacccttaaaaagacaagagggcagggtcccagttttgaggagttgcagagtccacctatcagagaagtccttgcaaagcagggaagttgggaaggatcttctgaccagctcaggtgttctcaagcaccaggtgactcacacgggagagaagtcacataggagctccaaaagtagggaggcctttcatgctggaaaaaggcattacaaatgcagtgaatgtgggaaagcctttggtcagaaatatttacttgttcagcaccagagactgcacactggggaaaagccttatgaatgcagtgaatgtgggaagttatttagccataagtccaacctttttatacaccaaatagttcacactggagaaaggccttatgggtgtagtgactgtggaaaatcctttagccgtaatgctgacctcattcaacaccagagagttcacactggagaaaagccttttacatgcagtgaatgtggaaaagctttcaggcataattccacacttgttcagcatcacagaatccacactggagtaaggccttatgagtgcagtgaatgtggaaaattgtttagtttcaactccagcctcatgaaacatcagagagttcacactggagaaagaccttataagtgcagtgaatgtggaaaattctatagccacaagtccagccttatcaatcattggcgtgttcacactggagaaaggccttatgagtgcagtgaatgtgggaaattttttagccaaagctcaagcctcatgcaacatcgaaaagttcacactggagaaaaaccttttaagtgcaatgaatgtgggagattctttagtgagaattccagccttgttaaacatcagagggttcacactggagcaaagccttatgagtgcagggaatgtgggaaattttttcgccacagctccagtcttgttaaacatcgaaggattcacactggagaaatacaatagtaatgaactagtccgtaacttgaaagtatttcgatttcttggctttatatatcttgtggaaaggacgactgcagtcattgtgaccacatagg

SEQ ID NO: 1679 - DNA, 1427 bp, Homo sapiens
  source 1..1427: mol_type = genomic DNA
accgccaccatggcggcggccacgctgagggaccccgctcagggctatgtgacctttgaggacgtggctgtctacttctcccaggaggaatggagattgcttgatgacgctcagaggctcctctaccgcaatgtgatgctggagaactttacacttctggcctctctgggacttgcatcttccaagacccatgaaataacccagctggagtcatgggaggagcccttcatgcctgcttgggaagttgtgacttcagccatactgagaggtagttggcaaggagccaaggctgaggcagctgctgagcagagtgcttctgtagaagtgcccagttcaaacgttcagcaacaccagaagcagcactgtggagagaaacccttaaaaagacaagagggcagggtcccagttttgaggagttgcagagtccacctatcagagaagtccttgcaaagcagggaagttgggaaggatcttctgaccagctcaggtgttctcaagcaccaggtgactcacacgggagagaagtcacataggagctccaaaagtagggaggcctttcatgctggaaaaaggcattacaaatgcagtgaatgtgggaaagcctttggtcagaaatatttacttgttcagcaccagagactgcacactggggaaaagccttatgaatgcagtgaatgtgggaagttatttagccataagtccaacctttttatacaccaaatagttcacactggagaaaggccttatgggtgtagtgactgtggaaaatcctttagccgtaatgctgacctcattcaacaccagagagttcacactggagaaaagccttttacatgcagtgaatgtggaaaagctttcaggcataattccacacttgttcagcatcacagaatccacactggagtaaggccttatgagtgcagtgaatgtggaaaattgtttagtttcaactccagcctcatgaaacatcagagagttcacactggagaaagaccttataagtgcagtgaatgtggaaaattctatagccacaagtccagccttatcaatcattggcgtgttcacactggagaaaggccttatgagtgcagtgaatgtgggaaattttttagccaaagctcaagcctcatgcaacatcgaaaagttcacactggagaaaaaccttttaagtgcaatgaatgtgggagattctttagtgagaattccagccttgttaaacatcagagggttcacactggagcaaagccttatgagtgcagggaatgtgggaaattttttcgccacagctccagtcttgttaaacatcgaaggattcacactggagaaatacaatagtaatgaactagtccgtaacttgaaagtatttcgatttcttggctttatatatcttgtggaaaggacgaagaagaactttagcctacctatca

SEQ ID NO: 1680 - DNA, 407 bp, Homo sapiens
  source 1..407: mol_type = genomic DNA
accgccaccatggcggcggccacgctgagggaccccgctcagggctatgtgacctttgaggacgtggctgtctacttctcccaggaggaatggagattgcttgatgacgctcagaggctcctctaccgcaatgtgatgctggagaactttacacttctggcctctctgggacttgcatcttccaagacccatgaaataacccagctggagtcatgggaggagcccttcatgcctgcttgggaagttgtgacttcagccatactgagagtcccgaaccgacagccacaagtggcgcccgaacagggacgtgagtagtaatgaactagtccgtaacttgaaagtatttcgatttcttggctttatatatcttgtggaaaggacgagatttgccggttcggcgacgtgac

SEQ ID NO: 1681 - DNA, 1301 bp, Homo sapiens
  source 1..1301: mol_type = genomic DNA
accgccaccatggcctttgtgaccagtggagaattggttcggcatcgtcgttacaaacacacccacgagaagccattcaagtgttccatgtgcgattacgccagtgtagaagtcagcaaattaaaacgtcacattcgctctcatactggagagcgtccgtttcagtgcagtttgtgcagttatgccagcagggacacatacaagctgaaaaggcacatgagaacccattcaggggaaaagccttatgaatgttatatttgtcatgctcggtttacccaaagtggtaccatgaagatgcacattttacagaagcacacagaaaatgtggccaaatttcactgtccccactgtgacacagtcatagcccgaaaaagtgatttgggtgtccacttgcgaaagcagcattcctatattgagcaaggcaagaaatgccgttactgtgatgctgtgtttcatgagcgctatgccctcatccagcatcagaagtcacacaagaatgagaagcgctttaagtgtgaccagtgtgattacgcttgtagacaggagaggcacatgatcatgcacaagcgcacccacaccggggagaagccttacgcctgcagccactgcgataagaccttccgccagaagcagcttctcgacatgcacttcaagcgctatcacgaccccaacttcgtccctgcggcttttgtctgttctaagtgtgggaaaacatttacacgtcggaataccatggcaagacatgctgataattgtgctggcccagatggcgtagagggggaaaatggaggagaaacgaagaagagtaaacgtggaagaaaaagaaagatgcgctctaagaaagaagattcctctgacagtgaaaatgctgaaccagatctggacgacaatgaggatgaggaggagcctgccgtagaaattgaacctgagccagagcctcagcctgtgaccccagccccaccacccgccaagaagcggagaggacgaccccctggcagaaccaaccagcccaaacagaaccagccaacagctatcattcaggttgaagaccagaatacaggtgcaattgagaacattatagttgaagtaaaaaaagagccagatgctgagcccgcagagggagaggaagaggaggcccagccagctgccacagatgcccccaacggagacctcacgcccgagatgatcctcagcatgatggaccggtagtaatgaactagtccgtaacttgaaagtatttcgatttcttggctttatatatcttgtggaaaggacgattcaaagaagcggtgaggcgctgg

SEQ ID NO: 1682 - DNA, 1055 bp, Homo sapiens
  source 1..1055: mol_type = genomic DNA
accgccaccatgcctggcgaacagcaggcagaggaagaggaggaggaagagatgcaggaggagatggtgctgctggtgaagggtgaggaggatgagggtgaggagaagtatgaggtggtgaaactcaagatccccatggacaacaaggaggtcccgggcgaggcgcccgcgccgtccgccgacccggcgcgtccccacgcgtgccccgactgcggccgcgccttcgcgcgccgctccacgctggcgaagcacgcgcgcacgcacacgggcgaacggcccttcgggtgcaccgagtgcgggcggcgcttctcacagaagtcggcgctgaccaaacacggccgcacgcacacgggcgagcggccctacgagtgccccgagtgcgacaaacgcttctcggccgcctcgaacctgcggcagcaccggcggcggcacacgggcgagaagccgtacgcatgcgcgcactgcggccgccgcttcgcgcagagctccaactacgcacagcacctgcgcgtgcacacgggcgagaagccgtacgcgtgcccggactgcggacgcgcctttggcggcagctcgtgcctggcgcgccaccgacgcacgcacacgggcgagcggccctacgcttgcgccgactgcggcacgcgcttcgctcagagctcggcgctggccaagcaccggcgcgtgcacacgggcgagaagccgcaccgctgcgctgtgtgtggccgtcgcttcggccaccgctccaacctggcggagcacgcgcgcacgcacacaggcgagcggccctacccctgcgccgagtgcggccgccgcttccgcctaagctcgcacttcattcgccaccgacgcgcgcacatgcggcgccgcctgtatatttgcgccggctgcggcagggacttcaagctgccccctggcgccacggccgccactgccaccgagcgttgcccggagtgtgagggcagctagtaatgaactagtccgtaacttgaaagtatttcgatttcttggctttatatatcttgtggaaaggacgatacgcagtggtctcacaccatgga

SEQ ID NO: 1683 - DNA, 905 bp, Homo sapiens
  source 1..905: mol_type = genomic DNA
accgccaccatgacaagagaaaatgtagcccacaatgctctgagacaagagggccttgtgaaggggaaggatgatacctggaaatggggaaccagcttccaaggaagtagctcctctgtttgggagacctcccacctacactttagacaattacgttaccatgagacatctggaccccaggaagccctgagccggctcagggaactctgtcgccggtggctgagaccagaagcacgcaccaaggcacagatcctggagctgctggtgctggagcagtttctgagcatcctgcctggggagattcggacctgggtacagctccatcaccctggaagtggcgaggaggctgtggccctggtagaggagctgcagaaagaccttgatggaccagcaatacaagttccagtccttgtcaaggatcaggacactctccagaaggtggtgagtgccccaggaacaacacttcctcctgtacttcctggcagccacatagcagctgaaatttgcccgcatcctcctactgacctagtggcattcaacctccaggatcctcagcatgattctcctgcccctgaagcttctgccctttcccaggaagagaacccaagaaatcaattaatggcacttatgctcctaacagcccagccccaggagttggtgatgttcgaggaggtgtcagtatgcttcacttcagaggaatgggcatgtctgggcccaatccagagggccttgtactgggatgtgatgctggagaattatggaaatgtgacctccctaggttacaggaaatacaggaggcagaggaacaaatagtaatgaactagtccgtaacttgaaagtatttcgatttcttggctttatatatcttgtggaaaggacgacctcttcgtttctaacttcaacac

SEQ ID NO: 1684 - DNA, 3191 bp, Homo sapiens
  source 1..3191: mol_type = genomic DNA
accgccaccatgacaagagaaaatgtagcccacaatgctctgagacaagagggccttgtgaaggggaaggatgatacctggaaatggggaaccagcttccaaggaagtagctcctctgtttgggagacctcccacctacactttagacaattacgttaccatgagacatctggaccccaggaagccctgagccggctcagggaactctgtcgccggtggctgagaccagaagcacgcaccaaggcacagatcctggagctgctggtgctggagcagtttctgagcatcctgcctggggagattcggacctgggtacagctccatcaccctggaagtggcgaggaggctgtggccctggtagaggagctgcagaaagaccttgatggaccagcaatacaagttccagtccttgtcaaggatcaggacactctccagaaggtggtgagtgccccaggaacaacacttcctcctgtacttcctggcagccacatagcagctgaaatttgcccgcatcctcctactgacctagtggcattcaacctccaggatcctcagcatgattctcctgcccctgaagcttctgccctttcccaggaagagaacccaagaaatcaattaatggcacttatgctcctaacagcccagccccaggagttggtgatgttcgaggaggtgtcagtatgcttcacttcagaggaatgggcatgtctgggcccaatccagagggccttgtactgggatgtgatgctggagaattatggaaatgtgacctccctagaatgggagaccatgaccgagaatgaggaggtgacatcaaagccaagtagttctcaaagagcagactctcataaaggaacatcaaaaagacttcaaggaagtgttccccaggtccttgattttgaagaagagtgtgaatggcaagttttggcaagtcagtggggaaatgaaacagatgaaagggcagatacagtgaagaaagtttccctttgtgaacgagacaagaagaaaaggactccaccagagaaacaaggccaaaagtggaaggaattaggagacagcttgactttcggttcagctatttctgaaagtttaataggtactgaaggaaagaagttttataaatgtgatatgtgttgtaaacattttaataaaatctcccatcttataaaccatcggagaatccacactggtgagaaacctcataaatgtaaggaatgtggaaaaggctttattcagcgttcgagccttctaatgcatttacggaaccattcaggggagaaaccttataaatgtaatgaatgtgggaaagcattttctcaaagtgcttaccttctaaaccatcagaggatccacactggggagaaaccttataagtgtaaggagtgtggaaagggcttctataggcactcaggcctaattatacatctaaggcgccattcaggggagagaccttataagtgtaatgaatgtgggaaagtcttctctcagaatgcttacctcattgaccatcagaggctccacaaaggggaagaaccttataaatgtaataagtgtcagaaagctttcattctgaagaagagcctcattctgcaccagagaatccactctggggaaaaaccctataaatgtgatgaatgtggaaagacctttgctcagaccacttatcttattgaccatcagcgactccacagtgcagagaacccttacaagtgtaaagaatgtggaaaagttttcattcgaagcaaaagcctcctcttacatcagagagtccacacagaaaagaaaacctttggttgtaaaaagtgtgggaagattttcagttctaagtcaaacttcattgaccataagaggatgcacagcagagagaaaccttacaaatgcactgaatgtgggaaagcctttactcaaagtgcttacctttttgaccaccagagactccacaatggggagaagccctatgaatgtaatgaatgtgggaaagtttttattctgaagaagagcctcattttacatcaaaggttccacactggagagaatctctatgaatgtaaagattgtggtaaggtcttcggttcaaacagaaacctcattgaccatgagagactccacaatggggagaagccatatgaatgtcgagagtgtgggaaaacctttattatgagcaaaagttttatggtccatcagaaactccatacacaagagaaagcctacaaatgtgaggattgtgggaaggctttcagttacaattcaagcctgcttgtacatcggagaatccacaccggagaaaaaccctttgaatgcagtgagtgtggaagagctttcagttcaaacagaaacctcattgagcataagagaatccacagtggtgagaaaccctatgagtgtgatgagtgtggcaaatgcttcattctgaagaaaagcctcattggacatcagagaattcacacgagggaaaaatcttataaatgcaatgactgtgggaaggtcttcagttaccgctcaaaccttatagcccatcagaggatccatactggtgagaagccctatgcgtgtagtgagtgtggaaaaggttttacgtacaacagaaacctgattgaacatcaaagaattcacagtggagaaaaaacctacgaatgtcatgtatgtaggaaagtccttacctctagtagaaatcttatggtacatcaaagaatccatactggagagaaaccttataaatgtaatgagtgtggaaaagactttagtcagaataaaaaccttgttgtacatcagagaatgcacactggggaaaaaccttatgagtgtgacaagtgtaggaaatcctttacttctaagaggaatttagttggccaccagagaattcacacaggggagaaaccctatgggtgtaatgattgtagtaaagtttttaggcaaagaaaaaaccttactgtacatcagaaaatccacacagatgaaaaaccttgtgaatgtgatgtgtctgaaaaagaattctctcagacttccaaccttcatcttcaacagaaaatccataccattgaggaattctcttggctacaaaacaccaatgagtccaagattgagattcagaaaatctagtaatgaactagtccgtaacttgaaagtatttcgatttcttggctttatatatcttgtggaaaggacgaagcttcctgaacttgtcacgtcgg

SEQ ID NO: 1685 - DNA, 1922 bp, Homo sapiens
  source 1..1922: mol_type = genomic DNA
accgccaccatgactctgttgacgttcagggatgtggccatagaattctccctggaggagtggaaatgcctggacctcgctcagcagaatttgtacagggatgtgatgttggagaactacagaaacttgttctccgttggtctcactgtctgtaagccaggcctgatcacctgcctggagcaacgaaaagagccctggaatgtgaagagacaggaggcagcagacggacatccagagatgggatttcaccatgctactcaggcttgtcttgaactcctgggctcaagcgatctgcctgcctcagcctcccaaagtgctgggattacaggtgtgaaccaccgtgcccagccaggcctcaatgtttctgtggacaaattcactgctatgtcttctcattttacccaagaccttctgccagagcagggcatacaagatgcattcccaaaaagaatactgagaggatatggaaattgtggccttgataatttatatttaaggaaagactgggaaagtttagatgagtgtaagttgcaaaaagattataatggacttaaccaatgttcatcaactacccatagcaaaatctttcaatataataaatatgttaaaatctttgataacttttcaaatttacatagacgtaatataagtaatactggagagaaacctttcaaatgtcaagaatgtggcaaatcctttcaaatgctctcattcctaactgaacatcagaaaattcacactggaaaaaaattccaaaaatgtggagaatgtggcaaaacctttatccagtgctcacactttactgaacctgagaacattgacactggagagaaaccttacaagtgtcaagaatgtaacaacgtcattaaaacttgctcagtccttactaaaaatagaatttatgccggaggggaacattacagatgtgaagaatttggcaaagtatttaaccagtgctcccaccttactgaacatgagcatggtactgaggaaaaaccctgcaaatatgaagagtgcagcagtgtctttatctcttgctcaagcctttctaatcaacagatgattcttgctggagagaagctctccaaatgtgaaacatggtacaaaggttttaaccacagcccaaatccttccaaacaccagagaaatgagattggagggaaacctttcaaatgtgaggaatgtgacagcatcttcaagtggttctcagaccttactaaacataagagaattcacactggtgagaaaccatacaaatgtgacgaatgtgggaaagcctatacacagtcctcacacctcagtgaacacaggaggattcacaccggagagaaaccctaccaatgtgaagaatgtgggaaggtcttcagaacttgctcaagcctttctaaccataagagaactcattctgaagaaaaaccctacacgtgtgaagaatgtggcaacatctttaagcagttatcagacctcactaagcataagaaaacccatactggagagaagccctacaaatgtgacgaatgtggaaaaaactttacccagtcctccaaccttattgtacataagagaattcatactggagagaaaccctacaagtgtgaagaatgtggcagagtcttcatgtggttctcagacattaccaaacataagaaaacccatactggagagaaaccctacaaatgtgacgaatgtggaaaaaactttacccagtcctcaaaccttattgtacataagagaattcatactggagagaaaccctacaagtgtgaaaagtgtggcaaagccttcacccagttctcacacctgactgtacatgaaagcattcatacttagtaatgaactagtccgtaacttgaaagtatttcgatttcttggctttatatatcttgtggaaaggacgattagaccatggtcttgaagtcata

SEQ ID NO: 1686 - DNA, 1775 bp, Homo sapiens
  source 1..1775: mol_type = genomic DNA
accgccaccatgactctgttgacgttcagggatgtggccatagaattctccctggaggagtggaaatgcctggacctcgctcagcagaatttgtacagggatgtgatgttggagaactacagaaacttgttctccgttggtctcactgtctgtaagccaggcctgatcacctgcctggagcaacgaaaagagccctggaatgtgaagagacaggaggcagcagacggacatccagctatgtcttctcattttacccaagaccttctgccagagcagggcatacaagatgcattcccaaaaagaatactgagaggatatggaaattgtggccttgataatttatatttaaggaaagactgggaaagtttagatgagtgtaagttgcaaaaagattataatggacttaaccaatgttcatcaactacccatagcaaaatctttcaatataataaatatgttaaaatctttgataacttttcaaatttacatagacgtaatataagtaatactggagagaaacctttcaaatgtcaagaatgtggcaaatcctttcaaatgctctcattcctaactgaacatcagaaaattcacactggaaaaaaattccaaaaatgtggagaatgtggcaaaacctttatccagtgctcacactttactgaacctgagaacattgacactggagagaaaccttacaagtgtcaagaatgtaacaacgtcattaaaacttgctcagtccttactaaaaatagaatttatgccggaggggaacattacagatgtgaagaatttggcaaagtatttaaccagtgctcccaccttactgaacatgagcatggtactgaggaaaaaccctgcaaatatgaagagtgcagcagtgtctttatctcttgctcaagcctttctaatcaacagatgattcttgctggagagaagctctccaaatgtgaaacatggtacaaaggttttaaccacagcccaaatccttccaaacaccagagaaatgagattggagggaaacctttcaaatgtgaggaatgtgacagcatcttcaagtggttctcagaccttactaaacataagagaattcacactggtgagaaaccatacaaatgtgacgaatgtgggaaagcctatacacagtcctcacacctcagtgaacacaggaggattcacaccggagagaaaccctaccaatgtgaagaatgtgggaaggtcttcagaacttgctcaagcctttctaaccataagagaactcattctgaagaaaaaccctacacgtgtgaagaatgtggcaacatctttaagcagttatcagacctcactaagcataagaaaacccatactggagagaagccctacaaatgtgacgaatgtggaaaaaactttacccagtcctccaaccttattgtacataagagaattcatactggagagaaaccctacaagtgtgaagaatgtggcagagtcttcatgtggttctcagacattaccaaacataagaaaacccatactggagagaaaccctacaaatgtgacgaatgtggaaaaaactttacccagtcctcaaaccttattgtacataagagaattcatactggagagaaaccctacaagtgtgaaaagtgtggcaaagccttcacccagttctcacacctgactgtacatgaaagcattcatacttagtaatgaactagtccgtaacttgaaagtatttcgatttcttggctttatatatcttgtggaaaggacgacggaagttccagagttgactgaca

SEQ ID NO: 1687 - DNA, 1787 bp, Homo sapiens
  source 1..1787: mol_type = genomic DNA
accgccaccatggctggtgctcagactctgttgacgttcagggatgtggccatagaattctccctggaggagtggaaatgcctggacctcgctcagcagaatttgtacagggatgtgatgttggagaactacagaaacttgttctccgttggtctcactgtctgtaagccaggcctgatcacctgcctggagcaacgaaaagagccctggaatgtgaagagacaggaggcagcagacggacatccagctatgtcttctcattttacccaagaccttctgccagagcagggcatacaagatgcattcccaaaaagaatactgagaggatatggaaattgtggccttgataatttatatttaaggaaagactgggaaagtttagatgagtgtaagttgcaaaaagattataatggacttaaccaatgttcatcaactacccatagcaaaatctttcaatataataaatatgttaaaatctttgataacttttcaaatttacatagacgtaatataagtaatactggagagaaacctttcaaatgtcaagaatgtggcaaatcctttcaaatgctctcattcctaactgaacatcagaaaattcacactggaaaaaaattccaaaaatgtggagaatgtggcaaaacctttatccagtgctcacactttactgaacctgagaacattgacactggagagaaaccttacaagtgtcaagaatgtaacaacgtcattaaaacttgctcagtccttactaaaaatagaatttatgccggaggggaacattacagatgtgaagaatttggcaaagtatttaaccagtgctcccaccttactgaacatgagcatggtactgaggaaaaaccctgcaaatatgaagagtgcagcagtgtctttatctcttgctcaagcctttctaatcaacagatgattcttgctggagagaagctctccaaatgtgaaacatggtacaaaggttttaaccacagcccaaatccttccaaacaccagagaaatgagattggagggaaacctttcaaatgtgaggaatgtgacagcatcttcaagtggttctcagaccttactaaacataagagaattcacactggtgagaaaccatacaaatgtgacgaatgtgggaaagcctatacacagtcctcacacctcagtgaacacaggaggattcacaccggagagaaaccctaccaatgtgaagaatgtgggaaggtcttcagaacttgctcaagcctttctaaccataagagaactcattctgaagaaaaaccctacacgtgtgaagaatgtggcaacatctttaagcagttatcagacctcactaagcataagaaaacccatactggagagaagccctacaaatgtgacgaatgtggaaaaaactttacccagtcctccaaccttattgtacataagagaattcatactggagagaaaccctacaagtgtgaagaatgtggcagagtcttcatgtggttctcagacattaccaaacataagaaaacccatactggagagaaaccctacaaatgtgacgaatgtggaaaaaactttacccagtcctcaaaccttattgtacataagagaattcatactggagagaaaccctacaagtgtgaaaagtgtggcaaagccttcacccagttctcacacctgactgtacatgaaagcattcatacttagtaatgaactagtccgtaacttgaaagtatttcgatttcttggctttatatatcttgtggaaaggacgaagctcccgctcgactcagactgta

SEQ ID NO: 1688 - DNA, 1934 bp, Homo sapiens
  source 1..1934: mol_type = genomic DNA
accgccaccatggctggtgctcagactctgttgacgttcagggatgtggccatagaattctccctggaggagtggaaatgcctggacctcgctcagcagaatttgtacagggatgtgatgttggagaactacagaaacttgttctccgttggtctcactgtctgtaagccaggcctgatcacctgcctggagcaacgaaaagagccctggaatgtgaagagacaggaggcagcagacggacatccagagatgggatttcaccatgctactcaggcttgtcttgaactcctgggctcaagcgatctgcctgcctcagcctcccaaagtgctgggattacaggtgtgaaccaccgtgcccagccaggcctcaatgtttctgtggacaaattcactgctatgtcttctcattttacccaagaccttctgccagagcagggcatacaagatgcattcccaaaaagaatactgagaggatatggaaattgtggccttgataatttatatttaaggaaagactgggaaagtttagatgagtgtaagttgcaaaaagattataatggacttaaccaatgttcatcaactacccatagcaaaatctttcaatataataaatatgttaaaatctttgataacttttcaaatttacatagacgtaatataagtaatactggagagaaacctttcaaatgtcaagaatgtggcaaatcctttcaaatgctctcattcctaactgaacatcagaaaattcacactggaaaaaaattccaaaaatgtggagaatgtggcaaaacctttatccagtgctcacactttactgaacctgagaacattgacactggagagaaaccttacaagtgtcaagaatgtaacaacgtcattaaaacttgctcagtccttactaaaaatagaatttatgccggaggggaacattacagatgtgaagaatttggcaaagtatttaaccagtgctcccaccttactgaacatgagcatggtactgaggaaaaaccctgcaaatatgaagagtgcagcagtgtctttatctcttgctcaagcctttctaatcaacagatgattcttgctggagagaagctctccaaatgtgaaacatggtacaaaggttttaaccacagcccaaatccttccaaacaccagagaaatgagattggagggaaacctttcaaatgtgaggaatgtgacagcatcttcaagtggttctcagaccttactaaacataagagaattcacactggtgagaaaccatacaaatgtgacgaatgtgggaaagcctatacacagtcctcacacctcagtgaacacaggaggattcacaccggagagaaaccctaccaatgtgaagaatgtgggaaggtcttcagaacttgctcaagcctttctaaccataagagaactcattctgaagaaaaaccctacacgtgtgaagaatgtggcaacatctttaagcagttatcagacctcactaagcataagaaaacccatactggagagaagccctacaaatgtgacgaatgtggaaaaaactttacccagtcctccaaccttattgtacataagagaattcatactggagagaaaccctacaagtgtgaagaatgtggcagagtcttcatgtggttctcagacattaccaaacataagaaaacccatactggagagaaaccctacaaatgtgacgaatgtggaaaaaactttacccagtcctcaaaccttattgtacataagagaattcatactggagagaaaccctacaagtgtgaaaagtgtggcaaagccttcacccagttctcacacctgactgtacatgaaagcattcatacttagtaatgaactagtccgtaacttgaaagtatttcgatttcttggctttatatatcttgtggaaaggacgatccctcgtactcccgcttccatga

SEQ ID NO: 1689 - DNA, 1991 bp, Homo sapiens
  source 1..1991: mol_type = genomic DNA
accgccaccatgactctgttgacgttcagggatgtggccatagaattctccctggaggagtggaaatgcctggacctcgctcagcagaatttgtacagggatgtgatgttggagaactacagaaacttgttctccgttggtctcactgtctgtaagccaggcctgatcacctgcctggagcaacgaaaagagccctggaatgtgaagagacaggaggcagcagacggacatccagagatgggatttcaccatgctactcaggcttgtcttgaactcctgggctcaagcgatctgcctgcctcagcctcccaaagtgctgggattacaggtgtgaaccaccgtgcccagccaggcctcaatgtttctgtggacaaattcactgcactgtgctcacctggggtgctgcaaactgtgaaatggtttttagagttcagatgcatcttctcactagctatgtcttctcattttacccaagaccttctgccagagcagggcatacaagatgcattcccaaaaagaatactgagaggatatggaaattgtggccttgataatttatatttaaggaaagactgggaaagtttagatgagtgtaagttgcaaaaagattataatggacttaaccaatgttcatcaactacccatagcaaaatctttcaatataataaatatgttaaaatctttgataacttttcaaatttacatagacgtaatataagtaatactggagagaaacctttcaaatgtcaagaatgtggcaaatcctttcaaatgctctcattcctaactgaacatcagaaaattcacactggaaaaaaattccaaaaatgtggagaatgtggcaaaacctttatccagtgctcacactttactgaacctgagaacattgacactggagagaaaccttacaagtgtcaagaatgtaacaacgtcattaaaacttgctcagtccttactaaaaatagaatttatgccggaggggaacattacagatgtgaagaatttggcaaagtatttaaccagtgctcccaccttactgaacatgagcatggtactgaggaaaaaccctgcaaatatgaagagtgcagcagtgtctttatctcttgctcaagcctttctaatcaacagatgattcttgctggagagaagctctccaaatgtgaaacatggtacaaaggttttaaccacagcccaaatccttccaaacaccagagaaatgagattggagggaaacctttcaaatgtgaggaatgtgacagcatcttcaagtggttctcagaccttactaaacataagagaattcacactggtgagaaaccatacaaatgtgacgaatgtgggaaagcctatacacagtcctcacacctcagtgaacacaggaggattcacaccggagagaaaccctaccaatgtgaagaatgtgggaaggtcttcagaacttgctcaagcctttctaaccataagagaactcattctgaagaaaaaccctacacgtgtgaagaatgtggcaacatctttaagcagttatcagacctcactaagcataagaaaacccatactggagagaagccctacaaatgtgacgaatgtggaaaaaactttacccagtcctccaaccttattgtacataagagaattcatactggagagaaaccctacaagtgtgaagaatgtggcagagtcttcatgtggttctcagacattaccaaacataagaaaacccatactggagagaaaccctacaaatgtgacgaatgtggaaaaaactttacccagtcctcaaaccttattgtacataagagaattcatactggagagaaaccctacaagtgtgaaaagtgtggcaaagccttcacccagttctcacacctgactgtacatgaaagcattcatacttagtaatgaactagtccgtaacttgaaagtatttcgatttcttggctttatatatcttgtggaaaggacgaggtggtaagtggagaagtccgtaa

SEQ ID NO: 1690 - DNA, 374 bp, Homo sapiens
  source 1..374: mol_type = genomic DNA
accgccaccatggctggtgctcagactctgttgacgttcagggatgtggccatagaattctccctggaggagtggaaatgcctggacctcgctcagcagaatttgtacagggatgtgatgttggagaactacagaaacttgttctccgttggtctcactgtctgtaagccaggcctgatcacctgcctggagcaacgaaaagagccctggaatgtgaagagacaggaggcagcagacggacatccaggtattttctttgtggttaccatggaaattatatagtaatgaactagtccgtaacttgaaagtatttcgatttcttggctttatatatcttgtggaaaggacgatgtaattggataatagttataagc

SEQ ID NO: 1691 - DNA, 2003 bp, Homo sapiens
  source 1..2003: mol_type = genomic DNA
accgccaccatggctggtgctcagactctgttgacgttcagggatgtggccatagaattctccctggaggagtggaaatgcctggacctcgctcagcagaatttgtacagggatgtgatgttggagaactacagaaacttgttctccgttggtctcactgtctgtaagccaggcctgatcacctgcctggagcaacgaaaagagccctggaatgtgaagagacaggaggcagcagacggacatccagagatgggatttcaccatgctactcaggcttgtcttgaactcctgggctcaagcgatctgcctgcctcagcctcccaaagtgctgggattacaggtgtgaaccaccgtgcccagccaggcctcaatgtttctgtggacaaattcactgcactgtgctcacctggggtgctgcaaactgtgaaatggtttttagagttcagatgcatcttctcactagctatgtcttctcattttacccaagaccttctgccagagcagggcatacaagatgcattcccaaaaagaatactgagaggatatggaaattgtggccttgataatttatatttaaggaaagactgggaaagtttagatgagtgtaagttgcaaaaagattataatggacttaaccaatgttcatcaactacccatagcaaaatctttcaatataataaatatgttaaaatctttgataacttttcaaatttacatagacgtaatataagtaatactggagagaaacctttcaaatgtcaagaatgtggcaaatcctttcaaatgctctcattcctaactgaacatcagaaaattcacactggaaaaaaattccaaaaatgtggagaatgtggcaaaacctttatccagtgctcacactttactgaacctgagaacattgacactggagagaaaccttacaagtgtcaagaatgtaacaacgtcattaaaacttgctcagtccttactaaaaatagaatttatgccggaggggaacattacagatgtgaagaatttggcaaagtatttaaccagtgctcccaccttactgaacatgagcatggtactgaggaaaaaccctgcaaatatgaagagtgcagcagtgtctttatctcttgctcaagcctttctaatcaacagatgattcttgctggagagaagctctccaaatgtgaaacatggtacaaaggttttaaccacagcccaaatccttccaaacaccagagaaatgagattggagggaaacctttcaaatgtgaggaatgtgacagcatcttcaagtggttctcagaccttactaaacataagagaattcacactggtgagaaaccatacaaatgtgacgaatgtgggaaagcctatacacagtcctcacacctcagtgaacacaggaggattcacaccggagagaaaccctaccaatgtgaagaatgtgggaaggtcttcagaacttgctcaagcctttctaaccataagagaactcattctgaagaaaaaccctacacgtgtgaagaatgtggcaacatctttaagcagttatcagacctcactaagcataagaaaacccatactggagagaagccctacaaatgtgacgaatgtggaaaaaactttacccagtcctccaaccttattgtacataagagaattcatactggagagaaaccctacaagtgtgaagaatgtggcagagtcttcatgtggttctcagacattaccaaacataagaaaacccatactggagagaaaccctacaaatgtgacgaatgtggaaaaaactttacccagtcctcaaaccttattgtacataagagaattcatactggagagaaaccctacaagtgtgaaaagtgtggcaaagccttcacccagttctcacacctgactgtacatgaaagcattcatacttagtaatgaactagtccgtaacttgaaagtatttcgatttcttggctttatatatcttgtggaaaggacgatctgcaatgggcgtcacgtgaccc

SEQ ID NO: 1692 - DNA, 1985 bp, Homo sapiens
  source 1..1985: mol_type = genomic DNA
accgccaccatggcggcggccgagctgacggccccggcccagggcattgtgacctttgaggacgtggctgtttacttctcctggaaggagtggggtcttcttgatgaggctcagaaatgcctgtaccacgatgtgatgctggagaacttgacacttacaacctccctgggtggttctggagcaggggatgaggaggcaccttatcagcagagcacttctccacagcgggtgtcacaggttaggattcctaaggcccttccttctccccagaagaccaacccctgtgagatatgtggcccagtcttgagacagattttgcacttggttgaacaccaaggaacacaccatggtcagaaactgtatacagacggggcatgtaggaaacaattacaatttactgcataccttcatcagcaccagaagcagcatgttggacagaaacacttcagaagcaatgggggcagagacatgtttttgagcagctgcacatttgaagtatctgggaagcccttcacttgcaaggaggttgggaaggatttcctggtgagatcaagatttcttcagcaacaggctgctcacaccagaaagaagtcaaacagaaccaagagtgcagtggcctttcacagtgtaaaaaatcattacaactggggagaatgtgtgaaagctttcagctacaaacatgtacgtgttcagcaccagggagacctcattagggaaagatcttacatgtgcagtgaatgtgggaaatcttttagcacaagctgtagcctcagtgatcatttgagagttcacacttcagaaaagccttatacatgtggagaatgtgggaaatcctataggcaaagctctagccttattacgcaccgaagaattcacactggagtaagacctcatcaatgtgatgaatgtggaaaattatttaacaggaagtatgaccttcttatacatcagagagttcatactggagaaaggccttacaagtgcagtgaatgtgggaaatcctttagccatagctctagcctcattacacaccagagaattcatactggaatgaggccttatgagtgcagtgaatgtgggaaatcttttatccatagttctagccttattacacaccagagagttcacactggtacaaggccttatatgtgcagtgaatgtgggaaatcctttagccagagctgtcacctcattaaacaccggagacttcacattggagaagggccttatgagtgtagtgaatgtgggaaattgtttacttatagatctcgtttcttccaacaccagagagttcatactggagtaagatctcatgaatgtcatgaatgtggaaaattatttagcaggaaatttgacctcattgtacatgagagagttcacacaggagaaaggccatatgagtgcagtgaatgtggaaaatcctttacctgtaaatcctacctcatctcacactggaaagttcatactggagcaaggccttatgaatgtggggagtgtgggaaatcatttactcatagctctacgctccttcaacaccagagagttcacactggagaaaggccttatgagtgcaatgaatgtgggaagttttttagccagagctccagcctcattagacataggagaagtcacaccggagaaaggccttatgagtgcagtgagtgttggaaatcctttagtaaccactctagcctcgttaaacaccgaagagttcataccggagaaaggccttatgaatgcagtgaatgtggaaaatcctttagccagagctctaacctcactaatcaccagcgaattcacagtggggaaaggccttatgagtgtagtgactgtggaaaattttttaccttcaactccaacctcctaaaacatcagaacgttcacaagggatagtaatgaactagtccgtaacttgaaagtatttcgatttcttggctttatatatcttgtggaaaggacgagtctcagtccagtaggatgtccta

SEQ ID NO: 1693 - DNA, 1655 bp, Homo sapiens
  source 1..1655: mol_type = genomic DNA
accgccaccatgccgcctcctgggaaagttccccgaaaggagaatctgtggctacagtgtgagtgggggtcctgctcctttgtgtgctcaaccatggaaaagttctttgagcatgtcactcagcacctgcagcagcacctgcatggctctggggaggaggaggaagaggaagaggaggatgacccacttgaggaagaattctcctgcttgtggcaggaatgtggcttttgttctctggacagttctgctgacctcatccgccatgtctacttccactgctaccacaccaagctgaaacagtgggggctgcaggccttgcaaagccaggctgaccttggcccctgcatcctggacttccagagccggaacgtcatccctgatatccctgaccacttcctgtgtctgtgggagcactgtgagaattccttcgacaatcctgagtggttttatcggcatgtggaagcacacagtctgtgctgtgaatacgaagcagtcggcaaggacaacccggtggtgctgtgtggctggaaaggctgtacctgcaccttcaaggaccgcagtaaacttcgagagcacctccgcagccatacccaggagaaagtggtagcctgccccacctgtgggggcatgtttgccaacaataccaagttcttagatcacatccgtcgccagacctcattggatcagcagcacttccagtgttctcactgttccaagagatttgccacagagcggctattgcgggaccacatgcgcaaccatgtgaatcactataagtgccctctgtgtgacatgacctgcccgctgccttcctccctccgcaaccacatgcgctttcgtcacagtgaggaccggccctttaaatgtgactgttgtgactacagctgcaagaatcttattgacctccagaagcacctggatacccacagcgaggagccagcctacaggtgtgattttgagaactgcaccttcagtgcccgatccctctgctctatcaagtcccattaccgcaaagtacatgaaggagactctgagccaaggtacaaatgtcatgtgtgtgacaaatgcttcacacggggcaacaacctcaccgtgcaccttcgcaagaagcaccagttcaagtggccctcagggcatccccgttttcggtacaaggaacatgaagatggctatatgcggctgcagctggttcgctacgagagtgtagagctgacacagcaactgctgcggcaaccacaagagggatcgggcctgggaacgtcgctgaacgagagcagcctgcagggcattattctagaaacagtgccaggggagccaggacgtaaggaagaggaagaggagggcaagggtagcgaagggacagccctctcagcctctcaggacaaccccagttctgtcatccacgtggtgaatcagaccaatgcccaaggccagcaagagatcgtctactatgtgctgtctgaagccccaggggagcctcccccagcccctgagccaccttcagggggcatcatggaaaagcttcaaggaatagctgaggagccagagatccagatggtttagtaatgaactagtccgtaacttgaaagtatttcgatttcttggctttatatatcttgtggaaaggacgaattctggctagctgatcctgtgta

SEQ ID NO: 1694 - DNA, 1361 bp, Homo sapiens
  source 1..1361: mol_type = genomic DNA
accgccaccatgccgcctcctgggaaagttccccgaaaggagaatctgtggctacagtgtgagtgggggtcctgctcctttgtgtgctcaaccatggaaaagttctttgagcatgtcactcagcacctgcagcagcacctgcatggctctggggaggaggaggaagaggaagaggaggatgacccacttgaggaagaattctcctgcttgtggcaggaatgtggcttttgttctctggacagttctgctgacctcatccgccatgtctacttccactgctaccacaccaagctgaaacagtgggggctgcaggccttgcaaagccaggctgaccttggcccctgcatcctggacttccagagccggaacgtcatccctgatatccctgaccacttcctgtgtctgtgggagcactgtgagaattccttcgacaatcctgagtggttttatcggcatgtggaagcacacagtctgtgctgtgaatacgaagcagtcggcaaggacaacccggtggtgctgtgtggctggaaaggctgtacctgcaccttcaaggaccgcagtaaacttcgagagcacctccgcagccatacccaggagaaagtggtagcctgccccacctgtgggggcatgtttgccaacaataccaagttcttagatcacatccgtcgccagacctcattggatcagcagcacttccagtgttctcactgttccaagagatttgccacagagcggctattgcgggaccacatgcgcaaccatgtgaatcactataagtgccctctgtgtgacatgacctgcccgctgccttcctccctccgcaaccacatgcgctttcgtcacagtgaggaccggccctttaaatgtgactgttgtgactacagctgcaagaatcttattgacctccagaagcacctggatacccacagcgaggagccagcctacaggtgtgattttgagaactgcaccttcagtgcccgatccctctgctctatcaagtcccattaccgcaaagtacatgaaggagactctgagccaaggtacaaatgtcatgtgtgtgacaaatgcttcacacggggcaacaacctcaccgtgcaccttcgcaagaagcaccagttcaagtggccctcagggcatccccgttttcgcctcggccatttctgtatccccctgcctgggtttgctgccctttatgctcctacctcaccaggtacaaggaacatgaagatggctatatgcggctgcagctggttcgctacgagagtgtagtaatgaactagtccgtaacttgaaagtatttcgatttcttggctttatatatcttgtggaaaggacgaatttcggaatactggagcgagaga

SEQ ID NO: 1695 - DNA, 5819 bp, Homo sapiens
  source 1..5819: mol_type = genomic DNA
accgccaccatggaaatggaggcaaacgaccattttaactttactggccttccccctgcacctgctgcctcaggactgaaaccctctccttcctcaggggagggcctctacactaacgggtctcccatgaacttcccccagcaagggaaaagtttgaatggggatgtgaatgttaatggcttatctactgtatctcacactactacttcagggattttgaactctgctccccactcctccagcacctcacacctccatcaccccagcgtggcctacgactgtctctggaactactcacagtacccatctgccaatcctggcagcaacctcaaggacccaccccttctctcccagttctcggggggacaatacccactcaacggcatccttgggggcagccggcaaccttcatccccaagtcataacactaaccttcgggctgggagccaagagttctgggccaacggtacccagagtcccatggggcttaactttgattcacaagaactgtatgattcctttcctgaccagaattttgaggtgatgcccaatggaccccctagttttttcacctccccacagacttctcctatgttgggatctagcattcaaacctttgcaccctcccaggaggtaggcagtggtatccatcctgatgaggcagcagaaaaggagatgacttcagttgtggcagagaatggcactggcttggtaggcagcttggagctggaagaagagcagccagaactgaagatgtgtggctacaatggctctgtcccttctgtggaatcgttacaccaagaggtctcagtcctggtccctgaccccacagtgagctgtttagatgatccttcacatcttcctgatcaactggaagacactccaatcctcagtgaagactctctggagcccttcaactctctggcaccagagccagtgagtggaggactatatggtattgatgacacggagctgatgggtgcagaggacaagctgcctcttgaggacagccctgtgatttctgcccttgattgcccttccctcaataatgctactgccttcagtctcctggcagatgatagtcaaacatcaacctctatctttgccagtcccacctctccacctgtcctaggggagtctgtcctgcaagataacagctttgacctgaataatggtagtgacgctgaacaggaagaaatggaaactcaatcttcagacttcccaccatccctgacccagccagctcctgatcagtcatccactattcagctacatccagcaacctcaccagcagtctcgccaacaacctccccagcagtctccctagtggtttctccagcagcctccccagaaatctctccagaagtttgtcccgcagcttctacagttgtctctccagcagtcttctcagtggtctctccagcttcctcagcagtcctcccagcagtctccttagaagtcccgttgacggcttcagtgacatccccaaaagcctctcccgtaacttccccagcagctgcctttccaacagcctccccagcaaataaggatgtcagcagctttctagaaaccactgctgacgtggaagagatcactggagaaggactcactgcttctggtagtggtgatgtcatgaggagacgtattgctaccccagaagaagttcgtcttcccctccaacatgggtggcggagagaggtgcgcatcaagaagggcagccaccgatggcagggggagacctggtattatggcccctgtgggaagaggatgaagcaatttccagaagtgatcaagtacctgagccgcaacgtggtacacagtgtccgccgagagcacttcagcttcagtccccgtatgcctgttggagatttctttgaagaaagagacacgccagagggcttgcagtgggtgcagctctcagcagaggagatcccgtcgaggattcaggcaattactggcaaacggggtcgacctcgaaacactgagaaggctaagactaaggaagtccccaaggtgaaacggggtcgaggtcggccacctaaggtcaaaatcactgagctattgaacaagacagacaaccgccccctaaagaaactggaggcccaagaaacattgaatgaggaggataaagcaaagattgctaaaagcaagaagaagatgaggcagaaggttcaacggggagagtgtcagactactatccaagggcaggccagaaataagcggaaacaagagaccaagagcttaaagcagaaggaagctaagaagaaatccaaggctgagaaagaaaaaggaaagacaaagcaggaaaaactgaaggaaaaagtcaagagggaaaagaaggagaaggtaaaaatgaaggaaaaggaggaggtgaccaaagccaagccagcctgtaaagcagataagaccctggccacacagaggcgcttggaggaacggcagaggcagcagatgatcttggaggaaatgaagaagccgacagaggatatgtgtctgactgaccaccagcccctgcctgacttctcacgagtccctggtctgacattgcccagtggagccttctcagactgcttgaccattgtggagttcctgcatagctttggcaaggtgctgggctttgatcctgccaaagatgtgcctagcctgggggtcctgcaggagggactcctgtgtcaaggtgacagcttgggtgaggtgcaagacctgctggtcaggctgctgaaggctgcactccatgatcctggctttccctcctactgtcagtccctaaagatcttgggggagaaggtgtctgagatcccactgacaagagacaatgtgtcagagatcctgcgctgcttccttatggcatatggagtagagccagccctctgtgaccgcctgcgcacccagccttttcaggcccagccaccccagcagaaggctgctgtcctggccttccttgtgcatgagctcaatggctccaccctcatcatcaatgagattgacaagactctggagagtatgtccagctacaggaaaaacaagtggattgttgaaggccggctccggaggctgaaaactgttctggccaagcgaactgggcggtctgaagtagagatggaagggccagaggaatgcctgggacggaggcgcagttctcggatcatggaggagaccagtggcatggaagaagaggaagaagaggagtctatagcagctgtccctggccgcaggggtcgaagagatggagaggttgatgccacagcatctagcatcccagagctagagcgccagatagaaaaactcagcaagcgtcagcttttctttcgcaaaaagctgcttcactcatcccagatgcttcgggcggtctccctgggtcaggaccgctacagacgtcgctactgggtattgccgtatttggctggtatctttgtagaaggaacagaggggaacttagttcctgaggaggtgataaagaaggaaactgactccttaaaagtggcagcccatgcgtcactcaaccctgccctcttctctatgaagatggagttagctggctccaacaccactgccagttctcctgcccgggcccgaggccgacctcgaaaaactaagcccgggtctatgcaacctaggcatcttaagtcccctgtcaggggtcaggattcagaacagccccaggcccagcttcagcctgaggctcagcttcatgctcctgcccagccccagcctcagcttcagcttcagcttcagtcccataaggggttcctggagcaagaaggctcccctttgtcactgggtcagagccagcatgacctcagccagtcagccttcctgtcttggctgagccagactcagagccatagctccctgttgagcagctcagtcctcacacctgatagcagtccgggaaaactagacccagctccatcacaacccccggaggagccagagcctgatgaggcagaatccagccctgatcctcaagcactctggtttaacatctcagcccagatgccctgcaatgctgcccccacaccgccccctgcagtttctgaggaccaacccactccctcccctcagcagcttgcctcctccaagccaatgaatagacctagtgctgccaacccttgttctccagtgcagttctcttccacgcccttggctgggttggcccctaagaggcgagcaggagaccctggagaaatgccacagagtcccacagggctgggacagcccaaacggagagggagacctcccagtaagttcttcaaacagatggaacagcgttacctaacccagctgacagcccagcctgtcccacctgagatgtgctcaggctggtggtggatacgagatcctgagatgttggatgccatgctcaaggccctacacccccgaggtatccgggagaaggcacttcacaaacaccttaacaagcacagggacttcttgcaggaagtctgcctgcggccctcagctgaccccatctttgagcccaggcaactacctgcctttcaagaagggattatgagctggtcccccaaagagaagacatacgagacagacctagcagtgcttcaatgggtagaggagctggagcagcgggttatcatgtctgatctgcagattcggggctggacatgtcctagcccagactctacccgtgaagacttggcctactgtgagcacctctccgactcccaggaggatatcacctggcgaggtcggggcagggagggactggcacctcagcgtaaaactaccaaccctttggacctggctgtgatgcggctggctgccctggaacagaatgtagaacggcggtacctgcgggagcccctctggccaactcatgaggttgtgctggagaaggccctgcttagcacacctaatggtgcccctgagggcaccactacagagatatcatatgagatcacccctcgcattcgtgtctggcgccagaccctcgagcggtgccggagcgcagcccaggtgtgcttgtgcctgggccagctggagaggtccattgcctgggagaagtctgtcaacaaagtgacatgtctagtctgccggaagggtgacaatgatgagtttcttctgctttgtgatgggtgtgaccgtggctgccacatttactgccatcgtcccaagatggaggctgtcccagaaggagattggttctgtactgtctgtttggctcagcaggtggagggagaattcactcagaagcctggtttcccaaagcgtggccagaagcggaaaagtggttattcgctgaacttctcagagggtgatggccgccgacgccgggtactgttgaggggccgagaaagcccagcagcagggcctcggtactcggaagaagggctctccccctccaagcggcggcgactctctatgcggaaccaccacagtgatctcacattttgcgagattatcctgatggagatggagtcccatgatgcagcctggcctttcctagagcctgtgaacccacgtttggtgagtgggtaccggcgcatcatcaaaaatcctatggatttttccaccatgcgggagcggctgctcaggggagggtacaccagctcagaggagtttgcggctgatgccctcctggtatttgacaactgccagactttcaacgaggatgactctgaagtaggcaaggctgggcacatcatgcgccgcttcttcgagagccgctgggaggagttttatcagggaaaacaggccaatctgtagtaatgaactagtccgtaacttgaaagtatttcgatttcttggctttatatatcttgtggaaaggacgatccttgtaagctgagtttgtaaat

SEQ ID NO: 1696 - DNA, 5813 bp, Homo sapiens
  source 1..5813: mol_type = genomic DNA
accgccaccatggaggcaaacgaccattttaactttactggccttccccctgcacctgctgcctcaggactgaaaccctctccttcctcaggggagggcctctacactaacgggtctcccatgaacttcccccagcaagggaaaagtttgaatggggatgtgaatgttaatggcttatctactgtatctcacactactacttcagggattttgaactctgctccccactcctccagcacctcacacctccatcaccccagcgtggcctacgactgtctctggaactactcacagtacccatctgccaatcctggcagcaacctcaaggacccaccccttctctcccagttctcggggggacaatacccactcaacggcatccttgggggcagccggcaaccttcatccccaagtcataacactaaccttcgggctgggagccaagagttctgggccaacggtacccagagtcccatggggcttaactttgattcacaagaactgtatgattcctttcctgaccagaattttgaggtgatgcccaatggaccccctagttttttcacctccccacagacttctcctatgttgggatctagcattcaaacctttgcaccctcccaggaggtaggcagtggtatccatcctgatgaggcagcagaaaaggagatgacttcagttgtggcagagaatggcactggcttggtaggcagcttggagctggaagaagagcagccagaactgaagatgtgtggctacaatggctctgtcccttctgtggaatcgttacaccaagaggtctcagtcctggtccctgaccccacagtgagctgtttagatgatccttcacatcttcctgatcaactggaagacactccaatcctcagtgaagactctctggagcccttcaactctctggcaccagagccagtgagtggaggactatatggtattgatgacacggagctgatgggtgcagaggacaagctgcctcttgaggacagccctgtgatttctgcccttgattgcccttccctcaataatgctactgccttcagtctcctggcagatgatagtcaaacatcaacctctatctttgccagtcccacctctccacctgtcctaggggagtctgtcctgcaagataacagctttgacctgaataatggtagtgacgctgaacaggaagaaatggaaactcaatcttcagacttcccaccatccctgacccagccagctcctgatcagtcatccactattcagctacatccagcaacctcaccagcagtctcgccaacaacctccccagcagtctccctagtggtttctccagcagcctccccagaaatctctccagaagtttgtcccgcagcttctacagttgtctctccagcagtcttctcagtggtctctccagcttcctcagcagtcctcccagcagtctccttagaagtcccgttgacggcttcagtgacatccccaaaagcctctcccgtaacttccccagcagctgcctttccaacagcctccccagcaaataaggatgtcagcagctttctagaaaccactgctgacgtggaagagatcactggagaaggactcactgcttctggtagtggtgatgtcatgaggagacgtattgctaccccagaagaagttcgtcttcccctccaacatgggtggcggagagaggtgcgcatcaagaagggcagccaccgatggcagggggagacctggtattatggcccctgtgggaagaggatgaagcaatttccagaagtgatcaagtacctgagccgcaacgtggtacacagtgtccgccgagagcacttcagcttcagtccccgtatgcctgttggagatttctttgaagaaagagacacgccagagggcttgcagtgggtgcagctctcagcagaggagatcccgtcgaggattcaggcaattactggcaaacggggtcgacctcgaaacactgagaaggctaagactaaggaagtccccaaggtgaaacggggtcgaggtcggccacctaaggtcaaaatcactgagctattgaacaagacagacaaccgccccctaaagaaactggaggcccaagaaacattgaatgaggaggataaagcaaagattgctaaaagcaagaagaagatgaggcagaaggttcaacggggagagtgtcagactactatccaagggcaggccagaaataagcggaaacaagagaccaagagcttaaagcagaaggaagctaagaagaaatccaaggctgagaaagaaaaaggaaagacaaagcaggaaaaactgaaggaaaaagtcaagagggaaaagaaggagaaggtaaaaatgaaggaaaaggaggaggtgaccaaagccaagccagcctgtaaagcagataagaccctggccacacagaggcgcttggaggaacggcagaggcagcagatgatcttggaggaaatgaagaagccgacagaggatatgtgtctgactgaccaccagcccctgcctgacttctcacgagtccctggtctgacattgcccagtggagccttctcagactgcttgaccattgtggagttcctgcatagctttggcaaggtgctgggctttgatcctgccaaagatgtgcctagcctgggggtcctgcaggagggactcctgtgtcaaggtgacagcttgggtgaggtgcaagacctgctggtcaggctgctgaaggctgcactccatgatcctggctttccctcctactgtcagtccctaaagatcttgggggagaaggtgtctgagatcccactgacaagagacaatgtgtcagagatcctgcgctgcttccttatggcatatggagtagagccagccctctgtgaccgcctgcgcacccagccttttcaggcccagccaccccagcagaaggctgctgtcctggccttccttgtgcatgagctcaatggctccaccctcatcatcaatgagattgacaagactctggagagtatgtccagctacaggaaaaacaagtggattgttgaaggccggctccggaggctgaaaactgttctggccaagcgaactgggcggtctgaagtagagatggaagggccagaggaatgcctgggacggaggcgcagttctcggatcatggaggagaccagtggcatggaagaagaggaagaagaggagtctatagcagctgtccctggccgcaggggtcgaagagatggagaggttgatgccacagcatctagcatcccagagctagagcgccagatagaaaaactcagcaagcgtcagcttttctttcgcaaaaagctgcttcactcatcccagatgcttcgggcggtctccctgggtcaggaccgctacagacgtcgctactgggtattgccgtatttggctggtatctttgtagaaggaacagaggggaacttagttcctgaggaggtgataaagaaggaaactgactccttaaaagtggcagcccatgcgtcactcaaccctgccctcttctctatgaagatggagttagctggctccaacaccactgccagttctcctgcccgggcccgaggccgacctcgaaaaactaagcccgggtctatgcaacctaggcatcttaagtcccctgtcaggggtcaggattcagaacagccccaggcccagcttcagcctgaggctcagcttcatgctcctgcccagccccagcctcagcttcagcttcagcttcagtcccataaggggttcctggagcaagaaggctcccctttgtcactgggtcagagccagcatgacctcagccagtcagccttcctgtcttggctgagccagactcagagccatagctccctgttgagcagctcagtcctcacacctgatagcagtccgggaaaactagacccagctccatcacaacccccggaggagccagagcctgatgaggcagaatccagccctgatcctcaagcactctggtttaacatctcagcccagatgccctgcaatgctgcccccacaccgccccctgcagtttctgaggaccaacccactccctcccctcagcagcttgcctcctccaagccaatgaatagacctagtgctgccaacccttgttctccagtgcagttctcttccacgcccttggctgggttggcccctaagaggcgagcaggagaccctggagaaatgccacagagtcccacagggctgggacagcccaaacggagagggagacctcccagtaagttcttcaaacagatggaacagcgttacctaacccagctgacagcccagcctgtcccacctgagatgtgctcaggctggtggtggatacgagatcctgagatgttggatgccatgctcaaggccctacacccccgaggtatccgggagaaggcacttcacaaacaccttaacaagcacagggacttcttgcaggaagtctgcctgcggccctcagctgaccccatctttgagcccaggcaactacctgcctttcaagaagggattatgagctggtcccccaaagagaagacatacgagacagacctagcagtgcttcaatgggtagaggagctggagcagcgggttatcatgtctgatctgcagattcggggctggacatgtcctagcccagactctacccgtgaagacttggcctactgtgagcacctctccgactcccaggaggatatcacctggcgaggtcggggcagggagggactggcacctcagcgtaaaactaccaaccctttggacctggctgtgatgcggctggctgccctggaacagaatgtagaacggcggtacctgcgggagcccctctggccaactcatgaggttgtgctggagaaggccctgcttagcacacctaatggtgcccctgagggcaccactacagagatatcatatgagatcacccctcgcattcgtgtctggcgccagaccctcgagcggtgccggagcgcagcccaggtgtgcttgtgcctgggccagctggagaggtccattgcctgggagaagtctgtcaacaaagtgacatgtctagtctgccggaagggtgacaatgatgagtttcttctgctttgtgatgggtgtgaccgtggctgccacatttactgccatcgtcccaagatggaggctgtcccagaaggagattggttctgtactgtctgtttggctcagcaggtggagggagaattcactcagaagcctggtttcccaaagcgtggccagaagcggaaaagtggttattcgctgaacttctcagagggtgatggccgccgacgccgggtactgttgaggggccgagaaagcccagcagcagggcctcggtactcggaagaagggctctccccctccaagcggcggcgactctctatgcggaaccaccacagtgatctcacattttgcgagattatcctgatggagatggagtcccatgatgcagcctggcctttcctagagcctgtgaacccacgtttggtgagtgggtaccggcgcatcatcaaaaatcctatggatttttccaccatgcgggagcggctgctcaggggagggtacaccagctcagaggagtttgcggctgatgccctcctggtatttgacaactgccagactttcaacgaggatgactctgaagtaggcaaggctgggcacatcatgcgccgcttcttcgagagccgctgggaggagttttatcagggaaaacaggccaatctgtagtaatgaactagtccgtaacttgaaagtatttcgatttcttggctttatatatcttgtggaaaggacgaatgatgactgtcattccgcgagta

SEQ ID NO: 1697 - DNA, 6500 bp, Homo sapiens
  source 1..6500: mol_type = genomic DNA
accgccaccatggagtctggagaacggttaccatcctcagcagcctcctctactacaccaacttcatcttcgacaccttctgtggcttcagtagtttcaaaaggtggcctttccactggagttgcttcacttagctctacaatcaacccatgtggacatttattcagaacagctggggatcaaccgtttaacctgtccacagtgtcgagtgccttcccaatggtcagccacccagtctttggtctacattcagccagctcagggcattcagaatttggtggtttggggacacttggtacacccacagccttagccgcacatccccaactagcatcttttccagaatggtggcgaacaactgatgctcatactcgtacaggagcaaccttctttccaccattactgggaattccaccactatttgctcccccagcccagaatcatgattcttcttcattccattcaaggacttcgggaaaaagtaatcgaaatggtcccgaaaaaggtgtaaatgggtcaataaatggaagtaatacatcatctgtaattggtatcaacacatctgtactatccactactgcttcaagttccatgggacaaactaaaagtacaagctcaggtggaggaaatcgaaaatgtaatcaggaacaaagcaaaaaccagcctttggatgctagagttgacaaaatcaaagataagaaaccaaggaagaaagcaatggaaagttctagcaacagtgatagtgattcaggcacatcatcagacacctcaagtgaaggcattagtagcagtgattcagatgatctagaagaagatgaagaagaagaagatcaaagtattgaagaaagtgaagatgatgattctgattcagagagtgaagcacaacataaaagtaacaaccaggtgctattacatggtatttcagacccaaaagcagatggacagaaagcaactgaaaaagcccaggaaaaaagaatacaccagccattacctcttgcgtctgaatcccagactcactcattccaatcccagcagaagcagcctcaggttttgtcacagcagcttccatttattttccaaagctctcaggcaaaggaggaatctgtgaacaaacacaccagtgtaatacagtctacgggattggtgtccaatgtgaaacctttatctttggtaaatcaagccaaaaaggaaacttacatgaaactcatagttccttctcctgatgttcttaaagcagggaataaaaatacctctgaagaatctagtttattgaccagtgaattgagatccaaacgggaacaatataaacaggcattcccatcacagttaaagaaacaagagtcatcgaagagcctgaagaaggttattgcagctttgtcaaatccaaaagcaacctctagttcaccagcacatccaaaacaaacattagaaaacaaccacccaaatccattcttgacaaatgcacttttaggtaatcaccaaccaaatggagttattcaaagtgtcattcaagaagctcctctagcacttactaccaaaactaaaatgcagagcaagattaatgaaaacattgctgctgcaagtagcacccctttttcctcacctgtaaatctgagtacaagtgggagaagaacccctggcaatcagacacctgtaatgccctctgcctctcccatcctgcatagtcaagggaaggaaaaagcagttagcaataatgtaaacccagtaaaaacacagcatcactcccatcctgcaaaatctttagtggaacaattcagaggaacagattcagacattcccagtagtaaagattctgaagattcaaatgaggatgaagaggaagatgatgaagaagaagatgaggaagatgatgaagatgatgaatctgatgacagccaatcagaatcagatagtaattcagaatcagatacagaaggatcagaagaagaagatgatgatgataaagaccaagatgaatcagatagtgatactgaaggagagaaaacttcaatgaaactgaataaaacaacttcctctgtcaaaagcccttccatgagtctcacaggtcactcaacacctcgtaacctccacatagcaaaagccccaggctctgctcctgctgccttatgttctgaatcccagtcacctgcttttcttggtacatcttcttccacacttacttcaagcccacactctggcacttccaaaagaagaagagtaacagatgaacgtgaactgcgtattccattggaatatggctggcagagagagacaagaataagaaactttggagggcgccttcaaggagaagtagcatattatgctccatgtggaaagaaacttaggcagtaccctgaagtaataaagggaatgcagtggtgtcttttgaaagaagaggatgtcattcctcgtatcagggcaatggaaggtcgtagaggaagaccaccaaatccagatagacaacgagcaagagaggaatccaggatgagacgtcggaaaggtcgacctccaaatgttggcaatgctgaattcctagataacgcagatgcaaagttgctaagaaaactgcaagctcaagaaatagccaggcaagcagcacaaataaagcttttgagaaaacttcaaaagcaggaacaggctcgggttgctaaagaagccaaaaaacaacaagcaataatggctgctgaggagaagcggaagcaaaaagaacagataaagattatgaaacagcaggaaaaaattaagagaatacagcaaatcagaatggaaaaagaacttcgagctcagcaaattctagaggctaaaaagaaaaagaaggaagaagcggcaaatgccaaattattggaggccgagaaacgaataaaggaaaaagaaatgagaagacaacaagctgttcttctgaaacatcaggaacgagagcgaaggcgacaacacatgatgcttatgaaagctatggaagctcgtaaaaaagcagaagaaaaagagcggttgaaacaagaaaaacgtgatgagaaaagattaaataaagagcgtaaactagagcagcgaagattagaattagaaatggcaaaggaactaaagaagcctaatgaagacatgtgcttagcagaccaaaagcctttgccagagttgcctcgtattccaggacttgttctctctggaagtacattttcagactgtctcatggtggtgcagttcttacgaaactttggtaaagttttgggctttgatgtgaatattgatgttccaaacctgagtgttcttcaagagggattgctaaatataggggacagcatgggtgaagtacaagacttgcttgtgaggctcctctcagctgctgtatgtgatccaggtctaataacaggatacaaggctaaaacagctcttggagaacatttgctgaatgttggtgtgaatcgagacaatgtttccgagattttacagatatttatggaagcccactgtggacaaactgagcttactgaaagtctgaagaccaaagcttttcaggctcacactccagcacagaaagcttcagtcctggctttcctgatcaatgaactggcatgcagcaagagtgtggtcagtgaaatcgacaagaacattgattatatgtcaaacttgaggagagataaatgggtggtagaaggtaaactccgcaagctcagaatcattcatgctaagaaaacaggcaaaagagacacttcaggtggcattgatctgggagaagagcagcatcccttgggcacacccactccaggacgcaagcgaagaaggaagggaggagacagtgattatgacgatgatgatgacgatgacagtgatgaccaaggggatgaagatgatgaggatgaagaagataaagaagacaaaaaaggaaaaaagactgatatctgtgaagatgaggatgaaggtgaccaagcagcaagtgttgaagagctggaaaaacagattgaaaaactgagtaaacaacagagtcagtacagaaggaagctctttgatgcgtctcactcattgcgttcagtgatgtttggccaagatcgttacagacgccggtactggattcttccccaatgtggggggatttttgtagaaggcatggagagtggtgaaggactagaagaaattgcaaaagaaagagaaaaactgaaaaaggcagaaagtgtccagatcaaagaagaaatgtttgagacttctggggacagtttaaattgttcaaatacagatcactgtgaacaaaaggaagatcttaaagaaaaagataacacaaatctattccttcagaaacctggctctttttccaaattaagcaagcttttggaagtagctaagatgcctcctgagtcagaggttatgacccccaaaccaaatgctggtgcaaatgggtgcacgttgtcttatcagaacagtggaaaacattcactgggcagcgttcagtcaacagcaacgcaaagcaatgtggaaaaggcagactctaataatctgtttaatactggttcaagtggtccagggaagttctacagtcctctccccaatgaccagttactaaaaacgctgactgaaaagaatagacaatggtttagtcttttgccacgaacaccctgtgatgacacttcacttactcatgccgatatgtcaactgcttctttggtgactcctcagtctcagccaccatctaagtcaccttcacctaccccagctcctcttggatcttctgctcagaatcctgttggcttaaatccatttgctttatcacctcttcaggtgaaaggtggagtatctatgatgggacttcagttttgtggatggcccactggtgtggttacttctaatattccatttacatcatctgtacctagtctaggatcggggttagggttatcagaaggaaatggtaattcattcttgacttccaatgttgcttcaagtaaaagtgaatctccagtaccacagaatgaaaaggccacttcagctcaacctgcagctgttgaagtagcaaaaccagtagattttcctagtccaaaacctattccagaagaaatgcagtttggttggtggagaattattgacccagaggacctaaaagctttgctcaaagtgctgcatctcagaggaataagagaaaaggcattacaaaaacaaattcagaaacatttggattatattactcaagcctgcctcaagaataaggatgttgctattattgaactgaatgaaaatgaagaaaaccaagtaactcgagatattgtggagaactggtcagtagaagaacaagcaatggaaatggatttgagtgtccttcaacaggtagaagatctagaaaggagagttgcatcagcaagtttgcaagtgaagggttggatgtgtccagagcctgcatcagaaagggaggacttggtatattttgaacataaatcatttactaaattgtgcaaggagcatgatggagaatttactggcgaagacgaaagcagtgcacatgcactagaacggaagagtgacaaccccctagatatagctgtaaccaggctggctgatttggagcggaacattgaaagaagaattgaagaggatattgctccagggctcagggtatggagaagggcattatcagaagctcgcagtgctgcacaggtagctctgtgcattcagcaattacagaaatcaatagcatgggaaaaatcaattatgaaagtttactgccaaatctgtcgaaagggagataatgaagaactgcttcttctttgtgatggctgtgacaaaggctgtcatacctactgccatagacccaagattacaacaatcccagatggagactggttttgtccagcttgcattgctaaggcaagtggtcaaactctaaaaatcaaaaaacttcatgtcaaaggaaaaaagactaatgagtcaaagaaaggcaagaaggtaactttaacaggagatactgaagatgaagactctgcatctacaagtagttcactaaaaagaggaaacaaagacctcaagaaaagaaaaatggaggaaaacacttctattaacttgtcaaaacaagaaagttttacttcagttaagaaacctaaaagagatgactccaaggacctagctctttgcagtatgattctgactgaaatggaaactcatgaggatgcatggccttttctacttcctgtaaacttgaaacttgttcctggttataagaaagttattaagaagcctatggatttttccacaattagagagaaactaagtagtggacagtatccaaaccttgaaacctttgctctagatgtcaggcttgtttttgacaactgtgaaacatttaatgaagatgattctgatataggcagagctggccacaatatgaggaagtattttgaaaaaaagtggacagatactttcaaagtgagctagtaatgaactagtccgtaacttgaaagtatttcgatttcttggctttatatatcttgtggaaaggacgaaaggttcgcgatccacaggaggtc

SEQ ID NO: 1698 - DNA, 6608 bp, Homo sapiens
  source 1..6608: mol_type = genomic DNA
accgccaccatggagtctggagaacggttaccatcctcagcagcctcctctactacaccaacttcatcttcgacaccttctgtggcttcagtagtttcaaaaggtggcctttccactggagttgcttcacttagctctacaatcaacccatgtggacatttattcagaacagctggggatcaaccgtttaacctgtccacagtgtcgagtgccttcccaatggtcagccacccagtctttggtctacattcagccagctcagggcattcagaatttggtggtttggggacacttggtacacccacagccttagccgcacatccccaactagcatcttttccaggtgcagaatggtggcgaacaactgatgctcatactcgtacaggagcaaccttctttccaccattactgggaattccaccactatttgctcccccagcccagaatcatgattcttcttcattccattcaaggacttcgggaaaaagtaatcgaaatggtcccgaaaaaggtgtaaatgggtcaataaatggaagtaatacatcatctgtaattggtatcaacacatctgtactatccactactgcttcaagttccatgggacaaactaaaagtacaagctcaggtggaggaaatcgaaaatgtaatcaggaacaaagcaaaaaccagcctttggatgctagagttgacaaaatcaaagataagaaaccaaggaagaaagcaatggaaagttctagcaacagtgatagtgattcaggcacatcatcagacacctcaagtgaaggcattagtagcagtgattcagatgatctagaagaagatgaagaagaagaagatcaaagtattgaagaaagtgaagatgatgattctgattcagagagtgaagcacaacataaaagtaacaaccaggtgctattacatggtatttcagacccaaaagcagatggacagaaagcaactgaaaaagcccaggaaaaaagaatacaccagccattacctcttgcgtctgaatcccagactcactcattccaatcccagcagaagcagcctcaggttttgtcacagcagcttccatttattttccaaagctctcaggcaaaggaggaatctgtgaacaaacacaccagtgtaatacagtctacgggattggtgtccaatgtgaaacctttatctttggtaaatcaagccaaaaaggaaacttacatgaaactcatagttccttctcctgatgttcttaaagcagggaataaaaatacctctgaagaatctagtttattgaccagtgaattgagatccaaacgggaacaatataaacaggcattcccatcacagttaaagaaacaagagtcatcgaagagcctgaagaaggttattgcagctttgtcaaatccaaaagcaacctctagttcaccagcacatccaaaacaaacattagaaaacaaccacccaaatccattcttgacaaatgcacttttaggtaatcaccaaccaaatggagttattcaaagtgtcattcaagaagctcctctagcacttactaccaaaactaaaatgcagagcaagattaatgaaaacattgctgctgcaagtagcacccctttttcctcacctgtaaatctgagtacaagtgggagaagaacccctggcaatcagacacctgtaatgccctctgcctctcccatcctgcatagtcaagggaaggaaaaagcagttagcaataatgtaaacccagtaaaaacacagcatcactcccatcctgcaaaatctttagtggaacaattcagaggaacagattcagacattcccagtagtaaagattctgaagattcaaatgaggatgaagaggaagatgatgaagaagaagatgaggaagatgatgaagatgatgaatctgatgacagccaatcagaatcagatagtaattcagaatcagatacagaaggatcagaagaagaagatgatgatgataaagaccaagatgaatcagatagtgatactgaaggagagaaaacttcaatgaaactgaataaaacaacttcctctgtcaaaagcccttccatgagtctcacaggtcactcaacacctcgtaacctccacatagcaaaagccccaggctctgctcctgctgccttatgttctgaatcccagtcacctgcttttcttggtacatcttcttccacacttacttcaagcccacactctggcacttccaaaagaagaagagtaacagatgaacgtgaactgcgtattccattggaatatggctggcagagagagacaagaataagaaactttggagggcgccttcaaggagaagtagcatattatgctccatgtggaaagaaacttaggcagtaccctgaagtaataaagtatctcagcagaaatggaataatggatatctcaagggacaatttcagcttcagtgcaaaaataagagtgggtgacttctatgaagccagagatggaccgcagggaatgcagtggtgtcttttgaaagaagaggatgtcattcctcgtatcagggcaatggaaggtcgtagaggaagaccaccaaatccagatagacaacgagcaagagaggaatccaggatgagacgtcggaaaggtcgacctccaaatgttggcaatgctgaattcctagataacgcagatgcaaagttgctaagaaaactgcaagctcaagaaatagccaggcaagcagcacaaataaagcttttgagaaaacttcaaaagcaggaacaggctcgggttgctaaagaagccaaaaaacaacaagcaataatggctgctgaggagaagcggaagcaaaaagaacagataaagattatgaaacagcaggaaaaaattaagagaatacagcaaatcagaatggaaaaagaacttcgagctcagcaaattctagaggctaaaaagaaaaagaaggaagaagcggcaaatgccaaattattggaggccgagaaacgaataaaggaaaaagaaatgagaagacaacaagctgttcttctgaaacatcaggaacgagagcgaaggcgacaacacatgatgcttatgaaagctatggaagctcgtaaaaaagcagaagaaaaagagcggttgaaacaagaaaaacgtgatgagaaaagattaaataaagagcgtaaactagagcagcgaagattagaattagaaatggcaaaggaactaaagaagcctaatgaagacatgtgcttagcagaccaaaagcctttgccagagttgcctcgtattccaggacttgttctctctggaagtacattttcagactgtctcatggtggtgcagttcttacgaaactttggtaaagttttgggctttgatgtgaatattgatgttccaaacctgagtgttcttcaagagggattgctaaatataggggacagcatgggtgaagtacaagacttgcttgtgaggctcctctcagctgctgtatgtgatccaggtctaataacaggatacaaggctaaaacagctcttggagaacatttgctgaatgttggtgtgaatcgagacaatgtttccgagattttacagatatttatggaagcccactgtggacaaactgagcttactgaaagtctgaagaccaaagcttttcaggctcacactccagcacagaaagcttcagtcctggctttcctgatcaatgaactggcatgcagcaagagtgtggtcagtgaaatcgacaagaacattgattatatgtcaaacttgaggagagataaatgggtggtagaaggtaaactccgcaagctcagaatcattcatgctaagaaaacaggcaaaagagacacttcaggtggcattgatctgggagaagagcagcatcccttgggcacacccactccaggacgcaagcgaagaaggaagggaggagacagtgattatgacgatgatgatgacgatgacagtgatgaccaaggggatgaagatgatgaggatgaagaagataaagaagacaaaaaaggaaaaaagactgatatctgtgaagatgaggatgaaggtgaccaagcagcaagtgttgaagagctggaaaaacagattgaaaaactgagtaaacaacagagtcagtacagaaggaagctctttgatgcgtctcactcattgcgttcagtgatgtttggccaagatcgttacagacgccggtactggattcttccccaatgtggggggatttttgtagaaggcatggagagtggtgaaggactagaagaaattgcaaaagaaagagaaaaactgaaaaaggcagaaagtgtccagatcaaagaagaaatgtttgagacttctggggacagtttaaattgttcaaatacagatcactgtgaacaaaaggaagatcttaaagaaaaagataacacaaatctattccttcagaaacctggctctttttccaaattaagcaagcttttggaagtagctaagatgcctcctgagtcagaggttatgacccccaaaccaaatgctggtgcaaatgggtgcacgttgtcttatcagaacagtggaaaacattcactgggcagcgttcagtcaacagcaacgcaaagcaatgtggaaaaggcagactctaataatctgtttaatactggttcaagtggtccagggaagttctacagtcctctccccaatgaccagttactaaaaacgctgactgaaaagaatagacaatggtttagtcttttgccacgaacaccctgtgatgacacttcacttactcatgccgatatgtcaactgcttctttggtgactcctcagtctcagccaccatctaagtcaccttcacctaccccagctcctcttggatcttctgctcagaatcctgttggcttaaatccatttgctttatcacctcttcaggtgaaaggtggagtatctatgatgggacttcagttttgtggatggcccactggtgtggttacttctaatattccatttacatcatctgtacctagtctaggatcggggttagggttatcagaaggaaatggtaattcattcttgacttccaatgttgcttcaagtaaaagtgaatctccagtaccacagaatgaaaaggccacttcagctcaacctgcagctgttgaagtagcaaaaccagtagattttcctagtccaaaacctattccagaagaaatgcagtttggttggtggagaattattgacccagaggacctaaaagctttgctcaaagtgctgcatctcagaggaataagagaaaaggcattacaaaaacaaattcagaaacatttggattatattactcaagcctgcctcaagaataaggatgttgctattattgaactgaatgaaaatgaagaaaaccaagtaactcgagatattgtggagaactggtcagtagaagaacaagcaatggaaatggatttgagtgtccttcaacaggtagaagatctagaaaggagagttgcatcagcaagtttgcaagtgaagggttggatgtgtccagagcctgcatcagaaagggaggacttggtatattttgaacataaatcatttactaaattgtgcaaggagcatgatggagaatttactggcgaagacgaaagcagtgcacatgcactagaacggaagagtgacaaccccctagatatagctgtaaccaggctggctgatttggagcggaacattgaaagaagaattgaagaggatattgctccagggctcagggtatggagaagggcattatcagaagctcgcagtgctgcacaggtagctctgtgcattcagcaattacagaaatcaatagcatgggaaaaatcaattatgaaagtttactgccaaatctgtcgaaagggagataatgaagaactgcttcttctttgtgatggctgtgacaaaggctgtcatacctactgccatagacccaagattacaacaatcccagatggagactggttttgtccagcttgcattgctaaggcaagtggtcaaactctaaaaatcaaaaaacttcatgtcaaaggaaaaaagactaatgagtcaaagaaaggcaagaaggtaactttaacaggagatactgaagatgaagactctgcatctacaagtagttcactaaaaagaggaaacaaagacctcaagaaaagaaaaatggaggaaaacacttctattaacttgtcaaaacaagaaagttttacttcagttaagaaacctaaaagagatgactccaaggacctagctctttgcagtatgattctgactgaaatggaaactcatgaggatgcatggccttttctacttcctgtaaacttgaaacttgttcctggttataagaaagttattaagaagcctatggatttttccacaattagagagaaactaagtagtggacagtatccaaaccttgaaacctttgctctagatgtcaggcttgtttttgacaactgtgaaacatttaatgaagatgattctgatataggcagagctggccacaatatgaggaagtattttgaaaaaaagtggacagatactttcaaagtgagctagtaatgaactagtccgtaacttgaaagtatttcgatttcttggctttatatatcttgtggaaaggacgagttaagcactgtaatacaaacgct

SEQ ID NO: 1699 - DNA, 1331 bp, Homo sapiens
  source 1..1331: mol_type = genomic DNA
accgccaccatgatagatctttggttgtacagttatcagagactattacagacgattgctgtactcgaggctcagcgttctcaagcagtccaagaccttgaaagtttaggcaggcaccagagagaagcactgaaaaatcccattggatttgtggaaaaactccagaagaaggctgatattgggcttccatatccacagagagttgttcaattgcctgagatcgtatgggaccaatatacccatagccttgggaattttgaaagagaatttaaaaatcgtaaaagacatactagaagagttaagctagtttttgataaagtaggtttacctgctagaccaaaaagtcctttagatcctaagaaggatggagagtccctttcatattctatgttgcctttgagtgatggtccagaaggctcaagcagtcgtcctcagatgataagaggacgcttgtgtgatgataccaaacctgaaacatttaaccagttgtggactgttgaagaacagaaaaagctggaacagctactcatcaaataccctcctgaagaagtagaatctcgacgctggcagaagatagcagatgaattgggcaacaggacagcaaaacaggttgccagccgagtacagaagtatttcataaagctaactaaagctggcattccagtaccaggcagaacaccaaacttatatatatactccaaaaagtcttcaacaagcagacgacagcaccctcttaataagcatctctttaagccttccactttcatgacttcacatgaaccgccagtgtatatggatgaagatgatgaccgatcttgttttcatagccacatgaacactgctgttgaagatgcatcagatgacgaaagtattcctatcatgtataggaatttacctgaatataaagaactattacagtttaaaaagttaaagaagcagaaacttcagcaaatgcaagctgaaagtggatttgtgcaacatgtgggctttaagtgtgataactgtggcatagaacccatccagggtgttcggtggcattgccaggattgtcctccagaaatgtctttggatttctgtgattcttgttcagactgtctacatgaaacagatattcacaaggaagatcaccaattagaacctatttataggtcagagacattcttagacagagactactgtgtgtctcagggcaccagttacaattaccttgacccaaactactttccagcaaacagatagtaatgaactagtccgtaacttgaaagtatttcgatttcttggctttatatatcttgtggaaaggacgaaggccagtccgtgaagccacgcat

SEQ ID NO: 1700 - DNA, 2813 bp, Homo sapiens
  source 1..2813: mol_type = genomic DNA
accgccaccatggctgcttcccgatctactcgtgttacaagatcaacagtggggttaaacggcttggatgaatctttttgtggtagaactttaaggaatcgtagcattgcgcatcctgaagaaatctcttctaattctcaagtacgatcaagatcaccaaagaagagaccagagcctgtgccaattcagaaaggaaataataatgggagaaccactgatttaaaacagcagagtacccgagaatcatgggtaagccctaggaaaagaggactttcttcttcagaaaaggataacatagaaaggcaggctatagaaaattgtgagagaaggcaaacagaacctgtttcaccagttttaaaaagaattaagcgttgtcttagatctgaagcaccaaacagttcagaagaagattctcctataaaatcagacaaggagtcagtagaacagaggagtacagtagtggacaatgatgcagattttcaagggactaaacgagcttgtcgatgtcttatactggatgattgtgagaaaagggaaattaaaaaggtgaatgtcagtgaggaagggccacttaattctgcagtagttgaagaaatcacaggctatttggctgtcaatggtgttgatgacagtgattcagctgttataaactgtgatgactgtcagcctgatgggaacactaaacaaaatagcattggttcctatgtgttacaggaaaaatcagtagctgaaaatggggatacggatacccaaacttcaatgttccttgatagtaggaaggaggacagttatatagaccataaggtgccttgcacagattcacaagtgcaggtcaagttggaggaccacaaaatagtaactgcctgcttgcctgtggaacatgttaatcagctgactactgagccagctacagggcccttttctgaaactcagtcatctttaagggattctgaggaggaagtagatgtggtgggagatagcagtgcctcaaaagagcagtgtaaagaaaacaccaataacgaactggacacaagtcttgagagtatgccagcctccggagaacctgaaccatctcctgttctagactgtgtttcagctcaaatgatgtctttatcagaacctcaagaacatcgttatactctgagaacctcaccacgaagggcagcccctaccagaggtagtcccactaaaaacagttctccttacagagaaaatggacaatttgaggagaataatcttagtcctaatgaaacaaatgcaactgttagtgataatgtaagtcaatctcctacaaatcctggtgaaatttctcaaaatgaaaaagggatatgttgtgactctcaaaataatggaagtgaaggagtaagtaaaccaccctcagaggcaagactcaatattggacatttgccatctgccaaagagagtgccagtcagcacattacagaagaggaagatgatgatcctgatgtttattactttgaatcagatcatgtggcactgaaacacaacaaagattatcagagactattacagacgattgctgtactcgaggctcagcgttctcaagcagtccaagaccttgaaagtttaggcaggcaccagagagaagcactgaaaaatcccattggatttgtggaaaaactccagaagaaggctgatattgggcttccatatccacagagagttgttcaattgcctgagatcgtatgggaccaatatacccatagccttgggaattttgaaagagaatttaaaaatcgtaaaagacatactagaagagttaagctagtttttgataaagtaggtttacctgctagaccaaaaagtcctttagatcctaagaaggatggagagtccctttcatattctatgttgcctttgagtgatggtccagaaggctcaagcagtcgtcctcagatgataagaggacgcttgtgtgatgataccaaacctgaaacatttaaccagttgtggactgttgaagaacagaaaaagctggaacagctactcatcaaataccctcctgaagaagtagaatctcgacgctggcagaagatagcagatgaattgggcaacaggacagcaaaacaggttgccagccgagtacagaagtatttcataaagctaactaaagctggcattccagtaccaggcagaacaccaaacttatatatatactccaaaaagtcttcaacaagcagacgacagcaccctcttaataagcatctctttaagccttccactttcatgacttcacatgaaccgccagtgtatatggatgaagatgatgaccgatcttgttttcatagccacatgaacactgctgttgaagatgcatcagatgacgaaagtattcctatcatgtataggaatttacctgaatataaagaactattacagtttaaaaagttaaagaagcagaaacttcagcaaatgcaagctgaaagtggatttgtgcaacatgtgggctttaagtgtgataactgtggcatagaacccatccagggtgttcggtggcattgccaggattgtcctccagaaatgtctttggatttctgtgattcttgttcagactgtctacatgaaacagatattcacaaggaagatcaccaattagaacctatttataggtcagagacattcttagacagagactactgtgtgtctcagggcaccagttacaattaccttgacccaaactactttccagcaaacagatagtaatgaactagtccgtaacttgaaagtatttcgatttcttggctttatatatcttgtggaaaggacgacaagcttgttacgagatgttacct

SEQ ID NO: 1701 - DNA, 1016 bp, Homo sapiens
  source 1..1016: mol_type = genomic DNA
accgccaccatgtcgcgctccttctatgtcgactcgctcatcatcaaggacacctcacggcctgcgccctcgctgcctgaaccgcaccccgggccggatttcttcatcccgcttggcatgccgcccccattggtgatgtccgtgtccggccccggctgcccgtcccgcaagagcggcgcgttctgcgtgtgccctctctgcgtcacttcgcacctgcactcctctcgggggtctgtgggcgccggcagcgggggcgcaggggccggggttaccggggccggaggcagtggggtggcaggggccgcaggggcactgcctctgcttaagggccagttctcttcggctcctggggacgcgcagttttgcccgcgggtgaaccatgcgcatcatcaccaccacccgccgcagcaccaccatcaccatcatcagccccagcagcctggctcggccgcggcggcggcagcagcagcagcggcggcggcggccgcggcggccttggggcacccgcagcaccacgcacctgtctgcaccgccaccacctacaacgtggcggacccgcggagattccactgcctcaccatgggaggctctgacgccagccaggtacccaatggcaagaggatgaggacggcgttcactagcacgcaactcctggagctggagagagaattctcttccaacatgtacctgtctcgactccggaggattgaaatcgccacttacctgaacctgtcggagaagcaggtgaaaatctggtttcagaaccgccgagtgaagcacaagaaggaggggaagggcacgcagaggaacagtcacgcgggctgcaagtgcgtcgggagccaggtgcactacgcgcgctccgaggatgaggactccctgtcgccggcctcagccaacgatgacaaggagatttcccccttatagtaatgaactagtccgtaacttgaaagtatttcgatttcttggctttatatatcttgtggaaaggacgattgatgtccgaagtaactctaaag

SEQ ID NO: 1702 - DNA, 1019 bp, Homo sapiens
  source 1..1019: mol_type = genomic DNA
accgccaccatggaccgtttgggttcctttagcaatgatccctctgataagccaccttgccgaggctgctcctcctacctcatggagccttatatcaagtgtgctgaatgtgggccacctccttttttcctctgcttgcagtgtttcactcgaggctttgagtacaagaaacatcaaagcgatcatacttatgaaataatgacttcagattttcctgtccttgatcccagctggactgctcaagaagaaatggcccttttagaagctgtgatggactgtggctttggaaattggcaggatgtagccaatcaaatgtgcaccaagaccaaggaggagtgtgagaagcactatatgaagcatttcatcaataaccctctgtttgcatctaccctgctgaacctgaaacaagcagaggaagcaaaaactgctgacacagccattccatttcactctacagatgaccctccccgacctacctttgactccttgctttctcgggacatggccgggtacatgccagctcgagcagatttcattgaggaatttgacaattatgcagaatgggacttgagagacattgattttgttgaagatgactcggacattttacatgctctgaagatggctgtggtagatatctatcattccaggttaaaggagagacaaagacgaaaaaaaattataagagaccatggattaatcaaccttagaaagtttcaattaatggaacggcggtatcccaaggaggtccaggacctgtatgaaacaatgaggcgatttgcaagaattgtggggccagtggaacatgacaaattcattgaaagccatgcatgtaggtggtttttgagccttgagcagtatttgtgtgtgtatatttatataaataggagagataatggtgtgttttatgtgaagttctataaatagtaatgaactagtccgtaacttgaaagtatttcgatttcttggctttatatatcttgtggaaaggacgaatgtcccttgggttagagtagagg

SEQ ID NO: 1703 - DNA, 1433 bp, Homo sapiens
  source 1..1433: mol_type = genomic DNA
accgccaccatggaccgtttgggttcctttagcaatgatccctctgataagccaccttgccgaggctgctcctcctacctcatggagccttatatcaagtgtgctgaatgtgggccacctccttttttcctctgcttgcagtgtttcactcgaggctttgagtacaagaaacatcaaagcgatcatacttatgaaataatgacttcagattttcctgtccttgatcccagctggactgctcaagaagaaatggcccttttagaagctgtgatggactgtggctttggaaattggcaggatgtagccaatcaaatgtgcaccaagaccaaggaggagtgtgagaagcactatatgaagcatttcatcaataaccctctgtttgcatctaccctgctgaacctgaaacaagcagaggaagcaaaaactgctgacacagccattccatttcactctacagatgaccctccccgacctacctttgactccttgctttctcgggacatggccgggtacatgccagctcgagcagatttcattgaggaatttgacaattatgcagaatgggacttgagagacattgattttgttgaagatgactcggacattttacatgctctgaagatggctgtggtagatatctatcattccaggttaaaggagagacaaagacgaaaaaaaattataagagaccatggattaatcaaccttagaaagtttcaattaatggaacggcggtatcccaaggaggtccaggacctgtatgaaacaatgaggcgatttgcaagaattgtggggccagtggaacatgacaaattcattgaaagccatgcattggaatttgaactccgaagggaaatcaagaggctccaagaatacaggacagcaggcattaccaatttttgtagtgccagaacctacgatcacctcaagaagacacgggaggaagagcgccttaaacgcactatgctctcagaagttctccagtatatccaggacagtagtgcttgccagcagtggctccgccggcaagctgacattgattccggcctgagtccttccattccaatggcttcgaattcaggtagacggagtgcaccacccttgaacctcactggcctccctggcacagagaagctgaatgaaaaagaaaaggagctctgtcagatggtgaggttggtccctggagcctatttagaatacaaatctgctctattgaacgaatgtaacaagcaaggaggcttaagactggcgcaggcaagagcactcatcaagatagatgtgaacaaaacccggaaaatctatgatttcctcatcagagaaggatacatcactaaaggctagtaatgaactagtccgtaacttgaaagtatttcgatttcttggctttatatatcttgtggaaaggacgaattacaagccgtaggatgcctgct

SEQ ID NO: 1704 - DNA, 1364 bp, Homo sapiens
  source 1..1364: mol_type = genomic DNA
accgccaccatggcggagctggggaagaagtactgcgtgtactgcctggccgaggtgagcccgctgcgcttccgctgcaccgagtgccaggacatcgagctgtgccccgagtgcttctcggccggcgccgagatcggccaccaccgccgctaccacggctaccagctggtggacggcgggcgcttcacgctctgggggcccgaggccgagggcggctggaccagtcgcgaggagcagctgctgctggacgccatcgagcagttcggcttcggaaactgggaagatatggctgcccacgttggtgcttcccggactccccaagaggtgatggagcattacgtgagcatgtacatccacgggaacctggggaaggcctgcatccccgacaccatccccaaccgcgtgacagaccacacctgtcccagcggaggccccctctcacccagcctcaccaccccgctgcccccgctggacatctctgtggctgagcagcagcagctgggctacatgccgctgcgggatgattacgagatcgagtatgaccaggatgccgagacgctcatcagcgggctctctgtcaactatgatgacgacgacgtggagatcgagctgaagcgcgcccacgtggacatgtacgtgcggaagctgaaagagagacagcggcggaagaacatcgcccgtgactacaatctggtgccagccttcctggggaaggacaagaaggagaaggaaaaggcgctgaagcgcaagatcaccaaggaggagaaggagctgcgcctgaagctgaggccgctgtaccagttcatgtcatgcaaggagtttgatgacctttttgaaaacatgcacaaagaaaaaatgctccgggccaagatccgagaactgcagcggtaccggcgaaacgggatcaccaagatggaagagtcggcagagtacgaggcagcgcggcataaacgggagaagaggaaggagaacaaaaacctagccggctccaaacggggaaaggaggacggcaaagacagcgagttcgccgccattgagaaccttccaggcttcgagctcctgtcagatcgcgagaaggtgctctgcagctctttaaacttgagtccagcccgctacgtgactgtgaagactattataattaaagaccacctccagaagcggcaaggaatcccctccaaaagccgccttcctagctacctggacaaagtcctaaagaaaaggattttgaatttcctcacagaaagcggctggatctccagggacgcgtcttagtaatgaactagtccgtaacttgaaagtatttcgatttcttggctttatatatcttgtggaaaggacgaccactctaaatccagatcctcctt

SEQ ID NO: 1705 - DNA, 896 bp, Homo sapiens
  source 1..896: mol_type = genomic DNA
accgccaccatgccgcgctccttcctggtggactcgctagtgctgcgcgaggcgggcgagaagaaggcgcccgagggcagcccgccgccgctcttcccctacgctgtgcccccgccgcacgcgctgcacggtctctcgcctggcgcctgccacgcgcgcaaggctgggctgctgtgcgtgtgcccgctctgcgtcaccgcctcgcagctgcatgggccccccgggccgcccgcgctgcctctactcaaggcttccttcccacccttcggctcgcagtactgccacgcgcccctgggccgccagcactctgctgtgtcgcccggggtcgctcacggcccggccgccgctgctgctgccgccgcgctctaccagacctcctacccgctgcctgaccccaggcagttccactgcatctctgtggacagcagctctaaccagctgcccagcagcaagaggatgcgcacggctttcaccagcacgcagctgctagagctggagcgcgagttcgcttctaatatgtacctgtcccgcctacgtcgcatcgagatcgcgacctacctgaatctgtccgagaagcaggtgaagatctggtttcagaaccgccgagtgaagcacaagaaggagggcaagggcagcaaccatcgtggcggcggcggcgggggtgccggtggtggcgggagcgcaccgcaaggctgcaagtgcgcatcgctctcctcagccaagtgctccgaggatgacgacgaattgcccatgtctccgtcctcctcagggaaggacgaccgggatcttacggtcactccctagtaatgaactagtccgtaacttgaaagtatttcgatttcttggctttatatatcttgtggaaaggacgaacatagatcacttctaactatggg

SEQ ID NO: 1706 - DNA, 1724 bp, Homo sapiens
  source 1..1724: mol_type = genomic DNA
accgccaccatggaactcttaacattcagggatgtggccatagaattctctccagaagagtggaaatgcctagaccctgcccaacagaatttatatagagatgtgatgttggagaactacagaaacctcgtctccctggctgtgtattcttattacaaccaaggcattttaccagagcaaggcatacaagattcattcaaaaaagcaacactgggaagatatgggagctgtggccttgaaaatatatgcttatggaaaaactgggaaagtataggtgaaggtgaaggacaaaaggaatgttataatctatgtagccaatatttgacaactagtcataacaaacatttaactgtgaaaggagacaaagaatatagaatatttcagaagaagcctcagtttctgtcagctgctcctacagaaccatgtattcctatgaataaatatcaacataaatttttgaaatctgtcttttgtaataaaaatcagataaattttaaccatgactcaaatattagtaaacatcatagtactcattttctagaaaactattacaattgtaatgaatgtgaaaaagtattttaccaatcctcaaagcttattttccctgaaaatatccatattcaaaaaaagccttacaactctaatgaatgtggtgaaacttctgacccattctcaaagcttactcaacatcaaagaatttatattggagagagctcacaaagatgtaataaaaaatgtataatagtctttagtcaatcacatctaaagggacataagataattaacactggagaaaaatcagtgaaatataaagaacgtggcaaagcttttaccaggggcttacatcttggacatcagaaaattcatactggagagaaaccttacaaatgtaaaaaatgtgacaaagcctttaacaagagttcacaccttgctcaacatcagagaatccatactggagagaagcctttcaagtgtaaggaatgtggcaaagcttttaacagaggctcataccttactcaacatcagagaatccatactggagagagagctttcaaatgtgaagaatgtggcaaagcctttaacagggggtcataccttactcaacaccagagaatccataccggagagaaacctttcagatgtaaggaatgtggcaaagcctttaatagaagctcatacgttactcagcatcagagaatgcatactggagagaaacctttcaagtgtaaggaatgtggcaaagcttttaacagagcttcacaccttactcaacatcagagaatccatactggagagaaacacttcaaatgtaaagaatgtggcaaagcctttaacaggggctcacaccttactcgacatcaaagaatccatactggagagaagtctttcaaatgtgaagaatgtggcaaagcttttatctggggctcacaccttactcaacatcagagagtccatactggagagaaattcttcaaatgtaaagaatgtggcaaagcttttaccaggagctcacaccttactcaacatcagagaattcatactggagagaaacctttcaaatgtaaagaatgtggcaaagcttttaacagacgctcaacccttactcaacatcaaataattcataccaggtagtaatgaactagtccgtaacttgaaagtatttcgatttcttggctttatatatcttgtggaaaggacgagatgtcgtgctgtgaaatatcgcg

SEQ ID NO: 1707 - DNA, 1883 bp, Homo sapiens
  source 1..1883: mol_type = genomic DNA
accgccaccatggccgcgcacaggccggtggaatgggtccaggccgtggtcagccgcttcgacgagcagcttccaataaaaacaggacagcagaacacacataccaaagtcagtactgagcacaacaaggaatgtctaatcaatatttccaaatacaagttttctttggttataagcggcctcactactattttaaagaatgttaacaatatgagaatatttggagaagctgctgaaaaaaatttatatctctctcagttgattatattggatacactggaaaaatgtcttgctgggcaaccaaaggacacaatgagattagatgaaacgatgctggtcaaacagttgctgccagaaatctgccattttcttcacacctgtcgtgaaggaaaccagcatgcagctgaacttcggaattctgcctctggggttttattttctctcagctgcaacaacttcaatgcagtctttagtcgcatttctaccaggttacaggaattaactgtttgttcagaagacaatgttgatgttcatgatatagaattgttacagtatatcaatgtggattgtgcaaaattaaaacgactcctgaaggaaacagcatttaaatttaaagccctaaagaaggttgcgcagttagcagttataaatagcctggaaaaggcattttggaactgggtagaaaattatccagatgaatttacaaaactgtaccagatcccacagactgatatggctgaatgtgcagaaaagctatttgacttggtggatggttttgctgaaagcaccaaacgtaaagcagcagtttggccactacaaatcattctccttatcttgtgtccagaaataatccaggatatatccaaagacgtggttgatgaaaacaacatgaataagaagttatttctggacagtctacgaaaagctcttgctggccatggaggaagtaggcagctgacagaaagtgctgcaattgcctgtgtcaaactgtgtaaagcaagtacttacatcaattgggaagataactctgtcattttcctacttgttcagtccatggtggttgatcttaagaacctgctttttaatccaagtaagccattctcaagaggcagtcagcctgcagatgtggatctaatgattgactgccttgtttcttgctttcgtataagccctcacaacaaccaacactttaagatctgcctggctcagaattcaccttctacatttcactatgtgctggtaaattcactccatcgaatcatcaccaattccgcattggattggtggcctaagattgatgctgtgtattgtcactcggttgaacttcgaaatatgtttggtgaaacacttcataaagcagtgcaaggttgtggagcacacccagcaatacgaatggcaccgagtcttacatttaaagaaaaagtaacaagccttaaatttaaagaaaaacctacagacctggagacaagaagctataagtatcttctcttgtccatggtgaaactaattcatgcagatccaaagctcttgctttgtaatccaagaaaacaggggcccgaaacccaaggcagtacagcagaattaattacagggctcgtccaactggtccctcagtcacacatgccagagattgctcaggaagcaatggaggctctgctggttcttcatcagttagatagcattgatttgtggaatcctgatgctcctgtagaaacattttgggagattaggtatatgtacttttattttttaaattcaacttttaaattttattttgtatttttgtcttagtaatgaactagtccgtaacttgaaagtatttcgatttcttggctttatatatcttgtggaaaggacgatcttagggactttcgacttcagtt

SEQ ID NO: 1708 - DNA, 8621 bp, Homo sapiens
  source 1..8621: mol_type = genomic DNA
accgccaccatggccgcgcacaggccggtggaatgggtccaggccgtggtcagccgcttcgacgagcagcttccaataaaaacaggacagcagaacacacataccaaagtcagtactgagcacaacaaggaatgtctaatcaatatttccaaatacaagttttctttggttataagcggcctcactactattttaaagaatgttaacaatatgagaatatttggagaagctgctgaaaaaaatttatatctctctcagttgattatattggatacactggaaaaatgtcttgctgggcaaccaaaggacacaatgagattagatgaaacgatgctggtcaaacagttgctgccagaaatctgccattttcttcacacctgtcgtgaaggaaaccagcatgcagctgaacttcggaattctgcctctggggttttattttctctcagctgcaacaacttcaatgcagtctttagtcgcatttctaccaggttacaggaattaactgtttgttcagaagacaatgttgatgttcatgatatagaattgttacagtatatcaatgtggattgtgcaaaattaaaacgactcctgaaggaaacagcatttaaatttaaagccctaaagaaggttgcgcagttagcagttataaatagcctggaaaaggcattttggaactgggtagaaaattatccagatgaatttacaaaactgtaccagatcccacagactgatatggctgaatgtgcagaaaagctatttgacttggtggatggttttgctgaaagcaccaaacgtaaagcagcagtttggccactacaaatcattctccttatcttgtgtccagaaataatccaggatatatccaaagacgtggttgatgaaaacaacatgaataagaagttatttctggacagtctacgaaaagctcttgctggccatggaggaagtaggcagctgacagaaagtgctgcaattgcctgtgtcaaactgtgtaaagcaagtacttacatcaattgggaagataactctgtcattttcctacttgttcagtccatggtggttgatcttaagaacctgctttttaatccaagtaagccattctcaagaggcagtcagcctgcagatgtggatctaatgattgactgccttgtttcttgctttcgtataagccctcacaacaaccaacactttaagatctgcctggctcagaattcaccttctacatttcactatgtgctggtaaattcactccatcgaatcatcaccaattccgcattggattggtggcctaagattgatgctgtgtattgtcactcggttgaacttcgaaatatgtttggtgaaacacttcataaagcagtgcaaggttgtggagcacacccagcaatacgaatggcaccgagtcttacatttaaagaaaaagtaacaagccttaaatttaaagaaaaacctacagacctggagacaagaagctataagtatcttctcttgtccatggtgaaactaattcatgcagatccaaagctcttgctttgtaatccaagaaaacaggggcccgaaacccaaggcagtacagcagaattaattacagggctcgtccaactggtccctcagtcacacatgccagagattgctcaggaagcaatggaggctctgctggttcttcatcagttagatagcattgatttgtggaatcctgatgctcctgtagaaacattttgggagattagctcacaaatgcttttttacatctgcaagaaattaactagtcatcaaatgcttagtagcacagaaattctcaagtggttgcgggaaatattgatctgcaggaataaatttcttcttaaaaataagcaggcagatagaagttcctgtcactttctccttttttacggggtaggatgtgatattccttctagtggaaataccagtcaaatgtccatggatcatgaagaattactacgtactcctggagcctctctccggaagggaaaagggaactcctctatggatagtgcagcaggatgcagcggaacccccccgatttgccgacaagcccagaccaaactagaagtggccctgtacatgtttctgtggaaccctgacactgaagctgttctggttgccatgtcctgtttccgccacctctgtgaggaagcagatatccggtgtggggtggatgaagtgtcagtgcataacctcttgcccaactataacacattcatggagtttgcctctgtcagcaatatgatgtcaacaggaagagcagcacttcagaaaagagtgatggcactgctgaggcgcattgagcatcccactgcaggaaacactgaggcttgggaagatacacatgcaaaatgggaacaagcaacaaagctaatccttaactatccaaaagccaaaatggaagatggccaggctgctgaaagccttcacaagaccattgttaagaggcgaatgtcccatgtgagtggaggaggatccatagatttgtctgacacagactccctacaggaatggatcaacatgactggcttcctttgtgcccttgggggagtgtgcctccagcagagaagcaattctggcctggcaacctatagcccacccatgggtccagtcagtgaacgtaagggttctatgatttcagtgatgtcttcagagggaaacgcagatacacctgtcagcaaatttatggatcggctgttgtccttaatggtgtgtaaccatgagaaagtgggacttcaaatacggaccaatgttaaggatctggtgggtctagaattgagtcctgctctgtatccaatgctatttaacaaattgaagaataccatcagcaagttttttgactcccaaggacaggttttattgactgataccaatactcaatttgtagaacaaaccatagctataatgaagaacttgctagataatcatactgaaggcagctctgaacatctagggcaagctagcattgaaacaatgatgttaaatctggtcaggtatgttcgtgtgcttgggaatatggtccatgcaattcaaataaaaacgaaactgtgtcaattagttgaagtaatgatggcaaggagagatgacctctcattttgccaagagatgaaatttaggaataagatggtagaatacctgacagactgggttatgggaacatcaaaccaagcagcagatgatgatgtaaaatgtcttacaagagatttggaccaggcaagcatggaagcagtagtttcacttctagctggtctccctctgcagcctgaagaaggagatggtgtggaattgatggaagccaaatcacagttatttcttaaatacttcacattatttatgaaccttttgaatgactgcagtgaagttgaagatgaaagtgcgcaaacaggtggcaggaaacgtggcatgtctcggaggctggcatcactgaggcactgtacggtccttgcaatgtcaaacttactcaatgccaacgtagacagtggtctcatgcactccataggcttaggttaccacaaggatctccagacaagagctacatttatggaagttctgacaaaaatccttcaacaaggcacagaatttgacacacttgcagaaacagtattggctgatcggtttgagagattggtggaactggtcacaatgatgggtgatcaaggagaactccctatagcgatggctctggccaatgtggttccttgttctcagtgggatgaactagctcgagttctggttactctgtttgattctcggcatttactctaccaactgctctggaacatgttttctaaagaagtagaattggcagactccatgcagactctcttccgaggcaacagcttggccagtaaaataatgacattctgtttcaaggtatatggtgctacctatctacaaaaactcctggatcctttattacgaattgtgatcacatcctctgattggcaacatgttagctttgaagtggatcctaccaggttagaaccatcagagagccttgaggaaaaccagcggaacctccttcagatgactgaaaagttcttccatgccatcatcagttcctcctcagaattcccccctcaacttcgaagtgtgtgccactgtttataccaggcaacttgccactccctactgaataaagctacagtaaaagaaaaaaaggaaaacaaaaaatcagtggttagccagcgtttccctcagaacagcatcggtgcagtaggaagtgccatgttcctcagatttatcaatcctgccattgtctcaccgtatgaagcagggattttagataaaaagccaccacctagaatcgaaaggggcttgaagttaatgtcaaagatacttcagagtattgccaatcatgttctcttcacaaaagaagaacatatgcggcctttcaatgattttgtgaaaagcaactttgatgcagcacgcaggtttttccttgatatagcatctgattgtcctacaagtgatgcagtaaatcatagtctttccttcataagtgacggcaatgtgcttgctttacatcgtctactctggaacaatcaggagaaaattgggcagtatctttccagcaacagggatcataaagctgttggaagacgaccttttgataagatggcaacacttcttgcatacctgggtcctccagagcacaaacctgtggcagatacacactggtccagccttaaccttaccagttcaaagtttgaggaatttatgactaggcatcaggtacatgaaaaagaagaattcaaggctttgaaaacgttaagtattttctaccaagctgggacttccaaagctgggaatcctattttttattatgttgcacggaggttcaaaactggtcaaatcaatggtgatttgctgatataccatgtcttactgactttaaagccatattatgcaaagccatatgaaattgtagtggaccttacccataccgggcctagcaatcgctttaaaacagactttctctctaagtggtttgttgtttttcctggctttgcttacgacaacgtctccgcagtctatatctataactgtaactcctgggtcagggagtacaccaagtatcatgagcggctgctgactggcctcaaaggtagcaaaaggcttgttttcatagactgtcctgggaaactggctgagcacatagagcatgaacaacagaaactacctgctgccaccttggctttagaagaggacctgaaggtattccacaatgctctcaagctagctcacaaagacaccaaagtttctattaaagttggttctactgctgtccaagtaacttcagcagagcgaacaaaagtcctagggcaatcagtctttctaaatgacatttattatgcttcggaaattgaagaaatctgcctagtagatgagaaccagttcaccttaaccattgcaaaccagggcacgccgctcaccttcatgcaccaggagtgtgaagccattgtccagtctatcattcatatccggacccgctgggaactgtcacagcccgactctatcccccaacacaccaagattcggccaaaagatgtccctgggacactgctcaatatcgcattacttaatttaggcagttctgacccgagtttacggtcagctgcctataatcttctgtgtgccttaacttgtacctttaatttaaaaatcgagggccagttactagagacatcaggtttatgtatccctgccaacaacaccctctttattgtctctattagtaagacactggcagccaatgagccacacctcacgttagaatttttggaagagtgtatttctggatttagcaaatctagtattgaattgaaacacctttgtttggaatacatgactccatggctgtcaaatctagttcgtttttgcaagcataatgatgatgccaaacgacaaagagttactgctattcttgacaagctgataacaatgaccatcaatgaaaaacagatgtacccatctattcaagcaaaaatatggggaagccttgggcagattacagatctgcttgatgttgtactagacagtttcatcaaaaccagtgcaacaggtggcttgggatcaataaaagctgaggtgatggcagatactgctgtagctttggcttctggaaatgtgaaattggtttcaagcaaggttattggaaggatgtgcaaaataattgacaagacatgcttatctccaactcctactttagaacaacatcttatgtgggatgatattgctattttagcacgctacatgctgatgctgtccttcaacaattcccttgatgtggcagctcatcttccctacctcttccacgttgttactttcttagtagccacaggtccgctctcccttagagcttccacacatggactggtcattaatatcattcactctctgtgtacttgttcacagcttcattttagtgaagagaccaagcaagttttgagactcagtctgacagagttctcattacccaaattttacttgctgtttggcattagcaaagtcaagtcagctgctgtcattgccttccgttccagttaccgggacaggtcattctctcctggctcctatgagagagagacttttgctttgacatccttggaaacagtcacagaagctttgttggagatcatggaggcatgcatgagagatattccaacgtgcaagtggctggaccagtggacagaactagctcaaagatttgcattccaatataatccatccctgcaaccaagagctcttgttgtctttgggtgtattagcaaacgagtgtctcatgggcagataaagcagataatccgtattcttagcaaggcacttgagagttgcttaaaaggacctgacacttacaacagtcaagttctgatagaagctacagtaatagcactaaccaaattacagccacttcttaataaggactcgcctctgcacaaagccctcttttgggtagctgtggctgtgctgcagcttgatgaggtcaacttgtattcagcaggtaccgcacttcttgaacaaaacctgcatactttagatagtctccgtatattcaatgacaagagtccagaggaagtatttatggcaatccggaatcctctggagtggcactgcaagcaaatggatcattttgttggactcaatttcaactctaactttaactttgcattggttggacaccttttaaaagggtacaggcatccttcacctgctattgttgcaagaacagtcagaattttacatacactactaactctggttaacaaacacagaaattgtgacaaatttgaagtgaatacacagagcgtggcctacttagcagctttacttacagtgtctgaagaagttcgaagtcgctgcagcctaaaacatagaaagtcacttcttcttactgatatttcaatggaaaatgttcctatggatacatatcccattcatcatggtgacccttcctataggacactaaaggagactcagccatggtcctctcccaaaggttctgaaggataccttgcagccacctatccaactgtcggccagaccagtccccgagccaggaaatccatgagcctggacatggggcaaccttctcaggccaacactaagaagttgcttggaacaaggaaaagttttgatcacttgatatcagacacaaaggctcctaaaaggcaagaaatggaatcagggatcacaacaccccccaaaatgaggagagtagcagaaactgattatgaaatggaaactcagaggatttcctcatcacaacagcacccacatttacgtaaagtttcagtgtctgaatcaaatgttctcttggatgaagaagtacttactgatccgaagatccaggcgctgcttcttactgttctagctacactggtaaaatataccacagatgagtttgatcaacgaattctttatgaatacttagcagaggccagtgttgtgtttcccaaagtctttcctgttgtgcataatttgttggactctaagatcaacaccctgttatcattgtgccaagatccaaatttgttaaatccaatccatggaattgtgcagagtgtggtgtaccatgaagaatccccaccacaataccaaacatcttacctgcaaagttttggttttaatggcttgtggcggtttgcaggaccgttttcaaagcaaacacaaattccagactatgctgagcttattgttaagtttcttgatgccttgattgacacgtacctgcctggaattgatgaagaaaccagtgaagaatccctcctgactcccacatctccttaccctcctgcactgcagagccagcttagtatcactgccaaccttaacctttctaattccatgacctcacttgcaacttcccagcattccccaggaatcgacaaggagaacgttgaactctcccctaccactggccactgtaacagtggacgaactcgccacggatccgcaagccaagtgcagaagcaaagaagcgctggcagtttcaaacgtaatagcattaagaagatcgtgtagtaatgaactagtccgtaacttgaaagtatttcgatttcttggctttatatatcttgtggaaaggacgacgcaacattgagggtagtccatcc

SEQ ID NO: 1709 - DNA, 8558 bp, Homo sapiens
  source 1..8558: mol_type = genomic DNA
accgccaccatggccgcgcacaggccggtggaatgggtccaggccgtggtcagccgcttcgacgagcagcttccaataaaaacaggacagcagaacacacataccaaagtcagtactgagcacaacaaggaatgtctaatcaatatttccaaatacaagttttctttggttataagcggcctcactactattttaaagaatgttaacaatatgagaatatttggagaagctgctgaaaaaaatttatatctctctcagttgattatattggatacactggaaaaatgtcttgctgggcaaccaaaggacacaatgagattagatgaaacgatgctggtcaaacagttgctgccagaaatctgccattttcttcacacctgtcgtgaaggaaaccagcatgcagctgaacttcggaattctgcctctggggttttattttctctcagctgcaacaacttcaatgcagtctttagtcgcatttctaccaggttacaggaattaactgtttgttcagaagacaatgttgatgttcatgatatagaattgttacagtatatcaatgtggattgtgcaaaattaaaacgactcctgaaggaaacagcatttaaatttaaagccctaaagaaggttgcgcagttagcagttataaatagcctggaaaaggcattttggaactgggtagaaaattatccagatgaatttacaaaactgtaccagatcccacagactgatatggctgaatgtgcagaaaagctatttgacttggtggatggttttgctgaaagcaccaaacgtaaagcagcagtttggccactacaaatcattctccttatcttgtgtccagaaataatccaggatatatccaaagacgtggttgatgaaaacaacatgaataagaagttatttctggacagtctacgaaaagctcttgctggccatggaggaagtaggcagctgacagaaagtgctgcaattgcctgtgtcaaactgtgtaaagcaagtacttacatcaattgggaagataactctgtcattttcctacttgttcagtccatggtggttgatcttaagaacctgctttttaatccaagtaagccattctcaagaggcagtcagcctgcagatgtggatctaatgattgactgccttgtttcttgctttcgtataagccctcacaacaaccaacactttaagatctgcctggctcagaattcaccttctacatttcactatgtgctggtaaattcactccatcgaatcatcaccaattccgcattggattggtggcctaagattgatgctgtgtattgtcactcggttgaacttcgaaatatgtttggtgaaacacttcataaagcagtgcaaggttgtggagcacacccagcaatacgaatggcaccgagtcttacatttaaagaaaaagtaacaagccttaaatttaaagaaaaacctacagacctggagacaagaagctataagtatcttctcttgtccatggtgaaactaattcatgcagatccaaagctcttgctttgtaatccaagaaaacaggggcccgaaacccaaggcagtacagcagaattaattacagggctcgtccaactggtccctcagtcacacatgccagagattgctcaggaagcaatggaggctctgctggttcttcatcagttagatagcattgatttgtggaatcctgatgctcctgtagaaacattttgggagattagctcacaaatgcttttttacatctgcaagaaattaactagtcatcaaatgcttagtagcacagaaattctcaagtggttgcgggaaatattgatctgcaggaataaatttcttcttaaaaataagcaggcagatagaagttcctgtcactttctccttttttacggggtaggatgtgatattccttctagtggaaataccagtcaaatgtccatggatcatgaagaattactacgtactcctggagcctctctccggaagggaaaagggaactcctctatggatagtgcagcaggatgcagcggaacccccccgatttgccgacaagcccagaccaaactagaagtggccctgtacatgtttctgtggaaccctgacactgaagctgttctggttgccatgtcctgtttccgccacctctgtgaggaagcagatatccggtgtggggtggatgaagtgtcagtgcataacctcttgcccaactataacacattcatggagtttgcctctgtcagcaatatgatgtcaacaggaagagcagcacttcagaaaagagtgatggcactgctgaggcgcattgagcatcccactgcaggaaacactgaggcttgggaagatacacatgcaaaatgggaacaagcaacaaagctaatccttaactatccaaaagccaaaatggaagatggccaggctgctgaaagccttcacaagaccattgttaagaggcgaatgtcccatgtgagtggaggaggatccatagatttgtctgacacagactccctacaggaatggatcaacatgactggcttcctttgtgcccttgggggagtgtgcctccagcagagaagcaattctggcctggcaacctatagcccacccatgggtccagtcagtgaacgtaagggttctatgatttcagtgatgtcttcagagggaaacgcagatacacctgtcagcaaatttatggatcggctgttgtccttaatggtgtgtaaccatgagaaagtgggacttcaaatacggaccaatgttaaggatctggtgggtctagaattgagtcctgctctgtatccaatgctatttaacaaattgaagaataccatcagcaagttttttgactcccaaggacaggttttattgactgataccaatactcaatttgtagaacaaaccatagctataatgaagaacttgctagataatcatactgaaggcagctctgaacatctagggcaagctagcattgaaacaatgatgttaaatctggtcaggtatgttcgtgtgcttgggaatatggtccatgcaattcaaataaaaacgaaactgtgtcaattagttgaagtaatgatggcaaggagagatgacctctcattttgccaagagatgaaatttaggaataagatggtagaatacctgacagactgggttatgggaacatcaaaccaagcagcagatgatgatgtaaaatgtcttacaagagatttggaccaggcaagcatggaagcagtagtttcacttctagctggtctccctctgcagcctgaagaaggagatggtgtggaattgatggaagccaaatcacagttatttcttaaatacttcacattatttatgaaccttttgaatgactgcagtgaagttgaagatgaaagtgcgcaaacaggtggcaggaaacgtggcatgtctcggaggctggcatcactgaggcactgtacggtccttgcaatgtcaaacttactcaatgccaacgtagacagtggtctcatgcactccataggcttaggttaccacaaggatctccagacaagagctacatttatggaagttctgacaaaaatccttcaacaaggcacagaatttgacacacttgcagaaacagtattggctgatcggtttgagagattggtggaactggtcacaatgatgggtgatcaaggagaactccctatagcgatggctctggccaatgtggttccttgttctcagtgggatgaactagctcgagttctggttactctgtttgattctcggcatttactctaccaactgctctggaacatgttttctaaagaagtagaattggcagactccatgcagactctcttccgaggcaacagcttggccagtaaaataatgacattctgtttcaaggtatatggtgctacctatctacaaaaactcctggatcctttattacgaattgtgatcacatcctctgattggcaacatgttagctttgaagtggatcctaccaggttagaaccatcagagagccttgaggaaaaccagcggaacctccttcagatgactgaaaagttcttccatgccatcatcagttcctcctcagaattcccccctcaacttcgaagtgtgtgccactgtttataccaggtggttagccagcgtttccctcagaacagcatcggtgcagtaggaagtgccatgttcctcagatttatcaatcctgccattgtctcaccgtatgaagcagggattttagataaaaagccaccacctagaatcgaaaggggcttgaagttaatgtcaaagatacttcagagtattgccaatcatgttctcttcacaaaagaagaacatatgcggcctttcaatgattttgtgaaaagcaactttgatgcagcacgcaggtttttccttgatatagcatctgattgtcctacaagtgatgcagtaaatcatagtctttccttcataagtgacggcaatgtgcttgctttacatcgtctactctggaacaatcaggagaaaattgggcagtatctttccagcaacagggatcataaagctgttggaagacgaccttttgataagatggcaacacttcttgcatacctgggtcctccagagcacaaacctgtggcagatacacactggtccagccttaaccttaccagttcaaagtttgaggaatttatgactaggcatcaggtacatgaaaaagaagaattcaaggctttgaaaacgttaagtattttctaccaagctgggacttccaaagctgggaatcctattttttattatgttgcacggaggttcaaaactggtcaaatcaatggtgatttgctgatataccatgtcttactgactttaaagccatattatgcaaagccatatgaaattgtagtggaccttacccataccgggcctagcaatcgctttaaaacagactttctctctaagtggtttgttgtttttcctggctttgcttacgacaacgtctccgcagtctatatctataactgtaactcctgggtcagggagtacaccaagtatcatgagcggctgctgactggcctcaaaggtagcaaaaggcttgttttcatagactgtcctgggaaactggctgagcacatagagcatgaacaacagaaactacctgctgccaccttggctttagaagaggacctgaaggtattccacaatgctctcaagctagctcacaaagacaccaaagtttctattaaagttggttctactgctgtccaagtaacttcagcagagcgaacaaaagtcctagggcaatcagtctttctaaatgacatttattatgcttcggaaattgaagaaatctgcctagtagatgagaaccagttcaccttaaccattgcaaaccagggcacgccgctcaccttcatgcaccaggagtgtgaagccattgtccagtctatcattcatatccggacccgctgggaactgtcacagcccgactctatcccccaacacaccaagattcggccaaaagatgtccctgggacactgctcaatatcgcattacttaatttaggcagttctgacccgagtttacggtcagctgcctataatcttctgtgtgccttaacttgtacctttaatttaaaaatcgagggccagttactagagacatcaggtttatgtatccctgccaacaacaccctctttattgtctctattagtaagacactggcagccaatgagccacacctcacgttagaatttttggaagagtgtatttctggatttagcaaatctagtattgaattgaaacacctttgtttggaatacatgactccatggctgtcaaatctagttcgtttttgcaagcataatgatgatgccaaacgacaaagagttactgctattcttgacaagctgataacaatgaccatcaatgaaaaacagatgtacccatctattcaagcaaaaatatggggaagccttgggcagattacagatctgcttgatgttgtactagacagtttcatcaaaaccagtgcaacaggtggcttgggatcaataaaagctgaggtgatggcagatactgctgtagctttggcttctggaaatgtgaaattggtttcaagcaaggttattggaaggatgtgcaaaataattgacaagacatgcttatctccaactcctactttagaacaacatcttatgtgggatgatattgctattttagcacgctacatgctgatgctgtccttcaacaattcccttgatgtggcagctcatcttccctacctcttccacgttgttactttcttagtagccacaggtccgctctcccttagagcttccacacatggactggtcattaatatcattcactctctgtgtacttgttcacagcttcattttagtgaagagaccaagcaagttttgagactcagtctgacagagttctcattacccaaattttacttgctgtttggcattagcaaagtcaagtcagctgctgtcattgccttccgttccagttaccgggacaggtcattctctcctggctcctatgagagagagacttttgctttgacatccttggaaacagtcacagaagctttgttggagatcatggaggcatgcatgagagatattccaacgtgcaagtggctggaccagtggacagaactagctcaaagatttgcattccaatataatccatccctgcaaccaagagctcttgttgtctttgggtgtattagcaaacgagtgtctcatgggcagataaagcagataatccgtattcttagcaaggcacttgagagttgcttaaaaggacctgacacttacaacagtcaagttctgatagaagctacagtaatagcactaaccaaattacagccacttcttaataaggactcgcctctgcacaaagccctcttttgggtagctgtggctgtgctgcagcttgatgaggtcaacttgtattcagcaggtaccgcacttcttgaacaaaacctgcatactttagatagtctccgtatattcaatgacaagagtccagaggaagtatttatggcaatccggaatcctctggagtggcactgcaagcaaatggatcattttgttggactcaatttcaactctaactttaactttgcattggttggacaccttttaaaagggtacaggcatccttcacctgctattgttgcaagaacagtcagaattttacatacactactaactctggttaacaaacacagaaattgtgacaaatttgaagtgaatacacagagcgtggcctacttagcagctttacttacagtgtctgaagaagttcgaagtcgctgcagcctaaaacatagaaagtcacttcttcttactgatatttcaatggaaaatgttcctatggatacatatcccattcatcatggtgacccttcctataggacactaaaggagactcagccatggtcctctcccaaaggttctgaaggataccttgcagccacctatccaactgtcggccagaccagtccccgagccaggaaatccatgagcctggacatggggcaaccttctcaggccaacactaagaagttgcttggaacaaggaaaagttttgatcacttgatatcagacacaaaggctcctaaaaggcaagaaatggaatcagggatcacaacaccccccaaaatgaggagagtagcagaaactgattatgaaatggaaactcagaggatttcctcatcacaacagcacccacatttacgtaaagtttcagtgtctgaatcaaatgttctcttggatgaagaagtacttactgatccgaagatccaggcgctgcttcttactgttctagctacactggtaaaatataccacagatgagtttgatcaacgaattctttatgaatacttagcagaggccagtgttgtgtttcccaaagtctttcctgttgtgcataatttgttggactctaagatcaacaccctgttatcattgtgccaagatccaaatttgttaaatccaatccatggaattgtgcagagtgtggtgtaccatgaagaatccccaccacaataccaaacatcttacctgcaaagttttggttttaatggcttgtggcggtttgcaggaccgttttcaaagcaaacacaaattccagactatgctgagcttattgttaagtttcttgatgccttgattgacacgtacctgcctggaattgatgaagaaaccagtgaagaatccctcctgactcccacatctccttaccctcctgcactgcagagccagcttagtatcactgccaaccttaacctttctaattccatgacctcacttgcaacttcccagcattccccaggaatcgacaaggagaacgttgaactctcccctaccactggccactgtaacagtggacgaactcgccacggatccgcaagccaagtgcagaagcaaagaagcgctggcagtttcaaacgtaatagcattaagaagatcgtgtagtaatgaactagtccgtaacttgaaagtatttcgatttcttggctttatatatcttgtggaaaggacgaccagctgttgaggtattggtacta

SEQ ID NO: 1710 - DNA, 1805 bp, Homo sapiens
  source 1..1805: mol_type = genomic DNA
accgccaccatgtcttccagactcggtgctgtacccgccacttcgggacccacaacctttaagcagcagaggagcacgaggatcgtgggagctaagaatagcaggacccagtgctccataaaggataatagtttccagtacactatccctcatgatgactccttaagtggttcatcgtctgcatcttcgtgtgaaccagtgagtgattttccagcatctttccgaaaatctacctactggatgaagatgagaagaatcaagccagctgctacttctcatgtcgaagggtcaggtggagtatcagccaaggggaaaaggaaacccaggcaggaagaagatgaagactatcgagaatttcctcagaagaagcataagctttatgggaggaagcaacggcctaaaactcagcccaatcccaaatcccaggcccgtcgtattcggaaggaaccaccagtttatgcagcaggcagtttggaggagcaatggtacttagaaatcgttgataaaggcagtgtctcctgccctacctgccaggcagtggggaggaagaccatagagggtttaaagaaacacatggaaaactgcaagcaggaaatgtttacttgtcatcattgtgggaaacaacttcgttcactggcagggatgaagtatcatgtcatggcaaatcataatagtttgcccattttgaaagccggagatgaaatagatgagccaagtgagagggaaaggctccgaacagttctaaagagactgggaaagctcaggtgcatgcgtgagagttgctccagtagcttcaccagcatcatgggatatctctaccatgtcagaaaatgtggcaaaggggctgcagagctggaaaagatgaccctgaaatgtcaccactgtggaaaaccatataggtcgaaggctggacttgcatatcacctgaggtcagagcatgggcctatatccttctttccagagtcaggacagccagagtgcttaaaggagatgaacctagagtcaaagagtgggggccgagttcagagacgttctgccaagatagctgtataccacctacaggagctggcctctgctgaactggccaaggaatggcccaagaggaaggtgcttcaggacctggtacctgatgatcgaaagttaaaatatactcgtccagggctccctaccttcagccaggaagtactacataaatggaagacagatatcaagaaatatcatcgtattcagtgtcctaaccagggctgtgaggctgtctacagcagtgtatctggccttaaagctcacctgggctcttgtacattgggaaactttgtggctggaaaatacaaatgtcttctatgtcagaaagaatttgtgtcagagagtggtgtcaagtatcacatcaactccgtccatgctgaggactggttcgttgtaaacccaacaacaaccaaaagctttgaaaagctgatgaagataaagcagcggcagcaagaagaagaaaagcggaggcagcagcacaggagcagaaggtctctaagaaggcggcagcagcctggcattgagcttcccgagacagagctgagtcttagagtagggaaggatcagaggaggaataatgaggaactggtagtgtcagcctcctgtaaggaaccagagcaggagccagtgccagcacagttccagaaagtaaagcccccaaagactaatcataaacgaggaaggaaatagtaatgaactagtccgtaacttgaaagtatttcgatttcttggctttatatatcttgtggaaaggacgaaaaggtgaacgaacataggattcg

SEQ ID NO: 1711 - DNA, 1718 bp, Homo sapiens
  source 1..1718: mol_type = genomic DNA
accgccaccatgtcttccagactcggtgctgtacccgccacttcgggacccacaacctttaagcagcagaggagcacgaggatcgtgggagctaagaacaggacccagtgctccataaaggataatagtttccagtacactatccctcatgatgactccttaagtggttcatcgtctgcatcttcgtgtgaaccagtgagtgattttccagcatctttccgaaaatctacctactggatgaagatgagaagaatcaagccagctgctacttctcatgtcgaagggtcaggtggagtatcagccaaggggaaaaggaaacccaggcaggaagaagatgaagactatcgagaatttcctcagaagaagcataagctttatggcagtttggaggagcaatggtacttagaaatcgttgataaaggcagtgtctcctgccctacctgccaggcagtggggaggaagaccatagagggtttaaagaaacacatggaaaactgcaagcaggaaatgtttacttgtcatcattgtgggaaacaacttcgttcactggcagggatgaagtatcatgtcatggcaaatcataatagtttgcccattttgaaagccggagatgaaatagatgagccaagtgagagggaaaggctccgaacagttctaaagagactgggaaagctcaggtgcatgcgtgagagttgctccagtagcttcaccagcatcatgggatatctctaccatgtcagaaaatgtggcaaaggggctgcagagctggaaaagatgaccctgaaatgtcaccactgtggaaaaccatataggtcgaaggctggacttgcatatcacctgaggtcagagcatgggcctatatccttctttccagagtcaggacagccagagtgcttaaaggagatgaacctagagtcaaagagtgggggccgagttcagagacgttctgccaagatagctgtataccacctacaggagctggcctctgctgaactggccaaggaatggcccaagaggaaggtgcttcaggacctggtacctgatgatcgaaagttaaaatatactcgtccagggctccctaccttcagccaggaagtactacataaatggaagacagatatcaagaaatatcatcgtattcagtgtcctaaccagggctgtgaggctgtctacagcagtgtatctggccttaaagctcacctgggctcttgtacattgggaaactttgtggctggaaaatacaaatgtcttctatgtcagaaagaatttgtgtcagagagtggtgtcaagtatcacatcaactccgtccatgctgaggactggttcgttgtaaacccaacaacaaccaaaagctttgaaaagctgatgaagataaagcagcggcagcaagaagaagaaaagcggaggcagcagcacaggagcagaaggtctctaagaaggcggcagcagcctggcattgagcttcccgagacagagctgagtcttagagtagggaaggatcagaggaggaataatgaggaactggtagtgtcagcctcctgtaaggaaccagagcaggagccagtgccagcacagttccagaaagtaaagcccccaaagactaatcataaacgaggaaggaaatagtaatgaactagtccgtaacttgaaagtatttcgatttcttggctttatatatcttgtggaaaggacgaagagtacgatgtacggcgccttat

SEQ ID NO: 1712 - DNA, 1541 bp, Homo sapiens
  source 1..1541: mol_type = genomic DNA
accgccaccatgggcttcgagagagactcggaaggagactctctgggggccaggcctgggcttccctatgggctgagcgacgatgagtctgggggcggccgggcactaagtgcggagagtgaagttgaggagccagccaggggtccaggggaggccaggggtgagaggccaggcccagcctgccagctgtgtggggggccgacaggtgaggggccgtgttgtggggcaggagggccgggtggggggcccctgctgcccccacggctactgtactcatgccgcctctgcaccttcgtgtcccactactcgagccacctgaagcggcacatgcagacacacagcggagagaagccgttccgctgtggccgctgcccctacgcctcagcccagctcgtcaacctgacacgacatacccgcacccacactggcgagaagccctaccgctgtccccactgcccctttgcctgcagcagcctgggcaacctgaggcggcatcagcgtacccacgcagggccccccactcctccctgcccgacctgtggcttccgctgctgtactccacgaccagcccggcctcccagtcccacagagcaggagggggcggtgccccggcgacctgaagatgctctgctccttccagatttgagcctccatgtgccaccaggtggtgccagtttcctgccagactgtgggcagctgcggggtgaaggggagggcctctgcgggactggatcagaaccactgccagagctgctattcccttggacctgccggggctgtggacaagagctggaggagggtgagggtagtcggctgggagctgccatgtgtgggcgctgcatgcgaggagaggctggagggggtgccagtggggggccccagggccccagtgacaaaggctttgcctgtagcctctgcccctttgccactcactatcccaaccacctggcccggcacatgaagacacacagtggtgagaagcccttccgctgcgcccgctgtccttatgcctctgctcatctggataacctgaaacggcaccagcgcgtccatacaggagagaagccctacaagtgccccctctgcccttatgcctgtggcaatctggccaacctcaagcgtcatggtcgcatccactctggtgacaaaccttttcggtgtagcctttgcaactacagctgcaaccagagcatgaacctcaaacgtcacatgctgcggcacacaggcgagaagcccttccgctgtgccacctgcgcctataccacgggccactgggacaactacaagcgccaccagaaggtgcatggccacggtggggcaggagggcctggtctctctgcctctgagggctgggccccacctcatagcccaccctctgttttgagctctcggggcccaccagccctggggactgctggcagccgggctgtccacacagactcatcctagtaatgaactagtccgtaacttgaaagtatttcgatttcttggctttatatatcttgtggaaaggacgactcccaggtactgttggccaaata

SEQ ID NO: 1713 - DNA, 2153 bp, Homo sapiens
  source 1..2153: mol_type = genomic DNA
accgccaccatgtcgccacatccagaagccatcacagattgtgtgacactgaacactgtgggccaacttgcagaaggtggttatcctttacggttctccacactctttcaggagcagcagaaaatgaacatatctcaggcatcagtgtcattcaaggacgtgactatagaattcacccaggaggagtggcagcaaatggcccctgttcagaagaatctgtacagagatgtgatgctggagaactacagcaacctcgtctcagtggggtactgctgtttcaaaccagaggtgatcttcaagttggagcaaggagaggagccttggttctcagaggaggaattctcaaaccagagtcacccaaaagattacagaggtgatgacctgatcaagcagaacaagaaaatcaaagacaaacacttggagcaagcaatatgtatcaataataaaacattgactacagaggaagagaaagttttggggaaaccatttactctgcatgtagctgctgttgcttcaacaaaaatgtcctgcaaatgcaactcatgggaagtgaatttgcaaagtatttctgaatttatcattaataatagaaactattcaacaaagaaaataggttgcggtaatgtatgtgagaattcacctttcaaaattaactttgagaaaactcagactggagagaaattttatgaacataataaaaacatgaaagctctcaattataatgaaaatcttcccaagcatccaaagtttcaaactttggagcaagcttttgaatgtaataaaattggaaaagcctttaatgataaggctaactgtgttaaacataacagttctcacacaggagaaacatcctctaaagatgatgaatttaggaaaaattgtgataagaaaactctctttgaccacaggagaactggcacagggaagaaacacctgcatcttaatcaatgtgggaaatcctttgagaagtcaactgtggaggaatataataaacttaatatgggtataaaacattatgaattaaatccaagtggaaataatttcaacagaaaggcacacctcactgatcctcaaacagctgtcatagaagagaacccattggtaagtaatgacagaacacagacttgggttaaatcctctgaatatcatgaaaataagaaatcctaccagacgtcggttcacagagttcgccgaagaagtcactcaatgatgaaaccctataaatgtaatgaatgtgggaaatccttctgtcagaaaggacatctcattcaacatcagagaactcacacaggagagaaaccatttgaatgtagtgaatgtggaaaaactttctcccagaagtcacacctcagtactcatcagagaattcatacagcagaaaaaccctataaatgtaatgaatgtggaaaaacatttgtccagaagtcaaccctcaggggacatcaaagaattcacacaggagaaaaaccctatgaatgtagtgaatgtgggaaaacttttgttcagaagtccaccctcagagatcatcacagaattcacacaggggagaaatcctttcaatgcaatcaatgtggaaaaacatttggccagaagtcaaacctcagaatacatcagagaactcacactggggagaaaacttaccagtgtaatgaatgtgaaaaatccttctggcgaaaagatcatctcattcaacatcagaaaactcacacgggagagaaaccattcaaatgtaacgaatgtgggaaaacttttgcccggacatcaaccctcagagtgcatcaaagaattcacactggggagaaaccatttaaatgtaatgaatgtgggaagaaatttgtccggaaagcaatccttagtgatcatcagagaattcacacaggggagaaaccctttcagtgtaataaatgtgggaaaacttttggccagaaatcaaacctcagaatacatcaaaggactcacagtggggagaaatcttatgaatgcaatgaatatgggaaattatgtaagaagtctaccctaagcttataccagaaaattcagggagaggggaatccctattagtaatgaactagtccgtaacttgaaagtatttcgatttcttggctttatatatcttgtggaaaggacgacaaacagccgtgatgtatcagatc

SEQ ID NO: 1714 - DNA, 3593 bp, Homo sapiens
  source 1..3593: mol_type = genomic DNA
accgccaccatggatcgcaacagagaggccgagatggagctgaggcgaggccccagccccaccagggccggccggggccacgaggtggatggggacaaggctacctgccacacctgctgcatctgcggcaagagcttccccttccagagctcgctttcgcagcacatgcgcaagcacacgggcgagaagccctacaagtgtccctactgcgaccaccgggcttcccagaagggcaacctgaagattcacatccggagccaccgcacggggactctgattcagggacacgagccggaggcgggcgaggcgccgctgggtgagatgcgcgcctccgagggcctggacgcctgcgccagccccaccaagagcgcctcggcctgcaaccggctgctgaacggggcctcgcaggccgacggcgccagggtcctgaacggggcctcgcaggccgacagcggcagagtcctgctgcggagcagcaagaagggggcagaggggtccgcatgcgccccgggggaggccaaggcagcggtccagtgctccttctgcaagagccagttcgagcgtaagaaggacctggagctgcacgtgcaccaggcgcacaagccgttcaagtgcaggctgtgcagctacgcgacgctgcgggaggagtcgctgctgagccacatcgagagggaccacatcaccgcgcaggggcccggcagcggcgaggcctgcgtggagaacggcaagcccgagctgagccccggggagttcccgtgcgaggtgtgtggccaggccttcagccagacctggttcctgaaggcgcacatgaagaagcaccggggctccttcgaccacggctgccacatctgcggccgtaggttcaaggagccctggttcctcaagaaccacatgaaggcgcacggccccaagacgggcagcaagaacaggcccaagagtgagctggaccccatcgccaccatcaacaacgtggtccaggaggaggtgatcgtcgccggcctgagcctctacgaggtctgcgccaagtgcgggaacctgtttacaaacctggacagcttgaacgcccacaatgccatccaccgcagagtcgaggccagccgcacgcgcgccccggccgaggagggggcggaggggccctcggacaccaagcagttcttcctccagtgcctgaacctgaggccgtcggcggccggcgactcgtgccctggcacgcaggccggacggcgggtggctgagctggacccggtcaacagctaccaggcctggcagctggccacgcggggtaaggtggccgagccggccgagtacctcaagtacggggcctgggacgaggcgctggccggggacgtggccttcgacaaggacaggcgcgagtacgtcctggtgagccaggagaagcgcaagcgtgagcaggatgcaccagccgcgcaggggcccccgcggaagcgcgcgagcgggcctggggaccccgcgcccgccggccacctcgatccccgctcggccgcgcgccccaaccgcagggccgcagccaccaccggccagggcaagtcctccgagtgcttcgagtgcggcaagatcttccgcacctatcatcagatggtgctgcactcacgcgtgcatcgccgcgcgcgccgcgagagggacagtgacggggacagggcggcgcgggcccgctgcggatcactcagtgagggtgactcggcctcccagcccagcagccctggctccgcctgtgccgctgctgactccccgggctctggcctggccgacgaggctgccgaagacagtggtgaggagggcgcccctgaacctgcaccagggggacagccgcgccgctgctgcttttccgaagaggtgacttcgaccgagctctccagtggagaccagagtcacaagatgggagataacgcctcggaaagagacaccggcgagtccaaggcagggatcgcagcttctgtgtccatacttgaaaacagtagcagagagacttctagaaggcaagagcagcacagattttctatggacttaaagatgccagcatttcaccccaagcaggaggtgcccgtccctggtgatggtgtggagttcccttccagtacgggagcggagggccagacgggtcaccctgcagaaaagctgtccgatttgcacaacaaggaacactctgggggagggaagcgggcgctggccccagacctcatgccgctagatttaagtgcgaggtcgacgcgggatgaccccagcaataaggagacggcctcctccctgcaggcggctttagtcgttcacccgtgtccttactgcagccacaagacctactaccccgaggtcctgtggatgcacaaacgcatctggcaccgcgtcagctgcaactccgtggctcccccgtggattcagcccaatggttacaaaagcatcagaagcaatttggttttcctttcccggagcggacgcacgggccccccgcctgccctcggtggcaaagaatgccagcctttgctccttgctcggttcacccgcactcaggtgccaggggggatgccggggtccaaaagtggctcttctcccctgggagtggtcacaaaagccgctagcatgcctaagaataaggagagccattccggaggtccctgcgctctgtgggcgcccggccctgacgggtatcgacagaccaaaccttgtcacggccaggagccacatggcgcggccacacaggggcccctggccaagcccaggcaggaggctagctccaaaccggtgcctgccccgggtggcgggggcttcagcaggagcgccacccctacgcccaccgtcatcgcccgggctggcgcgcagccctcggccaatagcaagcctgtggagaagtttggggtccccccagcgggggctggctttgcccccacaaataagcacagtgccccggactccctgaaagccaaattcagtgctcagcctcagggtccacctcctgcaaagggcgaagggggcgctcctcctctacctccccgcgagcccccctcgaaggcagcccaggagctgaggactctggccacctgtgctgcggggtccaggggcgacgcggccttgcaggcccagcccggcgtggctggggcgccccccgtcctacactccatcaaacaggagccggtggccgaggggcatgagaagcgcctggacatcctcaacatctttaagacgtacattccaaaggactttgcgaccctctaccagggatggggtgtcagcggccctgggttggagcacagagggacactccggacgcaggcccggccaggagagttcgtctgcatcgagtgcggaaagagcttccaccagcccggccacctcagggcccacatgcgggcacactcagtggtgtttgagtccgatgggcctcggggttctgaagttcataccacctccgcagacgcccccaaacaagggagagaccattctaacacaggtaccgtccagacagtgcctctgagaaagggaacctagtaatgaactagtccgtaacttgaaagtatttcgatttcttggctttatatatcttgtggaaaggacgagccaatccacagatatctttaacg

SEQ ID NO: 1715 - DNA, 1580 bp, Homo sapiens
  source 1..1580: mol_type = genomic DNA
accgccaccatggcgatggcactcccgatgcctggacctcaggaggcggttgtgttcgaggatgtggctgtgtacttcacaaggatagagtggagttgcctggcccccgaccagcaggcactctacagggacgtgatgctggagaactatgggaacctggcctcactaggctttcttgttgccaaaccagcactgatctccctattggagcaaggagaggagccgggggccttgattctgcaggtggctgaacagagcgtggccaaagccagcctgtgcacagattccaggatggaggctgggatcatggagtctcctctgcagagaaagctctccaggcaggcaggactgccgggcaccgtgtgggggtgcctcccctgggggcaccctgtgggggggcaccctgcaccaccccacccgcatggcggtcctgaggacgggtcagataaacccacccacccccgggctcgggagcacagcgcctccccaagggttctgcaggaagacctgggccggcctgtggggagctcagccccccgctacaggtgcgtgtgcggcaaggcgttcagatacaactcgctgcttctcaggcaccagatcatccacaccggcgccaagcccttccagtgcacagagtgcgggaaggccttcaagcaaagctccatcctgctgcggcaccagctgatccacactgaggagaagccgttccagtgcggcgagtgcgggaaggccttccggcagagcacgcagctggctgcccaccaccgcgtccacacccgcgagcggccctacgcatgcggcgagtgcggcaaggccttcagccgcagctcccggctgctgcagcaccagaagttccacaccggggagaagcccttcgcgtgcacagagtgcggcaaggcgttctgccgcaggttcaccctcaacgagcacggccgcatccacagcggggagcggccctaccggtgcctgcggtgtgggcagcgcttcatccgagggtcctcgctcctgaagcaccaccggctgcacgcgcaggagggtgcccaggacggcggcgtggggcagggcgccctgctcggagctgcgcagaggccccaggcgggggacccgccccacgagtgcccggtgtgcgggaggccgttccgacacaactccctgctgctgctgcacctgcgcctacacacgggcgagaagccgttcgagtgcgcggagtgcggcaaggccttcggtcgcaagtccaacctcactctgcaccagaagatccacaccaaggagaagcccttcgcgtgcaccgagtgcggcaaggcgttccgcaggagctacacgctgaacgagcactaccggctccacagcggcgagaggccataccggtgccgcgcctgcgggagggcctgcagccggctgtccaccctcatccagcaccagaaggtgcacggccgcgagcccggggaggacacagagggcaggcgggcgccctgttgggcttcctagtaatgaactagtccgtaacttgaaagtatttcgatttcttggctttatatatcttgtggaaaggacgacaatcgtacggactctgtattcag

SEQ ID NO: 1716 - DNA, 1304 bp, Homo sapiens
  source 1..1304: mol_type = genomic DNA
accgccaccatgacatttgaagatgtggctgtggaattcagccagtgggagtgggggcagctgaaccctgctcagaaggacctctacagggaggtgatgctggagaacttcaggaacttggccattctgggccttctagtatccaaaccatatgtgatctgccagttggaggaagggggtgagcccttcatggtggagagagaaatctcaacaggagcccactcagactggaagagaaggtctaaatccaaggaatcaatgccaagttggggaatttccaaagaagaattattccaggtagtatcagtggaaaaacacattcaagatgtgctgcagttctcgaagttgaaagcagcctgcggttgtgatggccagttagagatgcagcagataaaacaggagagacacctgaaacaaatgtcaaccattcacaaatctgccaccacccttagcagagattataaatggaatggatttgggagaagcttaggtttaagatcagtccttgttaaccaacacagcattctcatgggagaaggatcttataaatgtgatacagaattcaggcagactttagggggaaacaactctcagagaacccacccagaaaagaaatcttgtaaatgtaatgagtgtgggaagtcctttcacttccagtcagaacttaggcgccatcagcgatgtcacactggagaaaagccgtatgaatgcagtgactgtggaagagcctttggtcatatttcatcccttattaaacatcaaagaactcatactggagaaaagccctatgaatgcagtgaatgtgggagagccttcagccagagttcgtctcttgttctgcactatagatttcacactggagagaaaccctacaaatgtaatgaatgtggacgagcctttggtcacacttcatcccttattaagcatcagaggactcatactggagaaaagccctatgaatgccgggaatgtgggagaaccttcagccagagctcatcactcattgtgcattacagatttcatactggagagaaaccttacaaatgtaataaatgtgggagagccttcagccagagttcatctctcactcaacattacagatttcacactggagagaaaccctacaaatgtaatgagtgtggaagggcctttgctcatactgcatcccttattaaacatcagagaagtcatgctggaaaaaaaaccctatagtaatgaactagtccgtaacttgaaagtatttcgatttcttggctttatatatcttgtggaaaggacgacggactcagcgagttcggccgagc

SEQ ID NO: 1717 - DNA, 1970 bp, Homo sapiens
  source 1..1970: mol_type = genomic DNA
accgccaccatgggtttgtatggacaggcttgtccatctgtaacttcattaaggatgacatctgaactggagagcagcctaacgtctatggactggttaccacagctcaccatgagagcagccatccaaaaatctgatgctacacaaaatgcacatggaacaggaatttctaagaagaatgcactccttgacccaaatacaactctggaccaggaagaagtccaacagcacaaagatgggaaacctccatacagttatgccagcctcattacatttgcaattaatagctcacccaaaaagaaaatgactttaagtgaaatttatcagtggatttgtgataacttcccatattatagagaggctggcagtggttggaagaattccatacgacataatctgtcattgaacaaatgtttccttaaagtgcctcgatctaaggatgaccctggaaaggggtcctactgggcaatagacaccaatccgaaggaagatgtgctgcctactcggccaaagaagagggcacgatctgtagaacgggcctcaactccatatagcatagattcagattctttgggaatggagtgtattatttcgggaagtgcctctccaactctggcaatcaacactgtgactaacaaagtaacattgtataacactgatcaggatggtagtgatagcccacgcagtagccttaacaacagtctctcagaccagagtttggcatctgttaatttgaacagtgttggaagtgtgcatagttatacaccggtgacaagccatccagaatcagtctctcaatcattaactcctcagcagcaaccacagtacaaccttccagaaagagacaagcaactacttttctcagaatataattttgaagatcttagtgcctcatttcggagcctttataagtcagtttttgagcagtcacttagtcaacaaggtttgatgaacatcccttctgaatcttcccagcagtcccacacttcatgtacctatcagcactctcccagcagtacagtgagcactcacccacacagcaaccaaagcagcctgtccaacagtcatggcagtggcctcaacaccacaggcagtaattcggttgcacaggtctcactgtctcacccccagatgcacacacagccatctccacatcctccccatcgaccgcatggtttaccgcagcatccgcagcgttccccacacccagcaccacacccacagcaacacagccagctccagtcccctcacccccagcatccctctccacatcaacacatacagcaccatccgaaccatcagcatcagacgttaacacatcaggcacccccacccccacaacaggtatcctgtaattctggtgtttcaaatgattggtatgcgacacttgatatgctaaaagaaagctgtcgaattgccagcagtgttaattggtcagatgtagacctttcacagtttcaaggtctgatggagagtatgagacaggcagatctcaagaactggtctttagaccaggttcagtttgccgatctttgttcttctcttaatcagttctttacacaaactggccttatacattcacagagtaatgttcaacaaaatgtttgtcatggtgccatgcatccaacaaaaccttcccaacacattggaacaggaaatttgtacatagattctaggcaaaatctccctccttcagtgatgccaccccctggttatcctcatatcccacaggcactcagcactccaggaacaacgatggcaggccatcacagagccatgaaccagcagcacatgatgccttcccaagccttccagatgcggcgttccctgcctccagatgacatccaggatgactttgattgggattcaattgtgtagtaatgaactagtccgtaacttgaaagtatttcgatttcttggctttatatatcttgtggaaaggacgatggagaacagccctgggtggcata

SEQ ID NO: 1718 - DNA, 1868 bp, Homo sapiens
  source 1..1868: mol_type = genomic DNA
accgccaccatgggtttgtatggacaggcttgtccatctgtaacttcattaaggatgacatctgaactggagagcagcctaacgtctatggactggttaccacagctcaccatgagagcagccatccaaaaatctgatgctacacaaaatgcacatggaacaggaatttctaagaagaatgcactccttgacccaaatacaactctggaccaggaagaagtccaacagcacaaagatgggaaacctccatacagttatgccagcctcattacatttgcaattaatagctcacccaaaaagaaaatgactttaagtgaaatttatcagtggatttgtgataacttcccatattatagagaggctggcagtggttggaagaattccatacgacataatctgtcattgaacaaatgtttccttaaagtgcctcgatctaaggatgaccctggaaaggggtcctactgggcaatagacaccaatccgaaggaagatgtgctgcctactcggccaaagaagagggcacgatctgtagaacgggtaacattgtataacactgatcaggatggtagtgatagcccacgcagtagccttaacaacagtctctcagaccagagtttggcatctgttaatttgaacagtgttggaagtgtgcatagttatacaccggtgacaagccatccagaatcagtctctcaatcattaactcctcagcagcaaccacagtacaaccttccagaaagagacaagcaactacttttctcagaatataattttgaagatcttagtgcctcatttcggagcctttataagtcagtttttgagcagtcacttagtcaacaaggtttgatgaacatcccttctgaatcttcccagcagtcccacacttcatgtacctatcagcactctcccagcagtacagtgagcactcacccacacagcaaccaaagcagcctgtccaacagtcatggcagtggcctcaacaccacaggcagtaattcggttgcacaggtctcactgtctcacccccagatgcacacacagccatctccacatcctccccatcgaccgcatggtttaccgcagcatccgcagcgttccccacacccagcaccacacccacagcaacacagccagctccagtcccctcacccccagcatccctctccacatcaacacatacagcaccatccgaaccatcagcatcagacgttaacacatcaggcacccccacccccacaacaggtatcctgtaattctggtgtttcaaatgattggtatgcgacacttgatatgctaaaagaaagctgtcgaattgccagcagtgttaattggtcagatgtagacctttcacagtttcaaggtctgatggagagtatgagacaggcagatctcaagaactggtctttagaccaggttcagtttgccgatctttgttcttctcttaatcagttctttacacaaactggccttatacattcacagagtaatgttcaacaaaatgtttgtcatggtgccatgcatccaacaaaaccttcccaacacattggaacaggaaatttgtacatagattctaggcaaaatctccctccttcagtgatgccaccccctggttatcctcatatcccacaggcactcagcactccaggaacaacgatggcaggccatcacagagccatgaaccagcagcacatgatgccttcccaagccttccagatgcggcgttccctgcctccagatgacatccaggatgactttgattgggattcaattgtgtagtaatgaactagtccgtaacttgaaagtatttcgatttcttggctttatatatcttgtggaaaggacgaagcgagccgagaccgtcgggtaga

SEQ ID NO: 1719 - DNA, 2225 bp, Homo sapiens
  source 1..2225: mol_type = genomic DNA
accgccaccatgaccacgttcaaggaggcaatgaccttcaaggacgtggctgtggtcttcactgaggaagagctggggctgctggaccttgctcagaggaagctgtatcgagatgtgatgctggagaacttcaggaacctgctctcagtgggacatcaagcattccacagggatactttccacttcctaagggaagaaaagatttggatgatgaagacagcaatccaaagggaagggaattcaggagacaagatccaaactgagatggagactgtttcagaagcaggaacacatcaagagtggtccttccagcaaatctgggaaaaaattgcaagtgatttaaccaggtctcaagacttgatgataaatagctctcagttctccaaagaaggtgatttcccctgccagactgaggcaggactatctgtaattcacacaagacagaaatcttcccagggcaatggatataaaccatccttcagtgatgtctcccactttgattttcatcaacaattacactcaggagagaaatctcatacgtgtgatgagtgtggaaagaacttttgttacatctcagcccttcgtattcatcagagagtccacatgggagagaaatgctataagtgtgacgtgtgtggtaaggaattcagtcagagttcacatctgcaaactcatcagagagtccacactggagagaaaccgttcaaatgtgtggaatgtgggaaaggcttcagtcgtagatcagcacttaatgttcatcataaattacacacaggagagaaaccttataattgtgaggaatgcgggaaggccttcattcacgattcccagcttcaagaacatcagagaatccatacgggggagaagccattcaaatgtgatatatgtggtaagagcttctgtggtagatcaagacttaataggcattccatggttcacacggcagagaaaccattccgatgtgatacgtgtgataagagctttcgtcagagatcagcacttaatagtcatcgcatgatccacacaggagagaaaccatacaaatgtgaggagtgtggaaaaggctttatttgtaggcgagatctttatacgcatcatatggtccacacgggagaaaagccatataattgtaaagagtgtgggaagagcttcagatgggcctcgtgtcttttgaaacatcagcgagtccacagtggagaaaaaccattcaaatgtgaagaatgtgggaaaggattttacacaaattcacaatgctattcccaccagagatcccatagtggagaaaaaccatacaaatgtgtggagtgtgggaagggctacaaaaggaggttggatcttgactttcaccagcgcgtccatacaggagagaaactgtataattgtaaggaatgtgggaagagctttagtcgggccccatgtcttttgaaacatgagagactccacagtggagaaaaaccattccaatgtgaagagtgtgggaagagatttactcaaaattcacatcttcattcccatcagagagttcacactggagaaaagccatacaaatgtgagaagtgtggaaagggctacaatagtaagtttaatcttgatatgcaccagaaggtccacacaggagagagaccatacaattgtaaggaatgtgggaagagttttggctgggcctcgtgtcttttgaaacatcagagactgcacagtggagaaaaaccattcaaatgtgaagagtgtgggaaaagatttactcagaattcacagcttcattctcatcaaagagtgcacactggagaaaagccatacaaatgtgatgagtgtgggaagggcttcagctggtcctcaactcgtctgacccatcagagacgccacagcagagaaacacctctcaaatgtgagcagcatgggaagaacattgtacagaattcattctctaaagtgcaagaaaaagttcacagtgtagaaaagccatacaaatgtgaggactgtgggaagggctacaacaggcgcttgaatcttgatatgcatcagagggtccacatgggagagaaaacatggaagtgtagggagtgtgatatgtgctttagtcaggcctcaagccttcgacttcatcagaatgttcatgttggagaaaaaccttagtaatgaactagtccgtaacttgaaagtatttcgatttcttggctttatatatcttgtggaaaggacgattcgcgtatttgcgtatcgctggg

SEQ ID NO: 1720 - DNA, 386 bp, Homo sapiens
  source 1..386: mol_type = genomic DNA
accgccaccatgaatatgttcaaggaagcagtgaccttcaaggacgtggctgtggccttcacggaggaggaattggggctgctgggccctgcccagaggaagctgtaccgagatgtgatggtggagaactttaggaacctgctgtcagtggggcatccacccttcaaacaagatgtatcacctatagaaagaaatgagcagctttggataatgacgacagcaacccgaagacagggaaatttagataccttacttgtaaaagctcttttgctctatgacctggctcaaacttagtaatgaactagtccgtaacttgaaagtatttcgatttcttggctttatatatcttgtggaaaggacgaactatcaaacgagctgtggttgta

SEQ ID NO: 1721 - DNA, 2513 bp, Homo sapiens
  source 1..2513: mol_type = genomic DNA
accgccaccatgaatatgttcaaggaagcagtgaccttcaaggacgtggctgtggccttcacggaggaggaattggggctgctgggccctgcccagaggaagctgtaccgagatgtgatggtggagaactttaggaacctgctgtcagtggggcatccacccttcaaacaagatgtatcacctatagaaagaaatgagcagctttggataatgacgacagcaacccgaagacagggaaatttaggagagaaaaatcaaagtaagttaattactgttcaagacagagaatcagaagaagagctttcttgttggcaaatctggcaacaaattgcaaatgacttaaccaggtgtcaagactccatgatcaataattctcagtgtcacaaacaaggtgatttcccttaccaggtagggacagaactgtctattcaaatttctgaagatgagaactatatagtaaataaagcagatggtcccaataatactgggaatccagagtttcctatcttgagaacccaggattcttggaggaaaacattcctgactgagtcacagagattgaacagagatcagcaaatttccataaaaaataaattatgtcaatgtaagaagggtgttgatcccatcggttggatttcacatcatgatggtcatagagtacacaaaagtgaaaaatcttatagacccaatgattatgaaaaagacaacatgaagattttgacatttgatcacaatagcatgattcacacaggacagaaatcgtaccagtgtaatgagtgtaaaaaacccttcagtgatctctccagctttgatcttcatcagcagttacaatcaggagagaagtctcttacatgtgttgagcgtggaaaaggcttctgttacagcccagttcttcctgttcatcagaaagtacatgtgggagaaaaacttaagtgtgatgagtgtggtaaggaattcagtcagggcgctcatctacagacccatcagaaagtccacgtgatagagaaaccatacaaatgtaagcaatgtgggaaaggtttcagtcgtagatcagcacttaatgttcattgcaaggtccacacggcagagaaaccttataattgtgaggagtgtgggagggccttcagtcaggcctctcatcttcaggaccatcagagactccacactggggagaagccattcaaatgtgatgcatgtggtaagagcttcagtcggaattcacatcttcaatcccatcaaagagttcatacaggagagaaaccatacaaatgtgaggagtgtggtaagggcttcatttgtagctcaaatctttacattcatcagagagtccacacaggagaaaaaccctataaatgtgaggaatgtggtaaaggctttagtcggccttcaagtcttcaggcccatcagggagttcacactggagagaagtcatacatatgtactgtatgtgggaaaggctttactctgagttcaaatcttcaagcccatcagagagtccacactggagagaagccatacaaatgcaatgagtgtgggaagagcttcaggaggaattcccattatcaagttcatctagtggtccacacaggagagaaaccctataaatgtgagatatgtgggaagggcttcagtcaaagttcgtatcttcaaatccatcagaaggcccacagtatagagaaaccttttaagtgtgaggagtgtgggcagggtttcaatcagagctcacgacttcagattcaccagctgatccatacgggtgagaaaccatacaaatgtgaagagtgtggcaagggatttagtcgtagagcagatcttaaaattcactgtaggatccacacaggagagaaaccatataattgtgaggagtgtgggaaggtcttcaggcaggcctcaaatcttttggcccatcagagagtccacagtggagaaaaaccattcaaatgtgaagaatgtgggaagagtttcggtcggagtgcacatcttcaagcccatcaaaaagtccacactggagataagccatacaaatgtgatgagtgtgggaagggcttcaagtggagcttgaaccttgacatgcatcagagggtgcacacaggagaaaaaccatataaatgtggggagtgtggtaagtacttcagtcaggcctcaagtcttcaacttcatcagagtgtccacacaggagagaaaccatacaaatgtgatgtgtgtggtaaagtcttcagtcggtcttcacaactacagtctcatcagcgagttcacactggggagaaaccttataaatgtgagatatgtggtaagagcttcagttggcgatcaaatcttacagttcatcacagaatccatgttggtgataaatcctataaaagtaataggggtggtaagaacatcagagaatccacacaggaaaaaaaatctataaaatagtaatgaactagtccgtaacttgaaagtatttcgatttcttggctttatatatcttgtggaaaggacgacatacacgttgatgtctttgtggc

SEQ ID NO: 1722 - DNA, 2348 bp, Homo sapiens
  source 1..2348: mol_type = genomic DNA
accgccaccatggtggagaacttcaagaacctggttgcagtggggcatcttcccttccaaccagatatggtatcccaattggaagcagaagaaaagctttggatgatggaaacagaaacccaaagaagcagcaagcatcaaaataagatggaaacactccaaaaatttgcattaaaatacctttcaaatcaagagctgtcctgctggcaaatctggaaacaggttgcaagtgaattaaccaggtgtcttcaggggaagagttcccagttattacaaggtgactctattcaggtttctgaaaatgagaacaatataatgaaccctaaaggagatagctctatttatattgaaaatcaagagtttccattttggagaacccagcattcttgcgggaatacatatctgagtgagtcacagattcagagtagaggtaagcaaattgatgtgaaaaataacctgcaaatacatgaagacttcatgaagaaatcaccatttcatgagcatattaaaactgacacagaaccaaaaccctgcaaaggtaatgaatatggcaaaatcattagtgatggctccaaccagaaattacccttaggagagaaaccccatccatgtggtgagtgtggaaggggcttcagttatagcccaaggcttccccttcatccgaatgttcatacaggagaaaaatgcttcagtcaaagctcacatctgcgaactcatcagagaattcacccaggagagaaactcaatagatgtcatgaatctggtgattgcttcaataagagctcttttcattcttatcaatctaatcatacaggagagaagtcttatagatgcgacagttgcggcaagggattcagtagcagcacgggtcttatcattcattacagaactcatactggagagaaaccctataaatgcgaggaatgtggtaaatgctttagtcaaagttcaaattttcagtgccatcagagagtccacactgaagaaaaaccatacaaatgcgaagagtgtggtaagggcttcggttggagtgttaatctccgtgttcaccagagggtccacaggggtgagaagccctataaatgtgaggaatgtggtaagggcttcactcaggctgcacattttcacatccatcagagagtccacactggagagaaaccctacaagtgtgatgtgtgtggtaagggcttcagccacaattcaccattaatatgccatcggagagtccacacaggagagaagccatacaagtgtgaggcgtgtgggaaaggctttacccgtaatacagatctgcatattcatttcagagttcacacgggagagaaaccctataaatgtaaggagtgtggtaagggcttcagtcaggcttcaaatcttcaagtccatcagaatgtccacactggggagaaacgattcaagtgtgaaacgtgtgggaagggcttcagtcagtcctcaaagcttcaaacccatcagcgagtccacactggagagaaaccatatagatgtgatgtgtgtggtaaggacttcagttatagttcaaatcttaaactacaccaagtaattcacactggagaaaaaccatataaatgtgaggaatgtgggaagggcttcagttggagatcaaatcttcatgcacatcaaagagttcactcaggagaaaaaccctataaatgtgagcagtgtgataagagcttcagtcaggccatagattttcgggtacatcagagagtccatactggagagaagccatacaaatgtggtgtctgtggtaagggcttcagtcagtcctctggtcttcaatcccatcagagagtccacacgggggaaaagccatacaaatgtgatgtgtgtggaaagggctttagatacagttcgcagtttatataccatcagagaggccacactggagaaaaaccttacaaatgtgaagagtgtgggaaaggctttggtaggagcttgaatcttcgccatcatcagagggtccacacgggagagaaaccccatatatgtgaggagtgtggtaaggccttcagtctcccctcaaatcttcgagtccacctgggtgttcacaccagggaaaaactctttaaatgtgaagagtgtggtaaaggcttcagtcagagtgcacgtcttgaagcccatcagagagtccacactggagaaaaaccatacaaatgtgacatatgtgataaggacttccgtcaccgttcacgtcttacatatcatcagaaagtccatactggtaaaaagctttagtaatgaactagtccgtaacttgaaagtatttcgatttcttggctttatatatcttgtggaaaggacgatggaaagcatcgaatatatggcta

SEQ ID NO: 1723 - DNA, 2561 bp, Homo sapiens
  source 1..2561: mol_type = genomic DNA
accgccaccatggagactttgacctcaaggcatgagaaaagagctcttcattctcaagcctcagccatttcccaagatagggaggagaagatcatgtctcaggagccattgagcttcaaggacgtggctgtggtcttcactgaggaggagctagagctgctggactctacccagaggcagctgtaccaagatgtgatgcaggagaatttcaggaacctactctcagtgggagacaagaatggaaaggatacggagtatattcaagatgaagaattaaggttcttttcacacaaagagctctcctcatgcaaaatctgggaagaggtggcaggtgaattacctgggagccaagactgtagagtaaatctgcaaggaaaagacttccagttctcagaagatgctgctccccatcaagggtgggaaggagcatctacgccgtgttttccaattgagaatttcctggacagtctacaaggggatgggcttatcggtctagaaaatcaacagtttccagcctggagagctataagaccaatccccattcaaggatcttgggcaaaagcgtttgtgaaccagttaggggatgttcaagaaagatgtaaaaatctcgacacagaagacacagtatataaatgtaactgggatgatgacagcttttgctggatatcttgtcatgttgatcacagattccctgaaatagacaagccgtgtggttgcaataaatgcagaaaagactgcattaaaaactctgtacttcatcgcattaaccctggagagaatggcttgaaaagtaacgaatacagaaatggcttcagggacgatgcagaccttcccccgcatccaagagtacctttgaaagagaaactctgtcaatatgatgagtttagtgagggcttgaggcacagtgcccatcttaacagacatcaaagagttcccacaggagagaaatctgttaagagtcttgagcgtggtcggggcgtcagacagaacacgcacatacgtaaccaccccagagcccctgtgggagacatgccctatagatgtgatgtctgtggaaaggggttcaggtataaatcggttcttcttattcatcaaggggtgcacacaggaaggagaccctataaatgtgaggagtgtgggaaggcatttggtcgaagttcaaacctgcttgtccatcagagggtccacactggagagaaaccatataaatgcagcgagtgtgggaagggcttcagttacagctcagtgcttcaagtccatcagaggctgcacacaggggagaagccctacacctgcagcgagtgtggcaaaggcttctgtgccaagtctgcactgcacaaacaccagcacattcaccctggagaaaagccctacagctgtggcgagtgtggaaagggattcagctgcagctcccacctcagcagtcatcagaagacacacaccggcgagaggccctaccagtgtgacaagtgtggcaaaggtttcagtcacaactcgtaccttcaagctcaccagagagttcacatggggcagcatctgtacaaatgtaacgtgtgtggtaagagtttcagttacagctcagggcttctcatgcatcagagactgcacacaggagagaaaccctacaaatgcgagtgcgggaagagctttggccggagctccgacctccacatccatcagagggtccacacaggagagaaaccctataaatgcagtgagtgtgggaagggcttccggcggaattcagaccttcacagccaccagagggtccacacgggagagaggccctacgtgtgtgacgtgtgtgggaagggtttcatctacagctccgacctccttatccatcagagggtccacactggagagaaaccctataaatgtgctgagtgtggcaaaggcttcagttacagctcagggcttctcattcaccagagagtccacacaggcgagaaaccttacagatgccaagagtgcggaaagggctttaggtgcacatcaagccttcacaaacatcagcgagtccacacgggaaaaaagccctatacgtgtgatcagtgtggcaagggattcagttatggctctaatcttcgcacccaccagaggttgcacacaggagagaaaccctacacttgttgtgaatgtgggaagggtttcagatatggctcaggtctccttagtcataagagagtgcacactggcgagaagccatacagatgccacgtgtgtgggaagggctatagtcagagctcacatcttcaaggtcatcagagggtccacactggtgagaaaccctataaatgtgaggagtgtgggaagggctttggccgcaactcctgtcttcatgttcatcagagagtccacactggagagaagccctatacgtgtggtgtgtgtgggaaaggcttcagttatacctcaggtctgcggaaccaccaaagagtgcatttaggcgagaacccttataagtagtaatgaactagtccgtaacttgaaagtatttcgatttcttggctttatatatcttgtggaaaggacgaaccatccactttgtttgtcgcgaa

SEQ ID NO: 1724 - DNA, 2579 bp, Homo sapiens
  source 1..2579: mol_type = genomic DNA
accgccaccatggagactttgacctcaaggcatgagaaaagagctcttcattctcaagcctcagccatttcccaagatagggaggagaagatcatgtctcaggagccattgagcttcaaggacgtggctgtggtcttcactgaggaggagctagagctgctggactctacccagaggcagctgtaccaagatgtgatgcaggagaatttcaggaacctactctcagtgggtgagaggaatcctctgggagacaagaatggaaaggatacggagtatattcaagatgaagaattaaggttcttttcacacaaagagctctcctcatgcaaaatctgggaagaggtggcaggtgaattacctgggagccaagactgtagagtaaatctgcaaggaaaagacttccagttctcagaagatgctgctccccatcaagggtgggaaggagcatctacgccgtgttttccaattgagaatttcctggacagtctacaaggggatgggcttatcggtctagaaaatcaacagtttccagcctggagagctataagaccaatccccattcaaggatcttgggcaaaagcgtttgtgaaccagttaggggatgttcaagaaagatgtaaaaatctcgacacagaagacacagtatataaatgtaactgggatgatgacagcttttgctggatatcttgtcatgttgatcacagattccctgaaatagacaagccgtgtggttgcaataaatgcagaaaagactgcattaaaaactctgtacttcatcgcattaaccctggagagaatggcttgaaaagtaacgaatacagaaatggcttcagggacgatgcagaccttcccccgcatccaagagtacctttgaaagagaaactctgtcaatatgatgagtttagtgagggcttgaggcacagtgcccatcttaacagacatcaaagagttcccacaggagagaaatctgttaagagtcttgagcgtggtcggggcgtcagacagaacacgcacatacgtaaccaccccagagcccctgtgggagacatgccctatagatgtgatgtctgtggaaaggggttcaggtataaatcggttcttcttattcatcaaggggtgcacacaggaaggagaccctataaatgtgaggagtgtgggaaggcatttggtcgaagttcaaacctgcttgtccatcagagggtccacactggagagaaaccatataaatgcagcgagtgtgggaagggcttcagttacagctcagtgcttcaagtccatcagaggctgcacacaggggagaagccctacacctgcagcgagtgtggcaaaggcttctgtgccaagtctgcactgcacaaacaccagcacattcaccctggagaaaagccctacagctgtggcgagtgtggaaagggattcagctgcagctcccacctcagcagtcatcagaagacacacaccggcgagaggccctaccagtgtgacaagtgtggcaaaggtttcagtcacaactcgtaccttcaagctcaccagagagttcacatggggcagcatctgtacaaatgtaacgtgtgtggtaagagtttcagttacagctcagggcttctcatgcatcagagactgcacacaggagagaaaccctacaaatgcgagtgcgggaagagctttggccggagctccgacctccacatccatcagagggtccacacaggagagaaaccctataaatgcagtgagtgtgggaagggcttccggcggaattcagaccttcacagccaccagagggtccacacgggagagaggccctacgtgtgtgacgtgtgtgggaagggtttcatctacagctccgacctccttatccatcagagggtccacactggagagaaaccctataaatgtgctgagtgtggcaaaggcttcagttacagctcagggcttctcattcaccagagagtccacacaggcgagaaaccttacagatgccaagagtgcggaaagggctttaggtgcacatcaagccttcacaaacatcagcgagtccacacgggaaaaaagccctatacgtgtgatcagtgtggcaagggattcagttatggctctaatcttcgcacccaccagaggttgcacacaggagagaaaccctacacttgttgtgaatgtgggaagggtttcagatatggctcaggtctccttagtcataagagagtgcacactggcgagaagccatacagatgccacgtgtgtgggaagggctatagtcagagctcacatcttcaaggtcatcagagggtccacactggtgagaaaccctataaatgtgaggagtgtgggaagggctttggccgcaactcctgtcttcatgttcatcagagagtccacactggagagaagccctatacgtgtggtgtgtgtgggaaaggcttcagttatacctcaggtctgcggaaccaccaaagagtgcatttaggcgagaacccttataagtagtaatgaactagtccgtaacttgaaagtatttcgatttcttggctttatatatcttgtggaaaggacgaaaacaggagcaatttcatcagacg

SEQ ID NO: 1725 - DNA, 1016 bp, Homo sapiens
  source 1..1016: mol_type = genomic DNA
accgccaccatgtttaactcggtcaacctgggcaacttctgctctccgtcgcgcaaggagaggggcgcagatttcggcgagcgagggagctgcgcctccaacctctatctgcccagttgcacttactacatgcccgagttctccacggtctcctccttcctgccccaggccccctctcgtcagatctcctatccctactcggcccaagtgcccccggtccgggaggtctcctacggcctggagccatccggcaagtggcaccatcggaacagctactcctcctgctatgcggcggccgacgagcttatgcaccgggagtgcctgcctccttccaccgtcaccgagatcctcatgaaaaacgaaggctcctacggcggccaccaccaccccagcgccccgcacgcaacccccgccggcttctactcctcagtcaacaagaacagcgtcctgcctcaagccttcgaccgtttcttcgacaacgcctactgcggtggcggcgacccgcccgccgagcccccctgctccggcaagggcgaggccaagggggagcccgaggcacccccggcctcgggactggcgtcccgggctgaggcgggtgccgaggcggaggctgaggaggagaacacaaatcccagctcgtccggttcagcccactccgtggccaaggagccggccaaaggagccgcccccaacgccccccgcacccgcaagaagcgctgcccttattcgaaattccagatccgggaactggagcgagagtttttcttcaacgtgtatatcaacaaagagaagcggctgcagctgtcccggatgctgaacctgacggaccgacaagtgaaaatttggtttcagaacagaaggatgaaagaaaagaaactgagcagagaccggctgcagtatttctcgggaaatcctctgctgtagtaatgaactagtccgtaacttgaaagtatttcgatttcttggctttatatatcttgtggaaaggacgaggaatcattcggtatttgactatg

SEQ ID NO: 1726 - DNA, 1094 bp, Homo sapiens
  source 1..1094: mol_type = genomic DNA
accgccaccatgacgacttcgctgctcctgcatccacgctggccggagagccttatgtacgtctatgaggacagcgcggcggagagcggcatcggcggcggcggcggaggaggaggcggcggcacgggcggagcggggggtggctgcagcggagcgagccccggcaaagccccgagcatggatggtctgggcagcagctgcccggccagccactgccgcgacctgcttccgcaccccgtgctgggccgcccgccggctcccctgggcgcccctcagggcgccgtctatacggacatcccggccccggaggcggcgcgccagtgtgccccgccgcccgcaccccccacctcgtccagcgccaccctgggctacggctaccccttcgggggcagctactacggctgccgcctgtcgcacaacgtgaacctgcagcagaagccttgcgcctaccacccgggcgataaatacccggagccgtcgggcgccctgcccggtgacgacctgtcctctagggccaaggagttcgccttctaccccagcttcgccagctcctaccaggcgatgcccggctacctggacgtgtcggtggtgcccgggatcagcgggcacccggagccgcgtcacgacgccctcatccccgtcgaaggctaccagcactgggctctctccaatggctgggacagtcaggtgtactgctccaaggagcagtcgcagtccgcccacctctggaagtctcccttcccagacgtggttcccctgcagcccgaggtgagcagctaccggcgcgggcgcaagaaacgcgtgccctacactaaggtgcagctgaaggagctagagaaggaatacgcggctagcaagttcatcaccaaagagaagcgccggcgcatctccgccaccacgaacctctctgagcgccaggtaaccatctggttccagaaccggcgggtcaaagagaagaaggtggtcagcaaatcgaaagcgcctcatctccactccacctagtaatgaactagtccgtaacttgaaagtatttcgatttcttggctttatatatcttgtggaaaggacgaactcaggagtggtgcgagatgaga

SEQ ID NO: 1727 - DNA, 950 bp, Homo sapiens
  source 1..950: mol_type = genomic DNA
accgccaccatgggcgagcataatctcctgaatcccgggtttgtggggccgctggtaaacatccacacgggagacaccttctacttccccaacttccgcgcgtccggggcgcagcttcccgggctgccttcgctgtcctacccacgccgcgacaacgtgtgctccctgtcctggccgtcggcggagccgtgcaatggctacccgcagccctacctcggcagcccagtgtctctcaaccctcccttcggccgcacgtgcgagctggcgcgcgtggaggacggcaagggttactaccgcgagccgtgcgccgagggtggcggcgggggcctgaagcgtgaggagcgcgggcgcgacccgggagccgggcccggggcagcgctgctcccgctggagccgtcggggccgcctgcgctcggcttcaagtacgactacgcggcgggcggcggcggtggcgacggcggcggcggcgcaggacctccgcacgacccgccctcctgccagtcgctggaatccgactccagttcgtccctgctcaacgagggcaacaagggcgccggcgcaggcgaccccggcagcttggtatcgccgttgaaccccggcggcgggctctcggccagcggcgcgccctggtacccgatcaacagccgctctcggaagaagcgcaagccctattcgaagttgcaactggcagagctggagggcgagtttctggtcaacgagttcatcacacgccagcgccggagggaactctcagaccgcttgaatcttagtgaccagcaggtcaagatctggtttcagaaccggagaatgaaaaagaaaagacttctgttgagggagcaagctctctccttcttttagtaatgaactagtccgtaacttgaaagtatttcgatttcttggctttatatatcttgtggaaaggacgaaatcggctgaaggtctaaggacat

SEQ ID NO: 1728 - DNA, 881 bp, Homo sapiens
  source 1..881: mol_type = genomic DNA
accgccaccatgggcgacgcggccgcagatccgcccggccccgccctgccctgtgagttcctccggccgggctgcggggctccgctcagtccgggagcgcagctgggccgcggcgctccgacctccgctttcccaccgcccgcagctgaagcacatcccgcagcccggcgcggactccgatcgccgcagttgccctctggcgccatgtcgcagaacggagcgcccgggatgcaggaggagagcctgcagggctcctgggtagaactgcacttcagcaataatgggaacgggggcagcgttccagcctcggtttctatttataatggagacatggaaaaaatactgctggacgcacagcatgagtctggacggagtagctccaagagctctcactgtgacagcccacctcgctcgcagacaccacaagataccaacagagcttctgaaacagatacccatagcattggagagaaaaacagctcacagtctgaggaagatgatattgaaagaaggaaagaagttgaaagcatcttgaagaaaaactcagattggatatgggattggtcaagtcggccggaaaatattccccccaaggagttcctctttaaacacccgaagcgcacggccaccctcagcatgaggaacacgagcgtcatgaagaaagggggcatattctctgcagaatttctgaaagttttccttccatctctgctgctctctcatttgctggccatcggattggggatctatattggaaggcgtctgacaacctccaccagcaccttttagtaatgaactagtccgtaacttgaaagtatttcgatttcttggctttatatatcttgtggaaaggacgaaatctctgcaccggccggtcaacc

SEQ ID NO: 1729 - DNA, 1694 bp, Homo sapiens
  source 1..1694: mol_type = genomic DNA
accgccaccatgactcgcgatttcaaacctggagacctcatcttcgccaagatgaaaggttatccccattggccagctcgagtagacgaagttcctgatggagctgtaaagccacccacaaacaaactacccattttcttttttggaactcatgagactgcttttttaggaccaaaggatatatttccttactcagaaaataaggaaaagtatggcaaaccaaataaaagaaaaggttttaatgaaggtttatgggagatagataacaatccaaaagtgaaattttcaagtcaacaggcagcaactaaacaatcaaatgcatcatctgatgttgaagttgaagaaaaggaaactagtgtttcaaaggaagataccgaccatgaagaaaaagccagcaatgaggatgtgactaaagcagttgacataactactccaaaagctgccagaagggggagaaagagaaaggcagaaaaacaagtagaaactgaggaggcaggagtagtgacaacagcaacagcatccgttaatctaaaagtgagtcctaaaagaggacgacctgcagctacagaagtcaagattccaaaaccaagaggcagacccaaaatggtaaaacagccctgtccttcagagagtgacatcattactgaagaggacaaaagtaagaaaaaggggcaagaggaaaaacaacctaaaaagcagcctaagaaggatgaagagggccagaaggaagaagataagccaagaaaagagccggataaaaaagaggggaagaaagaagttgaatcaaaaaggaaaaatttagctaaaacaggggttacttcaacctccgattctgaagaagaaggagatgatcaagaaggtgaaaagaagagaaaaggtgggaggaactttcagactgctcacagaaggaatatgctgaaaggccaacatgagaaagaagcagcagatcgaaaacgcaagcaagaggaacaaatggaaactgagcagcagaataaagatgaaggaaagaagccagaagttaagaaagtggagaagaagcgagaaacatcaatggattctcgacttcaaaggatacatgctgagattaaaaattcactcaaaattgataatcttgatgtgaacagatgcattgaggccttggatgaacttgcttcacttcaggtcacaatgcaacaagctcagaaacacacagagatgattactacactgaaaaaaatacggcgattcaaagttagtcaggtaatcatggaaaagtctacaatgttgtataacaagtttaagaacatgttcttggttggtgaaggagattccgtgatcacccaagtgctgaataaatctcttgctgaacaaagacagcatgaggaagcgaataaaaccaaagatcaagggaagaaagggccaaacaaaaagctagagaaggaacaaacagggtcaaagactctaaatggaggatctgatgctcaagatggtaatcagccacaacataacggggagagcaatgaagacagcaaagacaaccatgaagccagcacgaagaaaaagccatccagtgaagagagagagactgaaatatctctgaaggattctacactagataactagtaatgaactagtccgtaacttgaaagtatttcgatttcttggctttatatatcttgtggaaaggacgattatagtacactcgcaagcatgta

SEQ ID NO: 1730 - DNA, 1103 bp, Homo sapiens
  source 1..1103: mol_type = genomic DNA
accgccaccatgactcgcgatttcaaacctggagacctcatcttcgccaagatgaaaggttatccccattggccagctcgagtagacgaagttcctgatggagctgtaaagccacccacaaacaaactacccattttcttttttggaactcatgagactgcttttttaggaccaaaggatatatttccttactcagaaaataaggaaaagtatggcaaaccaaataaaagaaaaggttttaatgaaggtttatgggagatagataacaatccaaaagtgaaattttcaagtcaacaggcagcaactaaacaatcaaatgcatcatctgatgttgaagttgaagaaaaggaaactagtgtttcaaaggaagataccgaccatgaagaaaaagccagcaatgaggatgtgactaaagcagttgacataactactccaaaagctgccagaagggggagaaagagaaaggcagaaaaacaagtagaaactgaggaggcaggagtagtgacaacagcaacagcatctgttaatctaaaagtgagtcctaaaagaggacgacctgcagctacagaagtcaagattccaaaaccaagaggcagacccaaaatggtaaaacagccctgtccttcagagagtgacatcattactgaagaggacaaaagtaagaaaaaggggcaagaggaaaaacaacctaaaaagcagcctaagaaggatgaagagggccagaaggaagaagataagccaagaaaagagccggataaaaaagaggggaagaaagaagttgaatcaaaaaggaaaaatttagctaaaacaggggttacttcaacctccgattctgaagaagaaggagatgatcaagaaggtgaaaagaagagaaaaggtgggaggaactttcagactgctcacagaaggaatatgctgaaaggccaacatgagaaagaagcagcagatcgaaaacgcaagcaagaggaacaaatggaaactgagcaccaaacaacatgtaatctacagtagtaatgaactagtccgtaacttgaaagtatttcgatttcttggctttatatatcttgtggaaaggacgagttctcacgtaatgatgagtatct

SEQ ID NO: 1731 - DNA, 1091 bp, Homo sapiens
  source 1..1091: mol_type = genomic DNA
accgccaccatgactcgcgatttcaaacctggagacctcatcttcgccaagatgaaaggttatccccattggccagctcgagtagacgaagttcctgatggagctgtaaagccacccacaaacaaactacccattttcttttttggaactcatgagactgcttttttaggaccaaaggatatatttccttactcagaaaataaggaaaagtatggcaaaccaaataaaagaaaaggttttaatgaaggtttatgggagatagataacaatccaaaagtgaaattttcaagtcaacaggcagcaactaaacaatcaaatgcatcatctgatgttgaagttgaagaaaaggaaactagtgtttcaaaggaagataccgaccatgaagaaaaagccagcaatgaggatgtgactaaagcagttgacataactactccaaaagctgccagaagggggagaaagagaaaggcagaaaaacaagtagaaactgaggaggcaggagtagtgacaacagcaacagcatctgttaatctaaaagtgagtcctaaaagaggacgacctgcagctacagaagtcaagattccaaaaccaagaggcagacccaaaatggtaaaacagccctgtccttcagagagtgacatcattactgaagaggacaaaagtaagaaaaaggggcaagaggaaaaacaacctaaaaagcagcctaagaaggatgaagagggccagaaggaagaagataagccaagaaaagagccggataaaaaagaggggaagaaagaagttgaatcaaaaaggaaaaatttagctaaaacaggggttacttcaacctccgattctgaagaagaaggagatgatcaagaaggtgaaaagaagagaaaaggtgggaggaactttcagactgctcacagaaggaatatgctgaaaggccaacatgagaaagaagcagcagatcgaaaacgcaagcaagaggaacaaatggaaactgagcattttgctctgtagtaatgaactagtccgtaacttgaaagtatttcgatttcttggctttatatatcttgtggaaaggacgactaactgccaagtggcgatctctt

SEQ ID NO: 1732 - DNA, 1652 bp, Homo sapiens
  source 1..1652: mol_type = genomic DNA
accgccaccatggattcagtgacctttgacgatgtggctgtggacttcacccaggaggagtggactttactggactcaactcagagaagcctctacagtgacgtgatgctggagaactacaagaacctggccacagtaggaggtcagatcatcaaacccagtctaatctcttggttggaacaagaagagtcaaggacagttcagggaggagttctccaaggatgggaaatgcgacttgaaacccagtggtctatacttcagcaggactttttgaggggtcagacatccattgggatacaattggaaggaaaacacaatggaagggaactctgtgactgtgagcaatgtggagaagtcttcagtgaacactcatgccttaagacgcacgtgagaactcaaagtacagggaacactcatgactgtaatcagtatggaaaagatttccttaccctgtgtgagaaaacctctactggtgagaaactttctgagtttaatcagagtgaaaaaatcttcagcctgacaccaaatattgtataccagagaactagcacacaagaaaagtcatttgaatgtagtcactgtggaaaatccttcattaatgagtcataccttcaggcacatatgagaactcacaatggagaaaaactctacgaatggaggaattatgggccaggttttattgactctacaagcctttctgtgcttatagaaaccctcaatgcaaaaaagccctacaaatgtaaggaatgtggaaaaggctatagatacccagcctacctcagtattcacatgcgaacccacactggggagaaaccatatgaatgtaaggaatgtgggaaagccttcaattattccaactcatttcagatacatggaagaactcacactggagagaaaccctatgtatgtaaggaatgtgggaaagccttcactcagtactcgggccttagtatgcatgtacgatctcacagtggagacaagccctatgaatgtaaggaatgtgggaaatccttccttacatcctcacgccttattcaacatataagaactcacactggagagaagccttttgtatgtgttgaatgtgggaaagcctttgcagtttcctcaaatcttagtggacatttgagaactcacactgaagagaaggcctgtgagtgtaagatatgtgggaaagtatttgggtatccctcatgtcttaataatcacatgcgaacgcacagtgcccagaaaccatacacctgtaaggaatgtgggaaggcttttaactattccacccaccttaaaattcacatgcgaatccacactggagaaaaaccctatgagtgtaaacaatgtggaaaggccttcagtcattccagttcatttcaaatacatgaaaggactcacactggagagaaaccctatgaatgcaaggagtgtgggaaagccttcacgtgttccagttcctttagaattcatgaaaaaactcacacagaagagaaaccctataaatgtcagcaatgcgggaaagcttacagtcatccccgttcacttcgaagacatgaacaaattcactagtaatgaactagtccgtaacttgaaagtatttcgatttcttggctttatatatcttgtggaaaggacgactagtgcactcatccgtatgatgc

SEQ ID NO: 1733 - DNA, 458 bp, Homo sapiens
  source 1..458: mol_type = genomic DNA
accgccaccatggcagctgctgatttgtcccatggacattatctttctggggacccagtttgccttcatgaagaaaagacaccagcaggaagaatagtggctgactgcctaacagattgttatcaggattcagtgacctttgacgatgtggctgtggacttcacccaggaggagtggactttactggactcaactcagagaagcctctacagtgacgtgatgctggagaactacaagaacctggccacagtaggaggtcagatcatcaaacccagtctaatctcttggttggaacaagaagagtcaaggacagttcagggaggagttctccaaggaaggaaaacacaatggaagggaactctgtagtaatgaactagtccgtaacttgaaagtatttcgatttcttggctttatatatcttgtggaaaggacgaagcgctccgttccctaagttaacc

SEQ ID NO: 1734 - DNA, 2360 bp, Homo sapiens
  source 1..2360: mol_type = genomic DNA
accgccaccatggccgagccggcttcggtaactgtgacatttgatgatgtggccttatatttttcggaacaagagtgggagatcctggagaagtggcagaagcaaatgtataagcaagagatgaagaccaattacgagacccttgattccctggggtatgctttttccaagccagatttgatcacatggatggaacaagggagaatgctattaatcagcgaacagggatgcttagataaaacaagaaggacaactagccctcctactgatgaacagttgaacatgaagaatactggaaagttgctatgttttgatgacgaaggaactcccaggacaaaagaagaggattgccgtttaaatggtcctcaaaaacaggacttgtgtgctgccttacgagggaaagagagaaagattttattagctcaaacagccaccttccagtctccaagtctccgagaaacagagattctaaataaaaaagtcagcatcacagcatatgatccagacaagaaagacctgcggcataagcctcgggagaccccagggcgcttagaaattcccacagggccaagatgctattcctgctatgtctgtaggaaagtcttccaagtaaggagggatttgctaaagcacaaacggagccactccaagagccagctctgcagatacccaaagtacaaaaactcgtccagagggaagtccgaactcaggcggacgcagaggctcctgtgtcagaagaagcggttccagtgcagtgagtgtgagaagagctacttcctgaagggcagcctcgtcactcatcaggttgtccacaccggccagcggccctacccatgccctgagtgcgacaagaccttccggtacagggccaacctgaagaagcacctgtgtctacaccgcggggagcggccgttctgctgcggggagtgcggccgggccttcgtgcagcagtgcgagctcacggagcacttgcggctgcacagcggagagaagcccttccagtgtccgcagtgtgaccggtgcttccgcctgaagaggggcatgaaggtccatctgacccagcacagcgggaagaggcccttccactgtcccgagtgtggccggagcttctcccggaaggctgccctgaagacccaccagaggacgcacagcgaggaaaagccgttttcttgtggtgaatgtggcaggaaattcatctacaagattaagctggacgagcacatcagagttcacacgggagagaagcccttttcgtgtcccgagtgtaacaaaagtttccgcctcaagagaagcctgaaagcccacgggctgcagcacattgggaagcggcccttccagtgcccggagtgcagcaggggcttcttctggaggaacgccatgcgcgcccaccagcgcctgcacagcgagcaaaagcccttcccctgcgccgagtgcggcaagcgcttcacgcggccttccaagctcgcctgccacaccagagtccacgacaggcagaaggagtttccctgcggcgagtgcaaaaagaccttttctcagcagtcgcggctcacgcagcacctgaaggtccacaccacggaaaagccgttctcctgcgccgagtgcggccgcagtttccgccgacgcgcgcatctcacagagcacacgaggcttcacagtggcgaggagcccttccagtgtcccgagtgcgacaagagcttctcctggaaggcctccatgaagttccaccagcggatgcacagggacgagaagcccttcgcgtgcggtgagtgtgacaagacctacacgcatcagtctcagctcaccgagcacctgaggctgcacagtggagagaagccctaccagtgtcctgaatgcgagaagactttccgcctcaagggaaacctgaaaagccacctgctgcagcacagtggccaaaagccattctcttgtgtgatgtgcggcaaaagtttcactcaacagtaccggctcacagaacacattcgagtccacagcggggagaagcccttccagtgtccggagtgtgacaagagctactgcatcaggggcagcttgaaggtccacttgtataagcacagtggagagaggcccttccagtgtcccgagtgtggcaaaggcttcctccagaagagaagcctgaaggcccatctgtgccttcacagtggggagaggcctttttcttgtgatgagtgtggaaggagcttcacgtacgtgggggcgctcaagacccacattgcagtgcatgccaaagagaagccctccagcctctagtaatgaactagtccgtaacttgaaagtatttcgatttcttggctttatatatcttgtggaaaggacgatggatcatttcgcaactatgttaa

SEQ ID NO: 1735 - DNA, 3605 bp, Homo sapiens
  source 1..3605: mol_type = genomic DNA
accgccaccatgatcggagatggttgtgacctcggcctcggcgaggaggaagggggcacgggcctgccatacccttgccagttctgcgacaagtccttcatccgcttgagctacttgaagaggcacgagcagatccacagcgacaagctgccgttcaagtgcacctactgcagccgcctcttcaagcacaagaggagccgtgaccggcacatcaagctgcatacgggcgacaagaagtatcactgccacgagtgcgaggcagccttctcccgcagcgaccacctcaagatccacctgaagacccacagctccagcaagcccttcaagtgcactgtgtgcaagcgcggcttctcctccaccagctcgctgcagagccacatgcaggcccacaaaaagaacaaggagcatctggccaagtcggagaaggaagccaagaaggacgacttcatgtgcgactactgcgaggacaccttcagccagacggaggagctggagaagcacgtgctcacccgccacccgcagctgtccgagaaggcggacctgcagtgcattcactgccctgaggtcttcgtcgacgagaacacactgctcgcccatatccaccaagcccacgccaaccagaaacacaagtgccccatgtgccctgagcagttctcctcagtggaaggtgtctactgccacctggacagccaccggcagcccgactccagcaaccacagtgtcagtcccgaccctgtactgggcagcgtggcctccatgagcagcgccacacccgactccagcgcctctgtggagcgtggctccaccccggactccaccttgaagccgctgcgggggcagaagaagatgcgggatgacgggcagggctggaccaaggtggtctatagctgcccctattgttccaagcgggactttaacagcctggccgtgctggagatccacctgaagaccatccacgcggacaagccccagcagagccacacatgtcagatctgcctggactccatgcccaccctctacaacctcaacgagcacgttcgcaagctgcacaagaaccatgcctaccctgtgatgcagtttggcaacatctctgccttccactgcaactactgccccgagatgttcgccgacatcaatagcctgcaggagcacatccgcgtctcccactgcggccccaacgccaacccctctgacggtaataatgctttcttctgcaaccagtgctccatgggtttccttactgagtcctccctcaccgagcacatccagcaggcccactgcagtgtgggcagtgccaaactagagtctccggtggtgcagcccacgcagtccttcatggaggtctattcctgcccctactgcaccaactcccccatctttggctccatcctgaaactcaccaagcacatcaaggagaaccacaagaacattccactggcccacagcaagaagtccaaggccgagcagagcccagtctcgtccgatgtggaggtgtcttccccgaagcggcagcggctctcagcaagcgccaactccatctccaatggggagtatccttgcaatcaatgcgacctcaagttctccaactttgagagcttccagacccacctgaagctgcacctggagctgctgctgcggaagcaagcgtgcccccagtgcaaagaggactttgactcccaggagtccctcctgcagcacctgacagtgcattacatgaccacgtcgacccactatgtgtgcgagagctgcgacaagcaattttcctcggtggatgacctgcagaagcacctgctggacatgcacacctttgtgttgtaccactgcaccctgtgtcaggaggtcttcgactccaaggtgtccatccaggtgcacctggcggtgaagcacagcaatgagaagaagatgtaccgctgcacggcctgcaactgggacttccgcaaggaggctgacctgcaggtgcacgtcaaacacagccacctgggcaacccggccaaggctcacaagtgcatcttctgtggggagaccttcagcaccgaggtggagctgcagtgccacatcaccacacacagcaagaagtataactgtaagttctgcagcaaggccttccacgccatcatcctgctggagaagcacctgcgggagaagcactgtgtgtttgatgctgcgaccgagaacggcacggccaatggggtacccccaatggccaccaagaaagctgagcctgctgacctgcagggcatgctgcttaagaaccctgaggcacctaacagccatgaggccagcgaggatgacgtggacgcgtcggagcccatgtacggctgtgacatctgtggggcggcctacaccatggaggtgctgctgcagaatcaccggctgcgggaccacaatatccggccgggcgaggatgatggctcacgcaagaaggctgagtttatcaagggcagtcacaagtgcaacgtttgttcacggactttcttctcggagaacgggctacgggagcacctgcagacgcaccggggccctgccaagcactacatgtgtcccatctgtggtgagcgcttcccttcgctgctgacgctcaccgaacacaaggtgacccacagcaagagcctggacacgggcacctgtcgcatctgcaagatgcccctgcagagcgaggaggagtttattgagcactgccagatgcaccctgacctgcgcaactcactcacgggcttccgctgtgtggtctgcatgcagacagtcacttccacgcttgagctcaagatccatggcaccttccacatgcagaagctggcgggcagctcagcggcgtcctcccccaatggccaggggctgcagaagctctacaagtgcgccctgtgcctcaaggagttccgcagcaagcaggacctggtgaagcttgacgtcaatgggctgccctacggcctctgcgccggctgcatggcccgcagcgccaacggacaggtgggtggcctggccccgcccgagcccgccgaccggccctgtgccggcctccgttgccccgagtgcagtgtcaagtttgagagtgccgaagacctggagagccacatgcaggtggaccaccgtgacctcacgccggagaccagtgggccccggaaaggcacccagacatcgccagtgccccggaaaaagacataccagtgcatcaagtgccagatgaccttcgagaacgagagagagatccaaatccacgttgccaaccacatgattgaggaaggcatcaaccacgagtgtaagctgtgcaaccagatgttcgactccccggccaagctcctctgtcacctcattgagcacagcttcgagggcatgggcggcaccttcaaatgccccgtgtgtttcacagtcttcgtccaggccaacaagttgcagcagcacatctttgccgtgcacgggcaggaggacaagatctacgactgctcacagtgccctcagaagttcttcttccagaccgagctgcagaaccacacgatgagccagcacgcacagtagtaatgaactagtccgtaacttgaaagtatttcgatttcttggctttatatatcttgtggaaaggacgatgtcgtgtggaccgaccagcttgg

SEQ ID NO: 1736 - DNA, 3776 bp, Homo sapiens
  source 1..3776: mol_type = genomic DNA
accgccaccatggaggatgaatcaatttacacctgcgatcactgtcagcaggacttcgagtctctggcagacctgacggaccaccgggcccaccgctgtcctggagatggtgatgacgacccacaactctcctgggtggcctcgtctccctccagcaaggatgttgcgtcacccacgcagatgatcggagatggttgtgacctcggcctcggcgaggaggaagggggcacgggcctgccatacccttgccagttctgcgacaagtccttcatccgcttgagctacttgaagaggcacgagcagatccacagcgacaagctgccgttcaagtgcacctactgcagccgcctcttcaagcacaagaggagccgtgaccggcacatcaagctgcatacgggcgacaagaagtatcactgccacgagtgcgaggcagccttctcccgcagcgaccacctcaagatccacctgaagacccacagctccagcaagcccttcaagtgcactgtgtgcaagcgcggcttctcctccaccagctcgctgcagagccacatgcaggcccacaaaaagaacaaggagcatctggccaagtcggagaaggaagccaagaaggacgacttcatgtgcgactactgcgaggacaccttcagccagacggaggagctggagaagcacgtgctcacccgccacccgcagctgtccgagaaggcggacctgcagtgcattcactgccctgaggtcttcgtcgacgagaacacactgctcgcccatatccaccaagcccacgccaaccagaaacacaagtgccccatgtgccctgagcagttctcctcagtggaaggtgtctactgccacctggacagccaccggcagcccgactccagcaaccacagtgtcagtcccgaccctgtactgggcagcgtggcctccatgagcagcgccacacccgactccagcgcctctgtggagcgtggctccaccccggactccaccttgaagccgctgcgggggcagaagaagatgcgggatgacgggcagggctggaccaaggtggtctatagctgcccctattgttccaagcgggactttaacagcctggccgtgctggagatccacctgaagaccatccacgcggacaagccccagcagagccacacatgtcagatctgcctggactccatgcccaccctctacaacctcaacgagcacgttcgcaagctgcacaagaaccatgcctaccctgtgatgcagtttggcaacatctctgccttccactgcaactactgccccgagatgttcgccgacatcaatagcctgcaggagcacatccgcgtctcccactgcggccccaacgccaacccctctgacggtaataatgctttcttctgcaaccagtgctccatgggtttccttactgagtcctccctcaccgagcacatccagcaggcccactgcagtgtgggcagtgccaaactagagtctccggtggtgcagcccacgcagtccttcatggaggtctattcctgcccctactgcaccaactcccccatctttggctccatcctgaaactcaccaagcacatcaaggagaaccacaagaacattccactggcccacagcaagaagtccaaggccgagcagagcccagtctcgtccgatgtggaggtgtcttccccgaagcggcagcggctctcagcaagcgccaactccatctccaatggggagtatccttgcaatcaatgcgacctcaagttctccaactttgagagcttccagacccacctgaagctgcacctggagctgctgctgcggaagcaagcgtgcccccagtgcaaagaggactttgactcccaggagtccctcctgcagcacctgacagtgcattacatgaccacgtcgacccactatgtgtgcgagagctgcgacaagcaattttcctcggtggatgacctgcagaagcacctgctggacatgcacacctttgtgttgtaccactgcaccctgtgtcaggaggtcttcgactccaaggtgtccatccaggtgcacctggcggtgaagcacagcaatgagaagaagatgtaccgctgcacggcctgcaactgggacttccgcaaggaggctgacctgcaggtgcacgtcaaacacagccacctgggcaacccggccaaggctcacaagtgcatcttctgtggggagaccttcagcaccgaggtggagctgcagtgccacatcaccacacacagcaagaagtataactgtaagttctgcagcaaggccttccacgccatcatcctgctggagaagcacctgcgggagaagcactgtgtgtttgatgctgcgaccgagaacggcacggccaatggggtacccccaatggccaccaagaaagctgagcctgctgacctgcagggcatgctgcttaagaaccctgaggcacctaacagccatgaggccagcgaggatgacgtggacgcgtcggagcccatgtacggctgtgacatctgtggggcggcctacaccatggaggtgctgctgcagaatcaccggctgcgggaccacaatatccggccgggcgaggatgatggctcacgcaagaaggctgagtttatcaagggcagtcacaagtgcaacgtttgttcacggactttcttctcggagaacgggctacgggagcacctgcagacgcaccggggccctgccaagcactacatgtgtcccatctgtggtgagcgcttcccttcgctgctgacgctcaccgaacacaaggtgacccacagcaagagcctggacacgggcacctgtcgcatctgcaagatgcccctgcagagcgaggaggagtttattgagcactgccagatgcaccctgacctgcgcaactcactcacgggcttccgctgtgtggtctgcatgcagacagtcacttccacgcttgagctcaagatccatggcaccttccacatgcagaagctggcgggcagctcagcggcgtcctcccccaatggccaggggctgcagaagctctacaagtgcgccctgtgcctcaaggagttccgcagcaagcaggacctggtgaagcttgacgtcaatgggctgccctacggcctctgcgccggctgcatggcccgcagcgccaacggacaggtgggtggcctggccccgcccgagcccgccgaccggccctgtgccggcctccgttgccccgagtgcagtgtcaagtttgagagtgccgaagacctggagagccacatgcaggtggaccaccgtgacctcacgccggagaccagtgggccccggaaaggcacccagacatcgccagtgccccggaaaaagacataccagtgcatcaagtgccagatgaccttcgagaacgagagagagatccaaatccacgttgccaaccacatgattgaggaaggcatcaaccacgagtgtaagctgtgcaaccagatgttcgactccccggccaagctcctctgtcacctcattgagcacagcttcgagggcatgggcggcaccttcaaatgccccgtgtgtttcacagtcttcgtccaggccaacaagttgcagcagcacatctttgccgtgcacgggcaggaggacaagatctacgactgctcacagtgccctcagaagttcttcttccagaccgagctgcagaaccacacgatgagccagcacgcacagtagtaatgaactagtccgtaacttgaaagtatttcgatttcttggctttatatatcttgtggaaaggacgaagttgcccagacgattgggcgtgc

SEQ ID NO: 1737 - DNA, 1808 bp, Homo sapiens
  source 1..1808: mol_type = genomic DNA
accgccaccatgcggcgctcagtcctggtcaggaacccaggccacaaaggcctgagacccgtttatgaagagctcgactctgactccgaggacctagaccccaatcctgaagatctggacccggtttctgaagacccagagcctgatcctgaagacctcaacactgtcccggaagacgtggaccccagctatgaagatctggagcccgtctcggaggatctggaccccgacgccgaagctccgggctcggaaccccaagatcccgaccccatgtcttcgagtttcgacctcgatccagatgtgattggccccgtacccctgattctcgatcctaacagcgacaccctcagccccggcgatccaaaagtggaccccatctcctctggcctcactgccaccccccaggtcttggccaccagccccgcggtgctccccgcccccgccagcccgccccggcccttctcctgcccggattgcgggcgagccttccgccgcagctccgggctgagccagcatcgccgcacgcacagcggcgagaagccgtaccgctgccccgactgcgggaagtccttcagccacggtgccaccctggctcagcaccgtggcatccacactggggcgcggccgtaccagtgcgcggcctgcggcaaggccttcggctggcgctccacgctgctgaaacatcgcagcagccacagcggggagaagccgcaccactgcccggtgtgtggcaaggccttcgggcacggctcgctcctggcacagcacctgcgcacgcacggcggcccgcggccccacaagtgcccggtgtgcgccaagggcttcggccagggctctgcgctgctcaaacacctgcgcacgcacacgggcgagcggccctacccgtgtccgcagtgcggcaaggccttcgggcagagctcggcgctgctgcagcaccagcgcacacacacggccgagcgcccctaccgctgcccccactgcggcaaagccttcgggcagagctccaacttgcaacaccacctgcgcatccacacgggcgagcggccctacgcctgcccgcactgctccaaggccttcggccagagctcagcgctgctccagcacctgcacgtgcattcgggcgagcgtccctatcgctgtcagctctgcgggaaggccttcggccaggcctccagcctcaccaagcacaaacgggtgcatgagggtgcagccgctgctgcagctgccgcggccgctgcagctgcagcagcggccgccggcctgggcctcgggcctggcctaagccctgcatccatgatgaggccggggcaggtctccctcctgggtcctgatgctgtttctgtgctcggctctggcttgggcctcagccctggcaccagctctggccgcaaccctgaccctggctctgggccgggcactctgccggatcccagctccaaacccctccccggctccagatccacccccagccctactcctgtggaatcttctgacccaaaggctgggcacgacgctggtcccgaccttgtgcccagcccagaccttgatcctgtgcccagcccagaccctgatcctgtgcccagccctgatcccaaccctgtgtcctgccctgacccctgttctcccactcgtggcactgtcagcccagccctccctaccggcgagagtccagagtgggtacaggagcaaggggcactgctggggcctgatggctagtaatgaactagtccgtaacttgaaagtatttcgatttcttggctttatatatcttgtggaaaggacgataaatgatagcaacgcaatgaaag

SEQ ID NO: 1738 - DNA, 2126 bp, Homo sapiens
  source 1..2126: mol_type = genomic DNA
accgccaccatgggaccattgacatttacagatgtggccatagaattctctctggaggagtggcagtgcctggacacagcacaacagaacttatatagaaatgtgatgttagagaactacagaaacttggtcttcctgggtattgctgtttctaagccagacctaatcacttgtctagagaaagaaaaagaaccctgcaagatgaagcgacatgaaatggtggatgaacccccagttgtgtgttctcattttgctgaagacttttggccagagcaagacataaaagattctttccaaaaagtgacactgaggagatatgataaacgtggacatgagaacttacaattaagaaaaggctataaaactgtaggtgattgtaagctatacaaaggaggttataatggacttaaccaatgtttgacacttacccagagcaaaatgtatcactgtgatatatatgtaaaagtcttttatgcattttcaaatgcagatagatacaagacaagacatactggaaagaaacctttccagtgtaaaaaatgtggcaaatcattttgcatgctttcacaactaactcaacataagaaaattcatattagagagaatacctacagatgtaaagaatttggcaatgcctttaatcagtcctcagcccttactaaccataagagaatttatgttggtgagaaacactacagatgtgaagaatgtggcaaagcatttaaccactactcaacccttactaaccataagagaattcatactggagagaaaccctacaaatgtaaagaatgtggcaaagcctttagcaggtactcaacccttactacccataagagaattcattctggagagaagccctacaaatgtgatgaatgtggcaaaacctttagcatatcctcaacctttactaaacataagataattcatactgaagagaaaccctacaaatgtaaagaatgtggcaaagcctttaaccggtcctcaacccttactagccataagagaatacatactggtgagaaaccctacaaatgtgaagaatgtggcaaagcctttaactggtcttcaactcttactaaacataaggtaattcatactggagagaagccctacaaatgtgaagaatgtggcaaagcttttaaccagtcttcaagacttactcgacataaaaaaattcatactggagaggaaccctacaaatttgaaaaatgtggcagagtttttacctgttcctcaacacttactcaagacaagaaaattcatactggagagaaaccctacaattgtgaagaatgtggcaaagtttttacctattcctctacacttactagacataagagaattcatactgaagagaaaccctataaatgtaacgaatgtggcaaagcttttaaccggtcctcacaccttactagccataggagaattcatactggagagaaaccctacaaatgtgaagaatgtggcaaagcctttaagcagtcctcaaaccttaacagtcataaaaaaattcatagtggagagaaaccctacaaatgtgaagaatgtggcaaagcttttatcctgtcctcaagacttactcaacataagaaaattcatactggagagaaaccttacaaatgtgaagaatgtggcaaagcttttaaccggtcctcaagacttactcaacataagaaaattcatactggagagaaaccctacaaatgtaaacaatgtgacaaagcttttacccactcctcaaaccttagtagtcataagaaaattcatagtggagagaaaccctacaaatgtgaagaatgtggcaaagcttttaatcggtcctcaagacttactcaacataagaaaattcatactagagagaaaccttacaaatgtgaagaatgtgccaaagcttttacccggtcttcaagacttactcaacataagaaaattcataggatgggtgtggtggctcatgcctgtaatcccagcactttgggaggcagaggtgggcggatcacgaggtcaggagatcgagaccgtcctggctagtaatgaactagtccgtaacttgaaagtatttcgatttcttggctttatatatcttgtggaaaggacgacataggcgtgagattctacggagt

SEQ ID NO: 1739 - DNA, 1961 bp, Homo sapiens
  source 1..1961: mol_type = genomic DNA
accgccaccatggcctccggtgcgtataacccgtatatagagataattgaacaacccaggcagaggggaatgcgttttagatacaaatgtgaagggcgatcagcaggcagcattccaggggagcacagcacagacaacaaccgaacatacccttctatccagattatgaactattatggaaaaggaaaagtgagaattacattagtaacaaagaatgacccatataaacctcatcctcatgatttagttggaaaagactgcagagacggctactatgaagcagaatttggacaagaacgcagacctttgtttttccaaaatttgggtattcgatgtgtgaagaaaaaagaagtaaaagaagctattattacaagaataaaggcaggaatcaatccattcaatgtccctgaaaaacagctgaatgatattgaagattgtgacctcaatgtggtgagactgtgttttcaagtttttctccctgatgaacatggtaatttgacgactgctcttcctcctgttgtctcgaacccaatttatgacaaccgtgctccaaatactgcagaattaaggatttgtcgtgtaaacaagaattgtggaagtgtcagaggaggagatgaaatatttctactttgtgacaaagttcagaaagatgacatagaagttcgttttgtgttgaacgattgggaagcaaaaggcatcttttcacaagctgatgtacaccgtcaagtagccattgttttcaaaactccaccatattgcaaagctatcacagaacccgtaacagtaaaaatgcagttgcggagaccttctgaccaggaagttagtgaatctatggattttagatatctgccagatgaaaaagatacttacggcaataaagcaaagaaacaaaagacaactctgcttttccagaaactgtgccaggatcacgtagaaacagggtttcgccatgttgaccaggatggtcttgaactcctgacatcaggtgatccacccaccttggcctcccaaagtgctgggattacagttaattttcctgagagaccaagacctggtctcctcggttcaattggagaaggaagatacttcaaaaaagaaccaaacttgttttctcatgatgcagttgtgagagaaatgcctacaggggtttcaagtcaagcagaatcctactatccctcacctgggcccatctcaagtggattgtcacatcatgcctcaatggcacctctgccttcttcaagctggtcatcagtggcccaccccaccccacgctcaggcaatacaaacccactgagtagtttttcaacaaggacacttccttctaattcgcaaggtatcccaccattcctgagaatacctgttgggaatgatttaaatgcttctaatgcttgcatttacaacaatgccgatgacatagtcggaatggaagcgtcatccatgccatcagcagatttatatggtatttctgatcccaacatgctgtctaattgttctgtgaatatgatgacaaccagcagtgacagcatgggagagactgataatccaagacttctgagcatgaatcttgaaaacccctcatgtaattcagtgttagacccaagagacttgagacagctccatcagatgtcctcttccagtatgtcagcaggcgccaattccaatactactgtttttgtttcacaatcagatgcatttgagggatctgacttcagttgtgcagataacagcatgataaatgagtcgggaccatcaaacagtactaatccaaacagtcatggttttgttcaagatagtcagtattcaggtattggcagtatgcaaaatgagcaattgagtgactcctttccatatgaattttttcaagtatagtaatgaactagtccgtaacttgaaagtatttcgatttcttggctttatatatcttgtggaaaggacgacccacattcatgtgaccgtccgta

SEQ ID NO: 1740 - DNA, 1589 bp, Homo sapiens
  source 1..1589: mol_type = genomic DNA
accgccaccatggctgcaaattgcacatcctcatggagtctaggagaatcctgcaacagacctgggttggagctgccacggtctatggcatcctcagaaactcaacttggaaatcacgacgtggaccctgagatttctcacgtgaacttcaggatgttcagctgcccgaaggagtcggaccccatccaggctctgaggaaactcactgagctgtgccatctgtggctgaggcccgacctccacaccaaagagcagatcctggacatgctggtgatggagcagttcatgatctccatgccccaggagctccaggtcttagtcatgatgaacggtgtgcagagctgcaaagacctggaggacctgctacgaaataacagaagacccaagaaatggtctgtggtcaccttccacggaaaggaatatattgtgcaggactcagatatcgagatggctgaagccccctccagtgtcagagatgatctgaaagacgtgtccagccaacgggcctcctcggtgaaccagatgcgtccaggggaaggccaggcccaccgagagctgcagatcctgcccagggtccctgcattgtccaggaggcagggagaggactttctgctacacaagagtattgacgtaacaggtgacccaaagtctctgagacccaagcagaccttggagaaggatctgaaggaaaacagggaagagaacccaggactgacatccccagagcctcagcttccaaagagtcccaatctggtgagagcaaaggaggggaaggaccccccaaaaatagcctctgtggaaaatgtggatgctgacacaccttctgcctgcgttgtggagagagaagcttcgactcacagcgggaacagaggagacgctctgaatctgagcagtcccaaaagaagcaaaccagatgcctcctccatttcccaagaagagcctcaaggagaagccacacctgtgggcaacagagaatccccgggacaagctgggatgaattcaattcattccccaggccctgcgagcccagtcagtcacccggatggccaagaagccaaggcactgccgccctttgcatgtgacgtgtgcgagaagaggtttacgtgtaattccaagctagtcatccacaagagatcacacacaggcgagagactctttcaatgtaatctctgtgggaagcgcttcatgcagcttattagcctccaatttcaccagcgaacccacactggcgagaggccctacacgtgtgacgtctgccagaagcagttcacccagaagtcctacttgaagtgtcacaagagaagccacacaggggagaagcccttcgaatgtaaagactgcaagaaagttttcacctacagggggagcctgaaggagcaccagcgcatccactccggagagaaaccctacaaatgttccaagtgtccaagagccttcagtcggctgaaattgttaagacgccaccagaaaacacatccagaagctacttctcagtagtaatgaactagtccgtaacttgaaagtatttcgatttcttggctttatatatcttgtggaaaggacgaatagttagggcgactgctcgggta

SEQ ID NO: 1741 - DNA, 1589 bp, Homo sapiens
  source 1..1589: mol_type = genomic DNA
accgccaccatggctgcaaattggacactctcatggggtcagggaggaccctgcaacagccctgggtcagacactccacggtctgtggcgtccccagaaactcaacttggaaatcacgacaggaaccctgagacttggcacatgaatttcaggatgttcagctgcccagaggagtcggaccccatccaggctctgaggaaactcactgagctgtgccatctgtggctgaggcccgacctccacaccaaagagcagatcctggacatgctggtgatggagcagttcatgatctccatgccccaggagctccaggtcttagtcaaggtgaacggtgtgcagagctgcaaagacctggaggacctgctacgaaataacagaagacccaagaaatggtctatagtcaacttgctcggcaaagaatatcttatgctgaactcagatgtcgagatggctgaagcccccgccagtgtcagagatgatccgagagacgtgtccagccagtgggcctcctctgtgaaccagatgcatccggggacaggccaggcccgccgagagcagcagatcctgcccagggtcgctgcactgtccaggaggcagggagaggactttctgctacacaagagtattgacgtaacaggtgacccaaactctccgagacccaagcagaccttggagaaggatctgaaggaaaacagggaagagaacccaggactgtcatccccagagcctcagcttccaaagagtcccaatctggtgagagcaaaggaggggaaggaaccccagaaaagagcctctgtggaaaatgtggatgctgacacaccttctgcctgcgttgtggagagagaagctttgactcacagcgggaacagaggagatgctctgaatctgagcagtcccaaaagaagcaaaccagatgcctcctccatttcccaagaagagcctcaaggagaagccacacctgtgggcaacagagaatccccaggacaagctgagatcaatccagttcattccccaggccctgcgggcccggtcagtcacccagatggccaagaagccaaggccctgccgccctttgcatgtgacgtgtgcaataaatcatttaagtatttttcccagctaagcatccacaggaggtcacacacaggagacagaccctttcaatgtgatctctgtcggaagcgcttcttgcagccctcagacctccgagttcaccagcgagtccacactggcgagaggccctacatgtgtgacgtctgccaaaagcggttcgcccacgagtccaccttacagggccacaagaggatccacaccggggagaggccgtttaaatgtaaatactgcagcaaagttttcagccacaaggggaacctgaacgttcaccagcgcacccactccggagagaagccctacaaatgtcccacctgtcaaaaggccttccgtcagctggggacattcaagcgtcacctgaaaacacaccgggaaaccacctcccagtagtaatgaactagtccgtaacttgaaagtatttcgatttcttggctttatatatcttgtggaaaggacgatttacgcacgcgcacaagcgagtg

SEQ ID NO: 1742 - DNA, 917 bp, Homo sapiens
  source 1..917: mol_type = genomic DNA
accgccaccatgttacaggcgtgcaaaatggaagggtttcccctcgtcccccctcagccatcagaagacctggtgccctatgacacggatctataccaacgccaaacgcacgagtattacccctatctcagcagtgatggggagagccatagcgaccattactgggacttccacccccaccacgtgcacagcgagttcgagagcttcgccgagaacaacttcacggagctccagagcgtgcagcccccgcagctgcagcagctctaccgccacatggagctggagcagatgcacgtcctcgatacccccatggtgccaccccatcccagtcttggccaccaggtctcctacctgccccggatgtgcctccagtacccatccctgtccccagcccagcccagctcagatgaggaggagggcgagcggcagagccccccactggaggtgtctgacggcgaggcggatggcctggagcccgggcctgggctcctgcctggggagacaggcagcaagaagaagatccgcctgtaccagttcctgttggacctgctccgcagcggcgacatgaaggacagcatctggtgggtggacaaggacaagggcaccttccagttctcgtccaagcacaaggaggcgctggcgcaccgctggggcatccagaagggcaaccgcaagaagatgacctaccagaagatggcgcgcgcgctgcgcaactacggcaagacgggcgaggtcaagaaggtgaagaagaagctcacctaccagttcagcggcgaagtgctgggccgcgggggcctggccgagcggcgccacccgccccactagtaatgaactagtccgtaacttgaaagtatttcgatttcttggctttatatatcttgtggaaaggacgatctgcattacttggccaggagtgt

SEQ ID NO: 1743 - DNA, 914 bp, Homo sapiens
  source 1..914: mol_type = genomic DNA
accgccaccatgttacaggcgtgcaaaatggaagggtttcccctcgtcccccctccatcagaagacctggtgccctatgacacggatctataccaacgccaaacgcacgagtattacccctatctcagcagtgatggggagagccatagcgaccattactgggacttccacccccaccacgtgcacagcgagttcgagagcttcgccgagaacaacttcacggagctccagagcgtgcagcccccgcagctgcagcagctctaccgccacatggagctggagcagatgcacgtcctcgatacccccatggtgccaccccatcccagtcttggccaccaggtctcctacctgccccggatgtgcctccagtacccatccctgtccccagcccagcccagctcagatgaggaggagggcgagcggcagagccccccactggaggtgtctgacggcgaggcggatggcctggagcccgggcctgggctcctgcctggggagacaggcagcaagaagaagatccgcctgtaccagttcctgttggacctgctccgcagcggcgacatgaaggacagcatctggtgggtggacaaggacaagggcaccttccagttctcgtccaagcacaaggaggcgctggcgcaccgctggggcatccagaagggcaaccgcaagaagatgacctaccagaagatggcgcgcgcgctgcgcaactacggcaagacgggcgaggtcaagaaggtgaagaagaagctcacctaccagttcagcggcgaagtgctgggccgcgggggcctggccgagcggcgccacccgccccactagtaatgaactagtccgtaacttgaaagtatttcgatttcttggctttatatatcttgtggaaaggacgaaagttcgtgctttagtgaccatga

SEQ ID NO: 1744 - DNA, 1604 bp, Homo sapiens
  source 1..1604: mol_type = genomic DNA
accgccaccatgtcgggccccggaccgcgggagccgccgccggaggcaggcgcggcaggcggcgaggcggccgtcgagggcgcgggcggcggggacgcggcgctgggcgagccggggctgagcttcacgaccaccgacctgagcctggtggagatgacggaggtggagtacacgcagctgcagcacatcctctgctcgcacatggaggcggcggctgacggcgagctcgagacgcgcctcaactcggcgctgctggcggcggcgggcccgggcgcaggcgcgggcggcttcgcggcgggcggtcaggggggcgcggcgcccgtgtaccccgtgctgtgcccgtccgcgctggcggccgacgcgccctgcctgggccacatcgacttccaggagctgcgcatgatgctgctaagcgaggcgggcgcggcggagaagacgtcgggcggcggggacggagcgagggcccgggccgacggcgccgccaaggagggcgcgggcgcggctgcggctgcggctggacccgacggcgcgcccgaggcccgggccaagccggccgtgcgcgtccgcctggaggaccgcttcaacagcatccccgccgagccgccgcccgcgccgcgcggccccgagccccccgagccgggcggggcgctcaacaatttggtaactctcattcgacatccatctgaactaatgaatgttcctcttcagcaacaaaacaaatgtacagcattagtgaaaaataaaactgcggctacaactactgctttgcaatttacatacccactgtttactacaaatgcttgctctactagtggaaattctaatctttcacagacacagagttctagtaactcatgttctgtacttgaagctgccaagcaccaggatattggattgcctagagcattttctttctgttatcagcaagaaattgaatccactaaacagacgttaggtagtagaaacaaagttttgcctgagcaagtttggattaaagtgggagaagcagcgctatgcaaacaagcactgaagaggaatcggagtagaatgcgtcagttggacacaaatgtagagcgaagagcccttggagagattcagaatgtgggcgaaggtgccaccgccacacaaggcgcttggcagtcctcggagtcctcacaggcaaacctgggggagcaggcccagagtgggccccagggaggaaggtctcaacgtagggagaggcataaccgaatggaaagagatagaaggcgcagaatccgcatttgctgtgatgagttgaatctcttagtgccgttctgcaatgccgagactgacaaggccacaactctgcagtggaccacagcattcctgaaatacatccaggaaagacatggagattctcttaaaaaggaatttgagagcgtattttgcggtaaaactggccgaaggctaaagctgaccagaccggactccttggtgacctgtcctgcacaggggagtttacagagcagcccctcgatggagatcaagtagtaatgaactagtccgtaacttgaaagtatttcgatttcttggctttatatatcttgtggaaaggacgatattcgcattagtatgattatgaa

SEQ ID NO: 1745 - DNA, 635 bp, Homo sapiens
  source 1..635: mol_type = genomic DNA
accgccaccatgctcgccctggaggctgcacagctcgacgggccacacttcagctgtctgtacccagatggcgtcttctatgacctggacagctgcaagcattccagctaccctgattcagagggggctcctgactccctgtgggactggactgtggccccacctgtcccagccaccccctatgaagccttcgacccggcagcagccgcttttagccacccccaggctgcccagctctgctacgaaccccccacctacagccctgcagggaacctcgaactggcccccagcctggaggccccggggcctggcctccctgcataccccacggagaacttcgctagccagaccctggttcccccggcatatgccccgtaccccagccctgtgctatcagaggaggaagacttaccgttggacagccctgccctggaggtctcggacagcgagtcggatgaggccctcgtggctggccccgaggggaagggatccgagggactcgcaagaagctgcgcctgtaccagttcctgctggggctactagtaatgaactagtccgtaacttgaaagtatttcgatttcttggctttatatatcttgtggaaaggacgaatatgtgagccaaagatgattaaa

SEQ ID NO: 1746 - DNA, 890 bp, Homo sapiens
  source 1..890: mol_type = genomic DNA
accgccaccatgctcgccctggaggctgcacagctcgacgggccacacttcagctgtctgtacccagatggcgtcttctatgacctggacagctgcaagcattccagctaccctgattcagagggggctcctgactccctgtgggactggactgtggccccacctgtcccagccaccccctatgaagccttcgacccggcagcagccgcttttagccacccccaggctgcccagctctgctacgaaccccccacctacagccctgcagggaacctcgaactggcccccagcctggaggccccggggcctggcctccctgcataccccacggagaacttcgctagccagaccctggttcccccggcatatgccccgtaccccagccctgtgctatcagaggaggaagacttaccgttggacagccctgccctggaggtctcggacagcgagtcggatgaggccctcgtggctggccccgaggggaagggatccgaggcagggactcgcaagaagctgcgcctgtaccagttcctgctggggctactgacgcgcggggacatgcgtgagtgcgtgtggtgggtggagccaggcgccggcgtcttccagttctcctccaagcacaaggaactcctggcgcgccgctggggccagcagaaggggaaccgcaagcgcatgacctaccagaagctggcgcgcgccctccgaaactacgccaagaccggcgagatccgcaaggtcaagcgcaagctcacctaccagttcgacagcgcgctgctgcctgcagtccgccgggcctagtaatgaactagtccgtaacttgaaagtatttcgatttcttggctttatatatcttgtggaaaggacgagacgaatagtaggttcttcgatcg

SEQ ID NO: 1747 - DNA, 617 bp, Homo sapiens
  source 1..617: mol_type = genomic DNA
accgccaccatggcgtcttctatgacctggacagctgcaagcattccagctaccctgattcagagggggctcctgaccctggttcccccggcatatgccccgtaccccagccctgtgctatcagaggaggaagacttaccgttggacagccctgccctggaggtctcggacagcgagtcggatgaggccctcgtggctggccccgaggggaagggatccgaggcagggactcgcaagaagctgcgcctgtaccagttcctgctggggctactgacgcgcggggacatgcgtgagtgcgtgtggtgggtggagccaggcgccggcgtcttccagttctcctccaagcacaaggaactcctggcgcgccgctggggccagcagaaggggaaccgcaagcgcatgacctaccagaagctggcgcgcgccctccgaaactacgccaagaccggcgagatccgcaaggtcaagcgcaagctcacctaccagttcgacagcgcgctgctgcctgcagtccgccgggcctagtaatgaactagtccgtaacttgaaagtatttcgatttcttggctttatatatcttgtggaaaggacgagtacatatagccgcggaggatgct

SEQ ID NO: 1748 - DNA, 1013 bp, Homo sapiens
  source 1..1013: mol_type = genomic DNA
accgccaccatggcagaggtggccagacaagcacaaacctctcaggagccctaccacgacaaggccagagaacaccccgatgacggaaagcatccagatggaggcctctacaacaagggaccctcctactcgagttattccgggtacataatgatgccaaatatgaataacgacccatacatgtcaaatggatctctttctccacccatcccgagaacatcaaataaagtgcccgtggtgcagccatcccatgcggtccatcctctcacccccctcatcacttacagtgacgagcacttttctccaggatcacacccgtcacacatcccatcagatgtcaactccaaacaaggcatgtccagacatcctccagctcctgatatccctactttttatcccttgtctccgggtggtgttggacagatcaccccacctcttggctggttttcccatcatatgattcccggtcctcctggtccccacacaactggcatccctcatccagctattgtaacacctcaggtcaaacaggaacatccccacactgacagtgacctaatgcacgtgaagcctcagcatgaacagagaaaggagcaggagccaaaaagacctcacattaagaagcctctgaatgcttttatgttatacatgaaagaaatgagagcgaatgtcgttgctgagtgtactctaaaagaaagtgcagctatcaaccagattcttggcagaaggtggcatgccctctcccgtgaagagcaggctaaatattatgaattagcacggaaagaaagacagctacatatgcagctttatccaggctggtctgcaagagacaattatggtaagaaaaagaagaggaagagagagaaactacaggaatctgcatcaggtacaggtccaagaatgacagctgcctacatctagtaatgaactagtccgtaacttgaaagtatttcgatttcttggctttatatatcttgtggaaaggacgagctctaaggtgagattcgctctac

SEQ ID NO: 1749 - DNA, 1262 bp, Homo sapiens
  source 1..1262: mol_type = genomic DNA
accgccaccatgccccaactctccggaggaggtggcggcggcgggggggacccggaactctgcgccacggacgagatgatccccttcaaggacgagggcgatcctcagaaggaaaagatcttcgccgagatcagtcatcccgaagaggaaggcgatttagctgacatcaagtcttccttggtgaacgagtctgaaatcatcccggccagcaacggacacgaggtggccagacaagcacaaacctctcaggagccctaccacgacaaggccagagaacaccccgatgacggaaagcatccagatggaggcctctacaacaagggaccctcctactcgagttattccgggtacataatgatgccaaatatgaataacgacccatacatgtcaaatggatctctttctccacccatcccgagaacatcaaataaagtgcccgtggtgcagccatcccatgcggtccatcctctcacccccctcatcacttacagtgacgagcacttttctccaggatcacacccgtcacacatcccatcagatgtcaactccaaacaaggcatgtccagacatcctccagctcctgatatccctactttttatcccttgtctccgggtggtgttggacagatcaccccacctcttggctggttttcccatcatatgattcccggtcctcctggtccccacacaactggcatccctcatccagctattgtaacacctcaggtcaaacaggaacatccccacactgacagtgacctaatgcacgtgaagcctcagcatgaacagagaaaggagcaggagccaaaaagacctcacattaagaagcctctgaatgcttttatgttatacatgaaagaaatgagagcgaatgtcgttgctgagtgtactctaaaagaaagtgcagctatcaaccagattcttggcagaaggtggcatgccctctcccgtgaagagcaggctaaatattatgaattagcacggaaagaaagacagctacatatgcagctttatccaggctggtctgcaagagacaattatggtaagaaaaagaagaggaagagagagaaactacaggaatctgcatcaggtggaaaacgaagctcattcccaacgtgcaaagccaaggcagcgaccccaggacctcttctggagatggaagcttgttagtaatgaactagtccgtaacttgaaagtatttcgatttcttggctttatatatcttgtggaaaggacgaccataaccacaatagtgtatacag

SEQ ID NO: 1750 - DNA, 1217 bp, Homo sapiens
  source 1..1217: mol_type = genomic DNA
accgccaccatgccccaactctccggaggaggtggcggcggcgggggggacccggaactctgcgccacggacgagatgatccccttcaaggacgagggcgatcctcagaaggaaaagatcttcgccgagatcagtcatcccgaagaggaaggcgatttagctgacatcaagtcttccttggtgaacgagtctgaaatcatcccggccagcaacggacacgaggtggccagacaagcacaaacctctcaggagccctaccacgacaaggccagagaacaccccgatgacggaaagcatccagatggaggcctctacaacaagggaccctcctactcgagttattccgggtacataatgatgccaaatatgaataacgacccatacatgtcaaatggatctctttctccacccatcccgagaacatcaaataaagtgcccgtggtgcagccatcccatgcggtccatcctctcacccccctcatcacttacagtgacgagcacttttctccaggatcacacccgtcacacatcccatcagatgtcaactccaaacaaggcatgtccagacatcctccagctcctgatatccctactttttatcccttgtctccgggtggtgttggacagatcaccccacctcttggctggttttcccatcatatgattcccggtcctcctggtccccacacaactggcatccctcatccagctattgtaacacctcaggtcaaacaggaacatccccacactgacagtgacctaatgcacgtgaagcctcagcatgaacagagaaaggagcaggagccaaaaagacctcacattaagaagcctctgaatgcttttatgttatacatgaaagaaatgagagcgaatgtcgttgctgagtgtactctaaaagaaagtgcagctatcaaccagattcttggcagaaggtggcatgccctctcccgtgaagagcaggctaaatattatgaattagcacggaaagaaagacagctacatatgcagctttatccaggctggtctgcaagagacaattatggtaagaaaaagaagaggaagagagagaaactacaggaatctgcatcaggtacaggtccaagaatgacagctgcctacatctagtaatgaactagtccgtaacttgaaagtatttcgatttcttggctttatatatcttgtggaaaggacgattcacgtgtgtgaagcggtgacgt

SEQ ID NO: 1751 - DNA, 2939 bp, Homo sapiens
  source 1..2939: mol_type = genomic DNA
accgccaccatggcgccaaatcttaaaggcagaccacgcaaaaagaaaccatgcccacaaagaagagattcattcagtggtgttaaggattccaacaacaattccgatggcaaagccgttgccaaggtgaaatgtgaggccaggtcagccttgaccaagccgaagaataaccataactgtaaaaaagtctcaaatgaagaaaaaccaaaggttgccattggtgaagagtgcagggcagatgaacaagccttcttggtggcactttataaatacatgaaagaaaggaaaacgccgatagaacgaataccctatttaggttttaaacagattaacctttggactatgtttcaagctgctcaaaaactgggaggatatgaaacaataacagcccgccgtcagtggaaacatatttatgatgaattaggcggtaatcctgggagcaccagcgctgccacttgtacccgcagacattatgaaagattaatcctaccatatgaaagatttattaaaggagaagaagataagcccctgcctccaatcaaacctcggaaacaggagaacagttcacaggaaaatgagaacaaaacaaaagtatctggaaccaaacgcatcaaacatgaaatacctaaaagcaagaaagaaaaagaaaatgccccaaagccccaggatgcagcagaggtttcatcagagcaagaaaaagaacaagagactttaataagccagaaaagcatccctgagcctctcccagcagcagacatgaagaaaaaaatagaagggtatcaggaattttcagcgaagcccctggcatccagagtagacccagagaaggacaacgaaacagaccaaggttccaacagtgagaaggtggcagaggaggcgggagagaaggggcccacacctccactcccaagtgctcctctggccccagaaaaagattcagccttggtccctggggccagcaaacagccactcacctctcctagtgccctggtggactcaaaacaagaatccaaactgtgctgttttacagagagccctgaaagtgaaccccaagaagcatccttccccagcttccccaccacacagccaccgctggcaaaccagaatgagacggaggatgacaaactgcccgccatggcagattacattgccaactgcaccgtgaaggtggaccagctgggcagtgacgacatccacaatgcgctcaagcagaccccaaaggtccttgtggtccagtcgtttgacatgttcaaagacaaagacctgactgggcccatgaacgagaaccatggacttaattacacgcccctgctctactctaggggcaacccaggcatcatgtccccactggccaagaaaaagcttttgtcccaagtgagtggggccagcctctccagcagctacccttatggctccccaccccctttgatcagcaaaaagaaactgattgctagggatgacttgtgttccagtttgtcccagacccaccatggccaaagcactgaccatatggcggtcagccggccatcagtgattcagcacgtccagagtttcagaagcaagccctcggaagagagaaagaccatcaatgacatctttaagcatgagaaactgagtcgatcagatccccaccgctgcagcttctccaagcatcaccttaacccccttgctgactcctacgtcctgaagcaagaaattcaggagggcaaggataaactcttagagaaaagggccctcccccattcccacatgcctagcttcctggctgacttctactcgtcccctcatctccatagcctctacagacacaccgagcaccatcttcataatgaacagacatccaaatacccttccagggacatgtacagggaatcggaaaacagttcttttccttcccacagacaccaagaaaagctccatgtaaattatctcacgtccctgcacctgcaagacaaaaagtcggcggcagcagaagcccctacggatgatcagcctacagatctgagccttcccaagaacccgcacaaacctaccggcaaggtcctgggcctggctcattccaccacagggccccaggagagcaaaggcatctcccagttccaggtcttaggcagccagagtcgagactgtcaccccaaagcctgtcgggtatcacccatgaccatgtcaggccctaaaaaataccctgaatcgctttcaagatcaggaaaacctcaccatgtgagactggagaatttcaggaagatggaaggcatggtccacccaatcctgcaccggaaaatgagcccgcagaacattggggcggcgcggccgatcaagcgcagcctggaggatttggaccttgtgattgcagggaaaaaggcccgggcagtgtctcccttagacccatccaaggaggtctctgggaaggagaaggcctctgagcaggagagtgaaggcagcaaagcagcgcacggtgggcattccgggggcggatcagaaggccacaagcttcccctctcctcccctatcttcccaggtctgtattccgggagcctgtgtaactcgggcctcaactccaggctcccggctgggtattctcattctctgcagtacttgaaaaaccagactgtgctttctccactcatgcagcccctggctttccactcgcttgtgatgcaaagaggaatttttacatcaccgacaaattctcagcagctgtacagacacttggctgcggctacacctgtaggaagttcatatggggaccttttgcataacagcatttaccctttagctgctataaatcctcaagctgcctttccatcttcccagctgtcatccgtgcaccccagtacaaaactgtagtaatgaactagtccgtaacttgaaagtatttcgatttcttggctttatatatcttgtggaaaggacgatgaaacctccacggcactccatga

SEQ ID NO: 1752 - DNA, 3668 bp, Homo sapiens
  source 1..3668: mol_type = genomic DNA
accgccaccatggagcccaactcactccagtgggtcggctcaccgtgtggcttgcacggaccttacattttctacaaggcttttcaattccaccttgaaggcaaaccaagaattttgtcccttggcgactttttctttgtaagatgtacgccaaaggatccgatttgcatagcggagctccagctgttgtgggaagagaggaccagccggcaacttttatccagctctaaactttatttcctcccagaagacactccccagggcagaaatagcgaccatggcgaggatgaagtcattgctgtttccgaaaaggtgattgtgaagcttgaagacctggtcaagtgggtacattctgatttctccaagtggagatgtggcttccacgctggaccagtgaaaactgaggccttgggaaggaatggacagaaggaagctctgctgaagtacaggcagtcaaccctaaacagtggactcaacttcaaagacgttctcaaggagaaggcagacctgggggaggacgaggaagaaacgaacgtgatagttctcagctacccccagtactgccggtaccgctcgatgctgaaacgcatccaggataagccatcttccattctaacggaccagtttgcattggccctggggggcattgcagtggtcagcaggaaccctcagatcctgtactgtcgggacacctttgaccacccgactctcatagaaaacgagagtatatgcgatgagtttgcgccaaatcttaaaggcagaccacgcaaaaagaaaccatgcccacaaagaagagattcattcagtggtgttaaggattccaacaacaattccgatggcaaagccgttgccaaggtgaaatgtgaggccaggtcagccttgaccaagccgaagaataaccataactgtaaaaaagtctcaaatgaagaaaaaccaaaggttgccattggtgaagagtgcagggcagatgaacaagccttcttggtggcactttataaatacatgaaagaaaggaaaacgccgatagaacgaataccctatttaggttttaaacagattaacctttggactatgtttcaagctgctcaaaaactgggaggatatgaaacaataacagcccgccgtcagtggaaacatatttatgatgaattaggcggtaatcctgggagcaccagcgctgccacttgtacccgcagacattatgaaagattaatcctaccatatgaaagatttattaaaggagaagaagataagcccctgcctccaatcaaacctcggaaacaggagaacagttcacaggaaaatgagaacaaaacaaaagtatctggaaccaaacgcatcaaacatgaaatacctaaaagcaagaaagaaaaagaaaatgccccaaagccccaggatgcagcagaggtttcatcagagcaagaaaaagaacaagagactttaataagccagaaaagcatccctgagcctctcccagcagcagacatgaagaaaaaaatagaagggtatcaggaattttcagcgaagcccctggcatccagagtagacccagagaaggacaacgaaacagaccaaggttccaacagtgagaaggtggcagaggaggcgggagagaaggggcccacacctccactcccaagtgctcctctggccccagaaaaagattcagccttggtccctggggccagcaaacagccactcacctctcctagtgccctggtggactcaaaacaagaatccaaactgtgctgttttacagagagccctgaaagtgaaccccaagaagcatccttccccagcttccccaccacacagccaccgctggcaaaccagaatgagacggaggatgacaaactgcccgccatggcagattacattgccaactgcaccgtgaaggtggaccagctgggcagtgacgacatccacaatgcgctcaagcagaccccaaaggtccttgtggtccagtcgtttgacatgttcaaagacaaagacctgactgggcccatgaacgagaaccatggacttaattacacgcccctgctctactctaggggcaacccaggcatcatgtccccactggccaagaaaaagcttttgtcccaagtgagtggggccagcctctccagcagctacccttatggctccccaccccctttgatcagcaaaaagaaactgattgctagggatgacttgtgttccagtttgtcccagacccaccatggccaaagcactgaccatatggcggtcagccggccatcagtgattcagcacgtccagagtttcagaagcaagccctcggaagagagaaagaccatcaatgacatctttaagcatgagaaactgagtcgatcagatccccaccgctgcagcttctccaagcatcaccttaacccccttgctgactcctacgtcctgaagcaagaaattcaggagggcaaggataaactcttagagaaaagggccctcccccattcccacatgcctagcttcctggctgacttctactcgtcccctcatctccatagcctctacagacacaccgagcaccatcttcataatgaacagacatccaaatacccttccagggacatgtacagggaatcggaaaacagttcttttccttcccacagacaccaagaaaagctccatgtaaattatctcacgtccctgcacctgcaagacaaaaagtcggcggcagcagaagcccctacggatgatcagcctacagatctgagccttcccaagaacccgcacaaacctaccggcaaggtcctgggcctggctcattccaccacagggccccaggagagcaaaggcatctcccagttccaggtcttaggcagccagagtcgagactgtcaccccaaagcctgtcgggtatcacccatgaccatgtcaggccctaaaaaataccctgaatcgctttcaagatcaggaaaacctcaccatgtgagactggagaatttcaggaagatggaaggcatggtccacccaatcctgcaccggaaaatgagcccgcagaacattggggcggcgcggccgatcaagcgcagcctggaggatttggaccttgtgattgcagggaaaaaggcccgggcagtgtctcccttagacccatccaaggaggtctctgggaaggagaaggcctctgagcaggagagtgaaggcagcaaagcagcgcacggtgggcattccgggggcggatcagaaggccacaagcttcccctctcctcccctatcttcccaggtctgtattccgggagcctgtgtaactcgggcctcaactccaggctcccggctgggtattctcattctctgcagtacttgaaaaaccagactgtgctttctccactcatgcagcccctggctttccactcgcttgtgatgcaaagaggaatttttacatcaccgacaaattctcagcagctgtacagacacttggctgcggctacacctgtaggaagttcatatggggaccttttgcataacagcatttaccctttagctgctataaatcctcaagctgcctttccatcttcccagctgtcatccgtgcaccccagtacaaaactgtagtaatgaactagtccgtaacttgaaagtatttcgatttcttggctttatatatcttgtggaaaggacgatcagctacttcctttacaggtccc

SEQ ID NO: 1753 - DNA, 1682 bp, Homo sapiens
  source 1..1682: mol_type = genomic DNA
accgccaccatgaaggagcgacacacgcccatcgagagggtgccccatctcggcttcaagcagattaacctgtggaagatctacaaagcagtggagaagctgggggcctatgagctggtgaccgggcgccgcctctggaagaacgtgtacgacgagctggggggcagcccaggcagcaccagcgcggccacgtgcacgcgccgccactacgagaggctggtcctgccatacgtgcggcacctgaagggggaggatgacaagccgctgcccacctccaagcccaggaaacagtacaagatggctaaggagaacaggggggatgatggggccaccgagaggccgaagaaggccaaggaggagcggcgcatggaccagatgatgccaggaaagaccaaagcagatgctgctgacccagcaccacttcccagccaggagccccccaggaacagcacagaacagcagggcctggcctctgggtcttctgtgtcctttgtgggtgccagcggctgtcctgaggcctacaagcggctcctatccagcttctactgcaaggggacacacggcatcatgtcaccactggccaaaaagaagctcctggcccaggtgagcaaggtggaggccttgcagtgccaggaggagggctgccgccatggggcagagccccaggcgtccccagctgttcacctcccagagagtccccagagccccaaagggctgactgagaactccaggcaccggctgacccctcaggagggattgcaggccccaggtggcagcctcagagaggaggcgcaggcaggcccctgcccggcagcccccatcttcaagggctgcttctacacccaccccaccgaggtgctgaagcctgtcagccagcaccccagggacttcttctctagacttaaagatggggtgctattggggcctcctggcaaagaggggctgtcagtgaaagagccccagctggtgtggggcggagacgctaaccgcccttctgcgttccataaaggtggctccagaaagggcatcctctaccccaagcccaaagcctgctgggtgtcccccatggccaaggtcccagccgagagccccacgctcccgcccaccttccccagtagcccaggcctgggcagcaagcgcagcctggaggaagagggtgctgcccacagtgggaagagactgcgggccgtgtctccctttcttaaggaggcggatgccaagaagtgtggggccaaacctgcagggtccggcctggtctcctgccttctgggcccagccctggggcctgtgcccccagaggcctacaggggcaccatgctgcactgcccgctgaacttcactggcaccccgggccccttgaagggccaggctgcactccccttcagccccctggtcatcccggccttcccggcccacttcctggccaccgcaggcccctcgcccatggccgctggcctgatgcacttccccccaacgtccttcgacagtgccctccgccacagactttgcccggcctcatctgcctggcacgcaccaccagtcacaacctatgcagcgccccacttcttccacctcaacaccaagctgtagtaatgaactagtccgtaacttgaaagtatttcgatttcttggctttatatatcttgtggaaaggacgaaacccgcttgcgatctcgatatcc

SEQ ID NO: 1754 - DNA, 1886 bp, Homo sapiens
  source 1..1886: mol_type = genomic DNA
accgccaccatggcagcccctgtcaaagggaacaggaagcagtccacggagggtgacgccctagacccacctgcatcccccaaacctgctggcaagcagaacggaatccagaaccccatctcgctggaggactcccccgaggcaggcggggagcgggaggaggagcaggagcgggaggaggagcaggccttcctggtcagcctctacaagttcatgaaggagcgacacacgcccatcgagagggtgccccatctcggcttcaagcagattaacctgtggaagatctacaaagcagtggagaagctgggggcctatgagctggtgaccgggcgccgcctctggaagaacgtgtacgacgagctggggggcagcccaggcagcaccagcgcggccacgtgcacgcgccgccactacgagaggctggtcctgccatacgtgcggcacctgaagggggaggatgacaagccgctgcccacctccaagcccaggaaacagtacaagatggctaaggagaacaggggggatgatggggccaccgagaggccgaagaaggccaaggaggagcggcgcatggaccagatgatgccaggaaagaccaaagcagatgctgctgacccagcaccacttcccagccaggagccccccaggaacagcacagaacagcagggcctggcctctgggtcttctgtgtcctttgtgggtgccagcggctgtcctgaggcctacaagcggctcctatccagcttctactgcaaggggacacacggcatcatgtcaccactggccaaaaagaagctcctggcccaggtgagcaaggtggaggccttgcagtgccaggaggagggctgccgccatggggcagagccccaggcgtccccagctgttcacctcccagagagtccccagagccccaaagggctgactgagaactccaggcaccggctgacccctcaggagggattgcaggccccaggtggcagcctcagagaggaggcgcaggcaggcccctgcccggcagcccccatcttcaagggctgcttctacacccaccccaccgaggtgctgaagcctgtcagccagcaccccagggacttcttctctagacttaaagatggggtgctattggggcctcctggcaaagaggggctgtcagtgaaagagccccagctggtgtggggcggagacgctaaccgcccttctgcgttccataaaggtggctccagaaagggcatcctctaccccaagcccaaagcctgctgggtgtcccccatggccaaggtcccagccgagagccccacgctcccgcccaccttccccagtagcccaggcctgggcagcaagcgcagcctggaggaagagggtgctgcccacagtgggaagagactgcgggccgtgtctccctttcttaaggaggcggatgccaagaagtgtggggccaaacctgcagggtccggcctggtctcctgccttctgggcccagccctggggcctgtgcccccagaggcctacaggggcaccatgctgcactgcccgctgaacttcactggcaccccgggccccttgaagggccaggctgcactccccttcagccccctggtcatcccggccttcccggcccacttcctggccaccgcaggcccctcgcccatggccgctggcctgatgcacttccccccaacgtccttcgacagtgccctccgccacagactttgcccggcctcatctgcctggcacgcaccaccagtcacaacctatgcagcgccccacttcttccacctcaacaccaagctgtagtaatgaactagtccgtaacttgaaagtatttcgatttcttggctttatatatcttgtggaaaggacgacctggtaagcaggacataatttct

SEQ ID NO: 1755 - DNA, 2012 bp, Homo sapiens
  source 1..2012: mol_type = genomic DNA
accgccaccatggcccagtccaccgccacctcccctgatgggggcaccacgtttgagcacctctggagctctctggaaccagacagcacctacttcgaccttccccagtcaagccgggggaataatgaggtggtgggcggaacggattccagcatggacgtcttccacctggagggcatgactacatctgtcatggcccagttcaatctgctgagcagcaccatggaccagatgagcagccgcgcggcctcggccagcccctacaccccagagcacgccgccagcgtgcccacccactcgccctacgcacaacccagctccaccttcgacaccatgtcgccggcgcctgtcatcccctccaacaccgactaccccggaccccaccactttgaggtcactttccagcagtccagcacggccaagtcagccacctggacgtactccccgctcttgaagaaactctactgccagatcgccaagacatgccccatccagatcaaggtgtccaccccgccacccccaggcaccgccatccgggccatgcctgtttacaagaaagcggagcacgtgaccgacgtcgtgaaacgctgccccaaccacgagctcgggagggacttcaacgaaggacagtctgctccagccagccacctcatccgcgtggaaggcaataatctctcgcagtatgtggatgaccctgtcaccggcaggcagagcgtcgtggtgccctatgagccaccacaggtggggacggaattcaccaccatcctgtacaacttcatgtgtaacagcagctgtgtagggggcatgaaccggcggcccatcctcatcatcatcaccctggagatgcgggatgggcaggtgctgggccgccggtcctttgagggccgcatctgcgcctgtcctggccgcgaccgaaaagctgatgaggaccactaccgggagcagcaggccctgaacgagagctccgccaagaacggggccgccagcaagcgtgccttcaagcagagcccccctgccgtccccgcccttggtgccggtgtgaagaagcggcggcatggagacgaggacacgtactaccttcaggtgcgaggccgggagaactttgagatcctgatgaagctgaaagagagcctggagctgatggagttggtgccgcagccactggtggactcctatcggcagcagcagcagctcctacagaggccgagtcacctacagcccccgtcctacgggccggtcctctcgcccatgaacaaggtgcacgggggcatgaacaagctgccctccgtcaaccagctggtgggccagcctcccccgcacagttcggcagctacacccaacctggggcccgtgggccccgggatgctcaacaaccatggccacgcagtgccagccaacggcgagatgagcagcagccacagcgcccagtccatggtctcggggtcccactgcactccgccacccccctaccacgccgaccccagcctcgtcagttttttaacaggattggggtgtccaaactgcatcgagtatttcacctcccaagggttacagagcatttaccacctgcagaacctgaccattgaggacctgggggccctgaagatccccgagcagtaccgcatgaccatctggcggggcctgcaggacctgaagcagggccacgactacagcaccgcgcagcagctgctccgctctagcaacgcggccaccatctccatcggcggctcaggggaactgcagcgccagcgggtcatggaggccgtgcacttccgcgtgcgccacaccatcaccatccccaaccgcggcggcccaggcggcggccctgacgagtgggcggacttcggcttcgacctgcccgactgcaaggcccgcaagcagcccatcaaggaggagttcacggaggccgagatccactagtaatgaactagtccgtaacttgaaagtatttcgatttcttggctttatatatcttgtggaaaggacgaggatgaccctacgaacttacaaat

SEQ ID NO: 1756 - DNA, 1382 bp, Homo sapiens
  source 1..1382: mol_type = genomic DNA
accgccaccatgctgtacgtcggtgaccccgcacggcacctcgccacggcccagttcaatctgctgagcagcaccatggaccagatgagcagccgcgcggcctcggccagcccctacaccccagagcacgccgccagcgtgcccacccactcgccctacgcacaacccagctccaccttcgacaccatgtcgccggcgcctgtcatcccctccaacaccgactaccccggaccccaccactttgaggtcactttccagcagtccagcacggccaagtcagccacctggacgtactccccgctcttgaagaaactctactgccagatcgccaagacatgccccatccagatcaaggtgtccaccccgccacccccaggcaccgccatccgggccatgcctgtttacaagaaagcggagcacgtgaccgacgtcgtgaaacgctgccccaaccacgagctcgggagggacttcaacgaaggacagtctgctccagccagccacctcatccgcgtggaaggcaataatctctcgcagtatgtggatgaccctgtcaccggcaggcagagcgtcgtggtgccctatgagccaccacaggtggggacggaattcaccaccatcctgtacaacttcatgtgtaacagcagctgtgtagggggcatgaaccggcggcccatcctcatcatcatcaccctggagatgcgggatgggcaggtgctgggccgccggtcctttgagggccgcatctgcgcctgtcctggccgcgaccgaaaagctgatgaggaccactaccgggagcagcaggccctgaacgagagctccgccaagaacggggccgccagcaagcgtgccttcaagcagagcccccctgccgtccccgcccttggtgccggtgtgaagaagcggcggcatggagacgaggacacgtactaccttcaggtgcgaggccgggagaactttgagatcctgatgaagctgaaagagagcctggagctgatggagttggtgccgcagccactggtggactcctatcggcagcagcagcagctcctacagaggccgccccgggatgctcaacaaccatggccacgcagtgccagccaacggcgagatgagcagcagccacagcgcccagtccatggtctcggggtcccactgcactccgccacccccctaccacgccgaccccagcctcgtcagttttttaacaggattggggtgtccaaactgcatcgagtatttcacctcccaagggttacagagcatttaccacctgcagaacctgaccattagtaatgaactagtccgtaacttgaaagtatttcgatttcttggctttatatatcttgtggaaaggacgaccctagaatttgctgcgactcagg

SEQ ID NO: 1757 - DNA, 1601 bp, Homo sapiens
  source 1..1601: mol_type = genomic DNA
accgccaccatggcccagtccaccgccacctcccctgatgggggcaccacgtttgagcacctctggagctctctggaaccagacagcacctacttcgaccttccccagtcaagccgggggaataatgaggtggtgggcggaacggattccagcatggacgtcttccacctggagggcatgactacatctgtcatggcccagttcaatctgctgagcagcaccatggaccagatgagcagccgcgcggcctcggccagcccctacaccccagagcacgccgccagcgtgcccacccactcgccctacgcacaacccagctccaccttcgacaccatgtcgccggcgcctgtcatcccctccaacaccgactaccccggaccccaccactttgaggtcactttccagcagtccagcacggccaagtcagccacctggacgtactccccgctcttgaagaaactctactgccagatcgccaagacatgccccatccagatcaaggtgtccaccccgccacccccaggcaccgccatccgggccatgcctgtttacaagaaagcggagcacgtgaccgacgtcgtgaaacgctgccccaaccacgagctcgggagggacttcaacgaaggacagtctgctccagccagccacctcatccgcgtggaaggcaataatctctcgcagtatgtggatgaccctgtcaccggcaggcagagcgtcgtggtgccctatgagccaccacaggtggggacggaattcaccaccatcctgtacaacttcatgtgtaacagcagctgtgtagggggcatgaaccggcggcccatcctcatcatcatcaccctggagatgcgggatgggcaggtgctgggccgccggtcctttgagggccgcatctgcgcctgtcctggccgcgaccgaaaagctgatgaggaccactaccgggagcagcaggccctgaacgagagctccgccaagaacggggccgccagcaagcgtgccttcaagcagagcccccctgccgtccccgcccttggtgccggtgtgaagaagcggcggcatggagacgaggacacgtactaccttcaggtgcgaggccgggagaactttgagatcctgatgaagctgaaagagagcctggagctgatggagttggtgccgcagccactggtggactcctatcggcagcagcagcagctcctacagaggccgagtcacctacagcccccgtcctacgggccggtcctctcgcccatgaacaaggtgcacgggggcatgaacaagctgccctccgtcaaccagctggtgggccagcctcccccgcacagttcggcagctacacccaacctggggcccgtgggccccgggatgctcaacaaccatggccacgcagtgccagccaacggcgagatgagcagcagccacagcgcccagtccatggtctcggggtcccactgcactccgccacccccctaccacgccgaccccagcctcgtcaggacctgggggccctagtaatgaactagtccgtaacttgaaagtatttcgatttcttggctttatatatcttgtggaaaggacgagctactccattagtccggtggcca

SEQ ID NO: 1758 - DNA, 1799 bp, Homo sapiens
  source 1..1799: mol_type = genomic DNA
accgccaccatggaccagatgagcagccgcgcggcctcggccagcccctacaccccagagcacgccgccagcgtgcccacccactcgccctacgcacaacccagctccaccttcgacaccatgtcgccggcgcctgtcatcccctccaacaccgactaccccggaccccaccactttgaggtcactttccagcagtccagcacggccaagtcagccacctggacgtactccccgctcttgaagaaactctactgccagatcgccaagacatgccccatccagatcaaggtgtccaccccgccacccccaggcaccgccatccgggccatgcctgtttacaagaaagcggagcacgtgaccgacgtcgtgaaacgctgccccaaccacgagctcgggagggacttcaacgaaggacagtctgctccagccagccacctcatccgcgtggaaggcaataatctctcgcagtatgtggatgaccctgtcaccggcaggcagagcgtcgtggtgccctatgagccaccacaggtggggacggaattcaccaccatcctgtacaacttcatgtgtaacagcagctgtgtagggggcatgaaccggcggcccatcctcatcatcatcaccctggagatgcgggatgggcaggtgctgggccgccggtcctttgagggccgcatctgcgcctgtcctggccgcgaccgaaaagctgatgaggaccactaccgggagcagcaggccctgaacgagagctccgccaagaacggggccgccagcaagcgtgccttcaagcagagcccccctgccgtccccgcccttggtgccggtgtgaagaagcggcggcatggagacgaggacacgtactaccttcaggtgcgaggccgggagaactttgagatcctgatgaagctgaaagagagcctggagctgatggagttggtgccgcagccactggtggactcctatcggcagcagcagcagctcctacagaggccgagtcacctacagcccccgtcctacgggccggtcctctcgcccatgaacaaggtgcacgggggcatgaacaagctgccctccgtcaaccagctggtgggccagcctcccccgcacagttcggcagctacacccaacctggggcccgtgggccccgggatgctcaacaaccatggccacgcagtgccagccaacggcgagatgagcagcagccacagcgcccagtccatggtctcggggtcccactgcactccgccacccccctaccacgccgaccccagcctcgtcagttttttaacaggattggggtgtccaaactgcatcgagtatttcacctcccaagggttacagagcatttaccacctgcagaacctgaccattgaggacctgggggccctgaagatccccgagcagtaccgcatgaccatctggcggggcctgcaggacctgaagcagggccacgactacagcaccgcgcagcagctgctccgctctagcaacgcggccaccatctccatcggcggctcaggggaactgcagcgccagcgggtcatggaggccgtgcacttccgcgtgcgccacaccatcaccatccccaaccgcggcggcccaggcggcggccctgacgagtgggcggacttcggcttcgacctgcccgactgcaaggcccgcaagcagcccatcaaggaggagttcacggaggccgagatccactagtaatgaactagtccgtaacttgaaagtatttcgatttcttggctttatatatcttgtggaaaggacgatgcacctcgctcaataccaagacc

SEQ ID NO: 1759 - DNA, 1313 bp, Homo sapiens
  source 1..1313: mol_type = genomic DNA
accgccaccatggcccagtccaccgccacctcccctgatgggggcaccacgtttgagcacctctggagctctctggaaccagacagcacctacttcgaccttccccagtcaagccgggggaataatgaggtggtgggcggaacggattccagcatggacgtcttccacctggagggcatgactacatctgtcatggcccagttcaatctgctgagcagcaccatggaccagatgagcagccgcgcggcctcggccagcccctacaccccagagcacgccgccagcgtgcccacccactcgccctacgcacaacccagctccaccttcgacaccatgtcgccggcgcctgtcatcccctccaacaccgactaccccggaccccaccactttgaggtcactttccagcagtccagcacggccaagtcagccacctggacgtactccccgctcttgaagaaactctactgccagatcgccaagacatgccccatccagatcaaggtgtccaccccgccacccccaggcaccgccatccgggccatgcctgtttacaagaaagcggagcacgtgaccgacgtcgtgaaacgctgccccaaccacgagctcgggagggacttcaacgaaggacagtctgctccagccagccacctcatccgcgtggaaggcaataatctctcgcagtatgtggatgaccctgtcaccggcaggcagagcgtcgtggtgccctatgagccaccacaggtggggacggaattcaccaccatcctgtacaacttcatgtgtaacagcagctgtgtagggggcatgaaccggcggcccatcctcatcatcatcaccctggagatgcgggatgggcaggtgctgggccgccggtcctttgagggccgcatctgcgcctgtcctggccgcgaccgaaaagctgatgaggaccactaccgggagcagcaggccctgaacgagagctccgccaagaacggggccgccagcaagcgtgccttcaagcagagcccccctgccgtccccgcccttggtgccggtgtgaagaagcggcggcatggagacgaggacacgtactaccttcaggtgcgaggccgggagaactttgagatcctgatgaagctgaaagagagcctggagctgatggagttggtgccgcagccactggtggactcctatcggcagcagcagcagctcctacagaggccgacctgggggccctagtaatgaactagtccgtaacttgaaagtatttcgatttcttggctttatatatcttgtggaaaggacgaacctcatccgataacaggccggcc

SEQ ID NO: 1760 - DNA, 1769 bp, Homo sapiens
  source 1..1769: mol_type = genomic DNA
accgccaccatggcccagtccaccgccacctcccctgatgggggcaccacgtttgagcacctctggagctctctggaaccagacagcacctacttcgaccttccccagtcaagccgggggaataatgaggtggtgggcggaacggattccagcatggacgtcttccacctggagggcatgactacatctgtcatggcccagttcaatctgctgagcagcaccatggaccagatgagcagccgcgcggcctcggccagcccctacaccccagagcacgccgccagcgtgcccacccactcgccctacgcacaacccagctccaccttcgacaccatgtcgccggcgcctgtcatcccctccaacaccgactaccccggaccccaccactttgaggtcactttccagcagtccagcacggccaagtcagccacctggacgtactccccgctcttgaagaaactctactgccagatcgccaagacatgccccatccagatcaaggtgtccaccccgccacccccaggcaccgccatccgggccatgcctgtttacaagaaagcggagcacgtgaccgacgtcgtgaaacgctgccccaaccacgagctcgggagggacttcaacgaaggacagtctgctccagccagccacctcatccgcgtggaaggcaataatctctcgcagtatgtggatgaccctgtcaccggcaggcagagcgtcgtggtgccctatgagccaccacaggtggggacggaattcaccaccatcctgtacaacttcatgtgtaacagcagctgtgtagggggcatgaaccggcggcccatcctcatcatcatcaccctggagatgcgggatgggcaggtgctgggccgccggtcctttgagggccgcatctgcgcctgtcctggccgcgaccgaaaagctgatgaggaccactaccgggagcagcaggccctgaacgagagctccgccaagaacggggccgccagcaagcgtgccttcaagcagagcccccctgccgtccccgcccttggtgccggtgtgaagaagcggcggcatggagacgaggacacgtactaccttcaggtgcgaggccgggagaactttgagatcctgatgaagctgaaagagagcctggagctgatggagttggtgccgcagccactggtggactcctatcggcagcagcagcagctcctacagaggccgccccgggatgctcaacaaccatggccacgcagtgccagccaacggcgagatgagcagcagccacagcgcccagtccatggtctcggggtcccactgcactccgccacccccctaccacgccgaccccagcctcgtcaggacctgggggccctgaagatccccgagcagtaccgcatgaccatctggcggggcctgcaggacctgaagcagggccacgactacagcaccgcgcagcagctgctccgctctagcaacgcggccaccatctccatcggcggctcaggggaactgcagcgccagcgggtcatggaggccgtgcacttccgcgtgcgccacaccatcaccatccccaaccgcggcggcccaggcggcggccctgacgagtgggcggacttcggcttcgacctgcccgactgcaaggcccgcaagcagcccatcaaggaggagttcacggaggccgagatccactagtaatgaactagtccgtaacttgaaagtatttcgatttcttggctttatatatcttgtggaaaggacgagttacggagtgggatagtaatacc

SEQ ID NO: 1761 - DNA, 1454 bp, Homo sapiens
  source 1..1454: mol_type = genomic DNA
accgccaccatgctgtacgtcggtgaccccgcacggcacctcgccacggcccagttcaatctgctgagcagcaccatggaccagatgagcagccgcgcggcctcggccagcccctacaccccagagcacgccgccagcgtgcccacccactcgccctacgcacaacccagctccaccttcgacaccatgtcgccggcgcctgtcatcccctccaacaccgactaccccggaccccaccactttgaggtcactttccagcagtccagcacggccaagtcagccacctggacgtactccccgctcttgaagaaactctactgccagatcgccaagacatgccccatccagatcaaggtgtccaccccgccacccccaggcaccgccatccgggccatgcctgtttacaagaaagcggagcacgtgaccgacgtcgtgaaacgctgccccaaccacgagctcgggagggacttcaacgaaggacagtctgctccagccagccacctcatccgcgtggaaggcaataatctctcgcagtatgtggatgaccctgtcaccggcaggcagagcgtcgtggtgccctatgagccaccacaggtggggacggaattcaccaccatcctgtacaacttcatgtgtaacagcagctgtgtagggggcatgaaccggcggcccatcctcatcatcatcaccctggagatgcgggatgggcaggtgctgggccgccggtcctttgagggccgcatctgcgcctgtcctggccgcgaccgaaaagctgatgaggaccactaccgggagcagcaggccctgaacgagagctccgccaagaacggggccgccagcaagcgtgccttcaagcagagcccccctgccgtccccgcccttggtgccggtgtgaagaagcggcggcatggagacgaggacacgtactaccttcaggtgcgaggccgggagaactttgagatcctgatgaagctgaaagagagcctggagctgatggagttggtgccgcagccactggtggactcctatcggcagcagcagcagctcctacagaggccgagtcacctacagcccccgtcctacgggccggtcctctcgcccatgaacaaggtgcacgggggcatgaacaagctgccctccgtcaaccagctggtgggccagcctcccccgcacagttcggcagctacacccaacctggggcccgtgggccccgggatgctcaacaaccatggccacgcagtgccagccaacggcgagatgagcagcagccacagcgcccagtccatggtctcggggtcccactgcactccgccacccccctaccacgccgaccccagcctcgtcaggacctgggggccctagtaatgaactagtccgtaacttgaaagtatttcgatttcttggctttatatatcttgtggaaaggacgaattagttccgcactcgggcgtctc

SEQ ID NO: 1762 - DNA, 1865 bp, Homo sapiens
  source 1..1865: mol_type = genomic DNA
accgccaccatgctgtacgtcggtgaccccgcacggcacctcgccacggcccagttcaatctgctgagcagcaccatggaccagatgagcagccgcgcggcctcggccagcccctacaccccagagcacgccgccagcgtgcccacccactcgccctacgcacaacccagctccaccttcgacaccatgtcgccggcgcctgtcatcccctccaacaccgactaccccggaccccaccactttgaggtcactttccagcagtccagcacggccaagtcagccacctggacgtactccccgctcttgaagaaactctactgccagatcgccaagacatgccccatccagatcaaggtgtccaccccgccacccccaggcaccgccatccgggccatgcctgtttacaagaaagcggagcacgtgaccgacgtcgtgaaacgctgccccaaccacgagctcgggagggacttcaacgaaggacagtctgctccagccagccacctcatccgcgtggaaggcaataatctctcgcagtatgtggatgaccctgtcaccggcaggcagagcgtcgtggtgccctatgagccaccacaggtggggacggaattcaccaccatcctgtacaacttcatgtgtaacagcagctgtgtagggggcatgaaccggcggcccatcctcatcatcatcaccctggagatgcgggatgggcaggtgctgggccgccggtcctttgagggccgcatctgcgcctgtcctggccgcgaccgaaaagctgatgaggaccactaccgggagcagcaggccctgaacgagagctccgccaagaacggggccgccagcaagcgtgccttcaagcagagcccccctgccgtccccgcccttggtgccggtgtgaagaagcggcggcatggagacgaggacacgtactaccttcaggtgcgaggccgggagaactttgagatcctgatgaagctgaaagagagcctggagctgatggagttggtgccgcagccactggtggactcctatcggcagcagcagcagctcctacagaggccgagtcacctacagcccccgtcctacgggccggtcctctcgcccatgaacaaggtgcacgggggcatgaacaagctgccctccgtcaaccagctggtgggccagcctcccccgcacagttcggcagctacacccaacctggggcccgtgggccccgggatgctcaacaaccatggccacgcagtgccagccaacggcgagatgagcagcagccacagcgcccagtccatggtctcggggtcccactgcactccgccacccccctaccacgccgaccccagcctcgtcagttttttaacaggattggggtgtccaaactgcatcgagtatttcacctcccaagggttacagagcatttaccacctgcagaacctgaccattgaggacctgggggccctgaagatccccgagcagtaccgcatgaccatctggcggggcctgcaggacctgaagcagggccacgactacagcaccgcgcagcagctgctccgctctagcaacgcggccaccatctccatcggcggctcaggggaactgcagcgccagcgggtcatggaggccgtgcacttccgcgtgcgccacaccatcaccatccccaaccgcggcggcccaggcggcggccctgacgagtgggcggacttcggcttcgacctgcccgactgcaaggcccgcaagcagcccatcaaggaggagttcacggaggccgagatccactagtaatgaactagtccgtaacttgaaagtatttcgatttcttggctttatatatcttgtggaaaggacgatgggagacgcagtttcaccaccag

SEQ ID NO: 1763 - DNA, 1724 bp, Homo sapiens
  source 1..1724: mol_type = genomic DNA
accgccaccatggcccagtccaccgccacctcccctgatgggggcaccacgtttgagcacctctggagctctctggaaccagacagcacctacttcgaccttccccagtcaagccgggggaataatgaggtggtgggcggaacggattccagcatggacgtcttccacctggagggcatgactacatctgtcatggcccagttcaatctgctgagcagcaccatggaccagatgagcagccgcgcggcctcggccagcccctacaccccagagcacgccgccagcgtgcccacccactcgccctacgcacaacccagctccaccttcgacaccatgtcgccggcgcctgtcatcccctccaacaccgactaccccggaccccaccactttgaggtcactttccagcagtccagcacggccaagtcagccacctggacgtactccccgctcttgaagaaactctactgccagatcgccaagacatgccccatccagatcaaggtgtccaccccgccacccccaggcaccgccatccgggccatgcctgtttacaagaaagcggagcacgtgaccgacgtcgtgaaacgctgccccaaccacgagctcgggagggacttcaacgaaggacagtctgctccagccagccacctcatccgcgtggaaggcaataatctctcgcagtatgtggatgaccctgtcaccggcaggcagagcgtcgtggtgccctatgagccaccacaggtggggacggaattcaccaccatcctgtacaacttcatgtgtaacagcagctgtgtagggggcatgaaccggcggcccatcctcatcatcatcaccctggagatgcgggatgggcaggtgctgggccgccggtcctttgagggccgcatctgcgcctgtcctggccgcgaccgaaaagctgatgaggaccactaccgggagcagcaggccctgaacgagagctccgccaagaacggggccgccagcaagcgtgccttcaagcagagcccccctgccgtccccgcccttggtgccggtgtgaagaagcggcggcatggagacgaggacacgtactaccttcaggtgcgaggccgggagaactttgagatcctgatgaagctgaaagagagcctggagctgatggagttggtgccgcagccactggtggactcctatcggcagcagcagcagctcctacagaggccttttttaacaggattggggtgtccaaactgcatcgagtatttcacctcccaagggttacagagcatttaccacctgcagaacctgaccattgaggacctgggggccctgaagatccccgagcagtaccgcatgaccatctggcggggcctgcaggacctgaagcagggccacgactacagcaccgcgcagcagctgctccgctctagcaacgcggccaccatctccatcggcggctcaggggaactgcagcgccagcgggtcatggaggccgtgcacttccgcgtgcgccacaccatcaccatccccaaccgcggcggcccaggcggcggccctgacgagtgggcggacttcggcttcgacctgcccgactgcaaggcccgcaagcagcccatcaaggaggagttcacggaggccgagatccactagtaatgaactagtccgtaacttgaaagtatttcgatttcttggctttatatatcttgtggaaaggacgagtctagggcaataaatacgtctat

SEQ ID NO: 1764 - DNA, 2093 bp, Homo sapiens
  source 1..2093: mol_type = genomic DNA
accgccaccatgtgccatcctgacaaggcttttacttctgataagctccaatgtgtgtttaatgaatacaaagccgcggtctgggtgccgcctcggccgcggccgctctcccgcgctcctttgccagaagctggcggagagaatttacatttaaagattagcagagtgagaaagagaaatctgccttttgttgtgtggggtgaggaggaggcatctacccctggccttgacgctatctcccatcacctctgctatccagacaggactcaccgagatcgtactgagaagcactccacaatgccagactcacctgtggatgtgaagacgcaatctaggctgactcctccaacaatgccacctcccccaactactcaaggagctccaagaaccagttcatttacaccgacaacgttaactaatggcacgagccattctcctacagccttgaatggcgccccctcaccacccaatggcttcagcaatgggccttcctcttcttcctcctcctctctggctaatcaacagctgcccccagcctgtggtgccaggcaactcagcaagctgaaaaggttccttactaccctgcagcagtttggcaatgacatttcacccgagataggagaaagagttcgcaccctcgttctgggactagtgaactccactttgacaattgaagaatttcattccaaactgcaagaagctactaacttcccactgagaccttttgtcatcccatttttgaaggccaacttgcccctgctgcagcgtgagctcctccactgcgcaagactggccaaacagaaccctgcccagtacctcgcccagcatgaacagctgcttctggatgccagcaccacctcacctgttgactcctcagagctgcttctcgatgtgaacgaaaacgggaagaggcgaactccagacagaaccaaagaaaatggctttgacagagagcctttgcactcagaacatccaagcaagcgaccatgcactattagcccaggccagcggtacagtccaaataacggcttatcctaccagcccaatggcctgcctcaccctaccccacctccacctcagcattaccgtttggatgatatggccattgcccaccactacagggactcctatcgacaccccagccacagggacctcagggacagaaacagacctatggggttgcatggcacacgtcaagaagaaatgattgatcacagactaacagacagagaatgggcagaagagtggaaacatcttgaccatctgttaaactgcataatggacatggtagaaaaaacaaggcgatctctcaccgtactaaggcggtgtcaagaagcagaccgggaagaattgaattactggatccggcggtacagtgacgccgaggacttaaaaaaaggtggcggcagtagcagcagccactctaggcagcagagtcccgtcaacccagacccagttgcactagacgcgcatcgggaattccttcacaggcctgcgtctggatacgtgccagaggagatctggaagaaagctgaggaggccgtcaatgaggtgaagcgccaggcgatgacggagctgcagaaggccgtgtctgaggcggagcggaaagcccacgacatgatcacaacagagagggccaagatggagcgcacggtcgccgaggccaaacggcaggcggcggaggacgcactggcagttatcaatcagcaggaggattcaagcgagagttgctggaattgtggccgtaaagcgagtgaaacctgcagtggctgtaacacagcccgatactgtggctcattttgccagcacaaagactgggagaagcaccatcacatctgtggacagaccctgcaggcccagcagcagggagacacacctgcagtcagctcctctgtcacgcccaacagcggggctgggagcccgatggacacaccaccagcagccactccgaggtcaaccaccccgggaaccccttccaccatagagacaacccctcgctagtaatgaactagtccgtaacttgaaagtatttcgatttcttggctttatatatcttgtggaaaggacgagacacgacgagtatcagttccagc

SEQ ID NO: 1765 - DNA, 1856 bp, Homo sapiens
  source 1..1856: mol_type = genomic DNA
accgccaccatggtgggactctccggccctgtgcagtatcgtactgagaagcactccacaatgccagactcacctgtggatgtgaagacgcaatctaggctgactcctccaacaatgccacctcccccaactactcaaggagctccaagaaccagttcatttacaccgacaacgttaactaatggcacgagccattctcctacagccttgaatggcgccccctcaccacccaatggcttcagcaatgggccttcctcttcttcctcctcctctctggctaatcaacagctgcccccagcctgtggtgccaggcaactcagcaagctgaaaaggttccttactaccctgcagcagtttggcaatgacatttcacccgagataggagaaagagttcgcaccctcgttctgggactagtgaactccactttgacaattgaagaatttcattccaaactgcaagaagctactaacttcccactgagaccttttgtcatcccatttttgaaggccaacttgcccctgctgcagcgtgagctcctccactgcgcaagactggccaaacagaaccctgcccagtacctcgcccagcatgaacagctgcttctggatgccagcaccacctcacctgttgactcctcagagctgcttctcgatgtgaacgaaaacgggaagaggcgaactccagacagaaccaaagaaaatggctttgacagagagcctttgcactcagaacatccaagcaagcgaccatgcactattagcccaggccagcggtacagtccaaataacggcttatcctaccagcccaatggcctgcctcaccctaccccacctccacctcagcattaccgtttggatgatatggccattgcccaccactacagggactcctatcgacaccccagccacagggacctcagggacagaaacagacctatggggttgcatggcacacgtcaagaagaaatgattgatcacagactaacagacagagaatgggcagaagagtggaaacatcttgaccatctgttaaactgcataatggacatggtagaaaaaacaaggcgatctctcaccgtactaaggcggtgtcaagaagcagaccgggaagaattgaattactggatccggcggtacagtgacgccgaggacttaaaaaaaggtggcggcagtagcagcagccactctaggcagcagagtcccgtcaacccagacccagttgcactagacgcgcatcgggaattccttcacaggcctgcgtctggatacgtgccagaggagatctggaagaaagctgaggaggccgtcaatgaggtgaagcgccaggcgatgacggagctgcagaaggccgtgtctgaggcggagcggaaagcccacgacatgatcacaacagagagggccaagatggagcgcacggtcgccgaggccaaacggcaggcggcggaggacgcactggcagttatcaatcagcaggaggattcaagcgagagttgctggaattgtggccgtaaagcgagtgaaacctgcagtggctgtaacacagcccgatactgtggctcattttgccagcacaaagactgggagaagcaccatcacatctgtggacagaccctgcaggcccagcagcagggagacacacctgcagtcagctcctctgtcacgcccaacagcggggctgggagcccgatggacacaccaccagcagccactccgaggtcaaccaccccgggaaccccttccaccatagagacaacccctcgctagtaatgaactagtccgtaacttgaaagtatttcgatttcttggctttatatatcttgtggaaaggacgagccgtgagtgcagtgaagatgtgg

SEQ ID NO: 1766 - DNA, 1916 bp, Homo sapiens
  source 1..1916: mol_type = genomic DNA
accgccaccatgatatctgtcaaaagaaacacttggagagcactgagtttagtaataggtgactgccggaaaaaagggaactttgaatattgtcaagatcgtactgagaagcactccacaatgccagactcacctgtggatgtgaagacgcaatctaggctgactcctccaacaatgccacctcccccaactactcaaggagctccaagaaccagttcatttacaccgacaacgttaactaatggcacgagccattctcctacagccttgaatggcgccccctcaccacccaatggcttcagcaatgggccttcctcttcttcctcctcctctctggctaatcaacagctgcccccagcctgtggtgccaggcaactcagcaagctgaaaaggttccttactaccctgcagcagtttggcaatgacatttcacccgagataggagaaagagttcgcaccctcgttctgggactagtgaactccactttgacaattgaagaatttcattccaaactgcaagaagctactaacttcccactgagaccttttgtcatcccatttttgaaggccaacttgcccctgctgcagcgtgagctcctccactgcgcaagactggccaaacagaaccctgcccagtacctcgcccagcatgaacagctgcttctggatgccagcaccacctcacctgttgactcctcagagctgcttctcgatgtgaacgaaaacgggaagaggcgaactccagacagaaccaaagaaaatggctttgacagagagcctttgcactcagaacatccaagcaagcgaccatgcactattagcccaggccagcggtacagtccaaataacggcttatcctaccagcccaatggcctgcctcaccctaccccacctccacctcagcattaccgtttggatgatatggccattgcccaccactacagggactcctatcgacaccccagccacagggacctcagggacagaaacagacctatggggttgcatggcacacgtcaagaagaaatgattgatcacagactaacagacagagaatgggcagaagagtggaaacatcttgaccatctgttaaactgcataatggacatggtagaaaaaacaaggcgatctctcaccgtactaaggcggtgtcaagaagcagaccgggaagaattgaattactggatccggcggtacagtgacgccgaggacttaaaaaaaggtggcggcagtagcagcagccactctaggcagcagagtcccgtcaacccagacccagttgcactagacgcgcatcgggaattccttcacaggcctgcgtctggatacgtgccagaggagatctggaagaaagctgaggaggccgtcaatgaggtgaagcgccaggcgatgacggagctgcagaaggccgtgtctgaggcggagcggaaagcccacgacatgatcacaacagagagggccaagatggagcgcacggtcgccgaggccaaacggcaggcggcggaggacgcactggcagttatcaatcagcaggaggattcaagcgagagttgctggaattgtggccgtaaagcgagtgaaacctgcagtggctgtaacacagcccgatactgtggctcattttgccagcacaaagactgggagaagcaccatcacatctgtggacagaccctgcaggcccagcagcagggagacacacctgcagtcagctcctctgtcacgcccaacagcggggctgggagcccgatggacacaccaccagcagccactccgaggtcaaccaccccgggaaccccttccaccatagagacaacccctcgctagtaatgaactagtccgtaacttgaaagtatttcgatttcttggctttatatatcttgtggaaaggacgatcgttactatcgtaatggcagaac

SEQ ID NO: 1767 - DNA, 1949 bp, Homo sapiens
  source 1..1949: mol_type = genomic DNA
accgccaccatgtgccatcctgacaaggcttttacttctgataagctccaatgtgtgtttaatgaatacaaagccgcggtctgggtgccgcctcggccgcggccgctctcccgcgctcctttgccagaagatcgtactgagaagcactccacaatgccagactcacctgtggatgtgaagacgcaatctaggctgactcctccaacaatgccacctcccccaactactcaaggagctccaagaaccagttcatttacaccgacaacgttaactaatggcacgagccattctcctacagccttgaatggcgccccctcaccacccaatggcttcagcaatgggccttcctcttcttcctcctcctctctggctaatcaacagctgcccccagcctgtggtgccaggcaactcagcaagctgaaaaggttccttactaccctgcagcagtttggcaatgacatttcacccgagataggagaaagagttcgcaccctcgttctgggactagtgaactccactttgacaattgaagaatttcattccaaactgcaagaagctactaacttcccactgagaccttttgtcatcccatttttgaaggccaacttgcccctgctgcagcgtgagctcctccactgcgcaagactggccaaacagaaccctgcccagtacctcgcccagcatgaacagctgcttctggatgccagcaccacctcacctgttgactcctcagagctgcttctcgatgtgaacgaaaacgggaagaggcgaactccagacagaaccaaagaaaatggctttgacagagagcctttgcactcagaacatccaagcaagcgaccatgcactattagcccaggccagcggtacagtccaaataacggcttatcctaccagcccaatggcctgcctcaccctaccccacctccacctcagcattaccgtttggatgatatggccattgcccaccactacagggactcctatcgacaccccagccacagggacctcagggacagaaacagacctatggggttgcatggcacacgtcaagaagaaatgattgatcacagactaacagacagagaatgggcagaagagtggaaacatcttgaccatctgttaaactgcataatggacatggtagaaaaaacaaggcgatctctcaccgtactaaggcggtgtcaagaagcagaccgggaagaattgaattactggatccggcggtacagtgacgccgaggacttaaaaaaaggtggcggcagtagcagcagccactctaggcagcagagtcccgtcaacccagacccagttgcactagacgcgcatcgggaattccttcacaggcctgcgtctggatacgtgccagaggagatctggaagaaagctgaggaggccgtcaatgaggtgaagcgccaggcgatgacggagctgcagaaggccgtgtctgaggcggagcggaaagcccacgacatgatcacaacagagagggccaagatggagcgcacggtcgccgaggccaaacggcaggcggcggaggacgcactggcagttatcaatcagcaggaggattcaagcgagagttgctggaattgtggccgtaaagcgagtgaaacctgcagtggctgtaacacagcccgatactgtggctcattttgccagcacaaagactgggagaagcaccatcacatctgtggacagaccctgcaggcccagcagcagggagacacacctgcagtcagctcctctgtcacgcccaacagcggggctgggagcccgatggacacaccaccagcagccactccgaggtcaaccaccccgggaaccccttccaccatagagacaacccctcgctagtaatgaactagtccgtaacttgaaagtatttcgatttcttggctttatatatcttgtggaaaggacgagattggtcagcagaattcgttgtc

SEQ ID NO: 1768 - DNA, 1835 bp, Homo sapiens
  source 1..1835: mol_type = genomic DNA
accgccaccatgcctgatcgtactgagaagcactccacaatgccagactcacctgtggatgtgaagacgcaatctaggctgactcctccaacaatgccacctcccccaactactcaaggagctccaagaaccagttcatttacaccgacaacgttaactaatggcacgagccattctcctacagccttgaatggcgccccctcaccacccaatggcttcagcaatgggccttcctcttcttcctcctcctctctggctaatcaacagctgcccccagcctgtggtgccaggcaactcagcaagctgaaaaggttccttactaccctgcagcagtttggcaatgacatttcacccgagataggagaaagagttcgcaccctcgttctgggactagtgaactccactttgacaattgaagaatttcattccaaactgcaagaagctactaacttcccactgagaccttttgtcatcccatttttgaaggccaacttgcccctgctgcagcgtgagctcctccactgcgcaagactggccaaacagaaccctgcccagtacctcgcccagcatgaacagctgcttctggatgccagcaccacctcacctgttgactcctcagagctgcttctcgatgtgaacgaaaacgggaagaggcgaactccagacagaaccaaagaaaatggctttgacagagagcctttgcactcagaacatccaagcaagcgaccatgcactattagcccaggccagcggtacagtccaaataacggcttatcctaccagcccaatggcctgcctcaccctaccccacctccacctcagcattaccgtttggatgatatggccattgcccaccactacagggactcctatcgacaccccagccacagggacctcagggacagaaacagacctatggggttgcatggcacacgtcaagaagaaatgattgatcacagactaacagacagagaatgggcagaagagtggaaacatcttgaccatctgttaaactgcataatggacatggtagaaaaaacaaggcgatctctcaccgtactaaggcggtgtcaagaagcagaccgggaagaattgaattactggatccggcggtacagtgacgccgaggacttaaaaaaaggtggcggcagtagcagcagccactctaggcagcagagtcccgtcaacccagacccagttgcactagacgcgcatcgggaattccttcacaggcctgcgtctggatacgtgccagaggagatctggaagaaagctgaggaggccgtcaatgaggtgaagcgccaggcgatgacggagctgcagaaggccgtgtctgaggcggagcggaaagcccacgacatgatcacaacagagagggccaagatggagcgcacggtcgccgaggccaaacggcaggcggcggaggacgcactggcagttatcaatcagcaggaggattcaagcgagagttgctggaattgtggccgtaaagcgagtgaaacctgcagtggctgtaacacagcccgatactgtggctcattttgccagcacaaagactgggagaagcaccatcacatctgtggacagaccctgcaggcccagcagcagggagacacacctgcagtcagctcctctgtcacgcccaacagcggggctgggagcccgatggacacaccaccagcagccactccgaggtcaaccaccccgggaaccccttccaccatagagacaacccctcgctagtaatgaactagtccgtaacttgaaagtatttcgatttcttggctttatatatcttgtggaaaggacgaagagcgaggcacgtaggagataac

SEQ ID NO: 1769 - DNA, 1805 bp, Homo sapiens
  source 1..1805: mol_type = genomic DNA
accgccaccatgccagactcacctgtggatgtgaagacgcaatctaggctgactcctccaacaatgccacctcccccaactactcaaggagctccaagaaccagttcatttacaccgacaacgttaactaatggcacgagccattctcctacagccttgaatggcgccccctcaccacccaatggcttcagcaatgggccttcctcttcttcctcctcctctctggctaatcaacagctgcccccagcctgtggtgccaggcaactcagcaagctgaaaaggttccttactaccctgcagcagtttggcaatgacatttcacccgagataggagaaagagttcgcaccctcgttctgggactagtgaactccactttgacaattgaagaatttcattccaaactgcaagaagctactaacttcccactgagaccttttgtcatcccatttttgaaggccaacttgcccctgctgcagcgtgagctcctccactgcgcaagactggccaaacagaaccctgcccagtacctcgcccagcatgaacagctgcttctggatgccagcaccacctcacctgttgactcctcagagctgcttctcgatgtgaacgaaaacgggaagaggcgaactccagacagaaccaaagaaaatggctttgacagagagcctttgcactcagaacatccaagcaagcgaccatgcactattagcccaggccagcggtacagtccaaataacggcttatcctaccagcccaatggcctgcctcaccctaccccacctccacctcagcattaccgtttggatgatatggccattgcccaccactacagggactcctatcgacaccccagccacagggacctcagggacagaaacagacctatggggttgcatggcacacgtcaagaagaaatgattgatcacagactaacagacagagaatgggcagaagagtggaaacatcttgaccatctgttaaactgcataatggacatggtagaaaaaacaaggcgatctctcaccgtactaaggcggtgtcaagaagcagaccgggaagaattgaattactggatccggcggtacagtgacgccgaggacttaaaaaaaggtggcggcagtagcagcagccactctaggcagcagagtcccgtcaacccagacccagttgcactagacgcgcatcgggaattccttcacaggcctgcgtctggatacgtgccagaggagatctggaagaaagctgaggaggccgtcaatgaggtgaagcgccaggcgatgacggagctgcagaaggccgtgtctgaggcggagcggaaagcccacgacatgatcacaacagagagggccaagatggagcgcacggtcgccgaggccaaacggcaggcggcggaggacgcactggcagttatcaatcagcaggaggattcaagcgagagttgctggaattgtggccgtaaagcgagtgaaacctgcagtggctgtaacacagcccgatactgtggctcattttgccagcacaaagactgggagaagcaccatcacatctgtggacagaccctgcaggcccagcagcagggagacacacctgcagtcagctcctctgtcacgcccaacagcggggctgggagcccgatggacacaccaccagcagccactccgaggtcaaccaccccgggaaccccttccaccatagagacaacccctcgctagtaatgaactagtccgtaacttgaaagtatttcgatttcttggctttatatatcttgtggaaaggacgagcgtaataaactagaattgtactg

SEQ ID NO: 1770 - DNA, 2951 bp, Homo sapiens
  source 1..2951: mol_type = genomic DNA
accgccaccatggcccaggtagcagtgtccaccctgcctgttgaagaagagtcctcctcagagaccaggatggtggtgacattcctcgtgtctgccctcgaatccatgtgtaaagaactggccaagtccaaggcagaagtggcctgcatcgcagtgtacgaaacagacgtgtttgtcgtcggaaccgagagaggatgcgcttttgttaatgccaggacggattttcagaaagattttgcaaaatactgcgttgcagagggactgtgtgaggtgaaacctccctgccctgtgaacgggatgcaggtccactcgggcgaaacggaaatactcaggaaggcagtggaggactatttctgcttttgttatggtaaagccttagggacaacagtgatggtgcctgttccctatgagaagatgctgcgagaccagtcggctgtggtagtgcaggggcttccggaaggcgttgcctttcaacaccctgagaattacgaccttgcaaccctgaaatggattttggagaacaaagcagggatttcattcatcataaatagacccttcctaggaccagagagtcagctgggtggccctgggatggtaacagatgcggagagatccatagtatcaccaagtgaaagctgcggccccatcaatgtgaaaactgaacccatggaagattctggcatttcactgaaagcagaagctgtctcagtcaagaaagaatcagaagatcctaattactatcaatataatatgcaaggaagccacccttcttccacaagcaatgaagtaatagaaatggaattaccaatggaagattccactccgctggtcccttcagaagaaccaaatgaggaccctgaagccgaggtgaaaatcgaaggaaacacaaattcatccagtgttacaaattctgcagcaggtgttgaagatcttaacatcgttcaagtgactgttccagataatgagaaggaaagattatcaagcattgaaaagattaaacagctaagagaacaagttaatgacctctttagccgaaaatttggtgaagcaattggcgtggatttccctgtgaaagttccctacaggaagatcacattcaaccctggctgtgtggtgattgatggcatgcccccgggggtggtattcaaggcccccggctatctggaaatcagttccatgaggaggatcttggaggcagctgagtttatcaaattcacagtcatcaggccgcttccagggcttgagctcagtaatgtgggaaaacgcaagatagaccaggagggccgtgtgtttcaagaaaagtgggagagagcgtatttcttcgtggaagtacagaatattccaacatgtctcatatgcaaacaaagcatgtctgtgtccaaagaatataacctaagacgccactatcaaaccaatcacagcaagcattatgaccagtatacggaaagaatgcgtgacgagaagcttcacgagctgaaaaaagggctcaggaagtatctcttaggctcgtcagacaccgagtgtcccgagcaaaaacaagtgtttgcaaacccaagtccaacccagaaatcccccgtgcagcctgtagaggacctagctgggaacttatgggagaagttacgtgaaaaaatcaggtcttttgtggcatattctatcgcaatcgatgagatcacggatataaataataccacccagttggccatattcatccgtggtgtcgatgagaatttcgatgtgtccgaagaacttctggacacggtgcccatgacgggtacaaaatctggcaacgagatctttttgcgtgttgagaagagcctgaaaaagttctgtatcaactggtcgagattagtaagcgtggcctccactggcaccccagcgatggtggatgccaataacgggcttgtcacaaaactgaagtccagggtggcgacgttctgcaagggtgcggaactgaagtccatctgttgtataattcatccggaatcactctgtgctcagaagttgaagatggaccacgtcatggacgtggtagtgaagtccgtgaactggatatgctcccggggactgaaccacagcgagttcacaaccttgctctatgagctggacagccagtatggtagcctcctgtactacacggagattaagtggctcagtcgcgggctcgtgctaaagagatttttcgaatccttggaagaaatcgactccttcatgtcatccagagggaaacccctgcctcaactgagctccatagattggatccgagacctggccttcttggttgacatgacgatgcatctgaacgctttgaacatctctctccaaggacactcccaaatcgtcacgcagatgtatgacctgatccgggcgttcctagcaaaactgtgcctctgggagactcatttgacgaggaataatctggcccactttcccaccctgaaattggtttccagaaatgaaagcgatggcctgaactacattcccaaaatcgcggaactcaagaccgaattccagaaaaggctgtctgatttcaaactctacgaaagcgaactgactctgttcagctccccgttctccacgaagatcgacagtgtgcacgaggagctccagatggaggttatcgacctgcaatgcaacacggtcctgaagacgaaatacgacaaggtgggaataccagaattctacaagtacctctggggtagctacccgaaatacaagcaccattgcgcaaagattctttccatgttcgggagcacctacatctgcgaacagctgttctccattatgaaactgagcaaaacaaaatactgctcccagttaaaggattcccagtgggattctgtactccacatcgcaacgtagtaatgaactagtccgtaacttgaaagtatttcgatttcttggctttatatatcttgtggaaaggacgatcggagatcgagcggaaattgatc

SEQ ID NO: 1771 - DNA, 2105 bp, Homo sapiens
  source 1..2105: mol_type = genomic DNA
accgccaccatgaaggagaagtccaagaatgcggccaagaccaggagggagaaggaaaatggcgagttttacgagcttgccaagctgctcccgctgccgtcggccatcacttcgcagctggacaaagcgtccatcatccgcctcaccacgagctacctgaagatgcgcgccgtcttccccgaaggtttaggagacgcgtggggacagccgagccgcgccgggcccctggacggcgtcgccaaggagctgggatcgcacttgctgcagactttggatggatttgtttttgtggtagcatctgatggcaaaatcatgtatatatccgagaccgcttctgtccatttaggcttatcccaggtggagctcacgggcaacagtatttatgaatacatccatccttctgaccacgatgagatgaccgctgtcctcacggcccaccagccgctgcaccaccacctgctccaagagtatgagatagagaggtcgttctttcttcgaatgaaatgtgtcttggcgaaaaggaacgcgggcctgacctgcagcggatacaaggtcatccactgcagtggctacttgaagatcaggcagtatatgctggacatgtccctgtacgactcctgctaccagattgtggggctggtggccgtgggccagtcgctgccacccagtgccatcaccgagatcaagctgtacagtaacatgttcatgttcagggccagccttgacctgaagctgatattcctggattccagggtgaccgaggtgacggggtacgagccgcaggacctgatcgagaagaccctataccatcacgtgcacggctgcgacgtgttccacctccgctacgcacaccacctcctgttggtgaagggccaggtcaccaccaagtactaccggctgctgtccaagcggggcggctgggtgtgggtgcagagctacgccaccgtggtgcacaacagccgctcgtcccggccccactgcatcgtgagtgtcaattatgtactcacggagattgaatacaaggaacttcagctgtccctggagcaggtgtccactgccaagtcccaggactcctggaggaccgccttgtctacctcacaagaaactaggaaattagtgaaacccaaaaataccaagatgaagacaaagctgagaacaaacccttaccccccacagcaatacagctcgttccaaatggacaaactggaatgcggccagctcggaaactggagagccagtccccctgcaagcgctgctgctcctccagaactgcagccccactcagaaagcagtgaccttctgtacacgccatcctacagcctgcccttctcctaccattacggacacttccctctggactctcacgtcttcagcagcaaaaagccaatgttgccggccaagttcgggcagccccaaggatccccttgtgaggtggcacgctttttcctgagcacactgccagccagcggtgaatgccagtggcattatgccaaccccctagtgcctagcagctcgtctccagctaaaaatcctccagagccaccggcgaacactgctaggcacagcctggtgccaagctacgaagcgcccgccgccgccgtgcgcaggttcggcgaggacaccgcgcccccgagcttcccgagctgcggccactaccgcgaggagcccgcgctgggcccggccaaagccgcccgccaggccgcccgggacggggcgcggctggcgctggcccgcgcggcacccgagtgctgcgcgcccccgacccccgaggccccgggcgcgccggcgcagctgcccttcgtgctgctcaactaccaccgcgtgctggcccggcgcggaccgctggggggcgccgcacccgccgcctccggcctggcctgcgctcccggcggccccgaggcggcgaccggcgcgctgcggctccggcacccgagccccgccgccacctccccgcccggcgcgcccctgccgcactacctgggcgcctcggtcatcatcaccaacgggaggtagtaatgaactagtccgtaacttgaaagtatttcgatttcttggctttatatatcttgtggaaaggacgagtagtgcctgtttactcatttcct

SEQ ID NO: 1772 - DNA, 2402 bp, Homo sapiens
  source 1..2402: mol_type = genomic DNA
accgccaccatgaaagaaaagtccaaaaatgctgcgcggactaggagggagaaggaaaacagtgaattttatgaactggctaaattactgcctttgccctcggctatcacctcgcagctggacaaagcatccataatcagactcacgaccagctatctcaaaatgagagtggtgttcccagaagggctcggcgaggcgtggggccactcaagtcggaccagccccctggacaacgttggccgagaactgggctcccatctgctccagaccctggatggcttcatcttcgtggtagccccagatgggaagatcatgtacatctcagagacagcctcagtccacttgggtctttctcaggtagagctgaccggaaacagcatttatgaatacattcacccggcagaccacgacgagatgacggcggtgctcaccgcccatcaaccctaccactctcacttcgtgcaggagtatgagatcgagcgctccttcttcctgaggatgaagtgcgtcttggccaagcgtaacgccggcctcacctgtggcggctacaaggtcatccactgcagcggctacttgaagatccgccagtacagcctggacatgtcccccttcgacggctgctaccaaaacgtgggcctggtggccgtgggccactcgctgcctcccagcgccgtcacggagatcaagctacacagcaatatgtttatgttccgcgccagcctggacatgaagctcatctttctggactccagggtggcggagctgacggggtacgaacctcaggacctgattgagaagactctgtaccaccatgtgcacggctgcgacaccttccacctgcgctgcgcgcaccatttgctgctggtgaagggacaggtgaccaccaagtactacaggttcctggcgaaacacggcggctgggtatgggtgcagagctacgcgaccatcgtgcacaacagtcgctcctccaggccacactgtatcgtcagcgtcaactatgtcctcacagacacagaatacaaagggctgcagctctccctggatcagatctcagcctccaaaccagccttctcctataccagcagctccacccccaccatgactgacaacagaaagggggccaaatcccggctctccagctcaaagtcaaaatccaggacttccccataccctcagtattcgggatttcacacagaaagatcggaatctgatcatgacagccagtggggcggaagtcccttgaccgacacggcctctccgcagcttctggaccccgccgataggcctggctcccagcacgacgcatcgtgcgcctacagacagttttcggaccgcagctctctctgctatggctttgcgcttgaccactcgaggctggtggaagagaggcatttccatacccaggcctgtgaaggaggccgatgtgaggcaggcaggtacttcctgggaacgccgcaggccgggagggagccctggtggggctctcgcgcagccttgcccctgacaaaggcctccccagaaagcagagaagcctatgaaaacagcatgcctcacatcgcttcagtccacaggatccatgggcgaggtcattgggatgaagatagtgtggtcagttctccagaccctgggtcggccagtgaatcaggtgaccgatatcgtactgagcagtatcaaagtagcccacatgaacccagcaaaattgaaactcttataagagccactcagcaaatgattaaagaagaagagaacagattacagctaaggaaagccccctcagaccaactggcttccattaatggggctgggaaaaaacactccctgtgttttgcaaactaccaacagcccccaccaacaggtgaagtctgccatggctctgctcttgccaacacttcaccatgtgaccatatccagcagagagagggaaaaatgttgagcccccatgaaaatgactatgacaacagtcccaccgcactatctcggataagtagtcccaattcggatcgcatttcaaaatccagtttgatcctagctaaagactatctgcattcggatatatctcctcatcagacagcaggagaccaccctactgtctctccaaactgctttggctctcaccggcagtattttgacaagcatgcttacacattaactggatatgccctggagcacttatatgacagcgaaaccattagaaactattccttgggctgtaatggctcacactttgatgtaacttcccatctgaggatgcaaccagacccagcacaaggacacaagggaacatctgttataataaccaacggaagctagtaatgaactagtccgtaacttgaaagtatttcgatttcttggctttatatatcttgtggaaaggacgatgcgctcaataaatttcaccagta

SEQ ID NO: 1773 - DNA, 710 bp, Homo sapiens
  source 1..710: mol_type = genomic DNA
accgccaccatgatgcaggacgtgtccagctcgccagtctcgccggccgacgacagcctgagcaacagcgaggaagagccagaccggcagcagccgccgagcggcaagcgcgggggacgcaagcggcgcagcagcaggcgcagcgcgggcggcggcgcggggcccggcggagccgcgggtgggggcgtcggaggcggcgacgagccgggcagcccggcccagggcaagcgcggcaagaagtctgcgggctgtggcggcggcggcggcgcgggcggcggcggcggcagcagcagcggcggcgggagtccgcagtcttacgaggagctgcagacgcagcgggtcatggccaacgtgcgggagcgccagcgcacccagtcgctgaacgaggcgttcgccgcgctgcggaagatcatccccacgctgccctcggacaagctgagcaagattcagaccctcaagctggcggccaggtacatcgacttcctctaccaggtcctccagagcgacgagctggactccaagatggcaagctgcagctatgtggctcacgagcggctcagctacgccttctcggtctggaggatggagggggcctggtccatgtccgcgtcccactagtaatgaactagtccgtaacttgaaagtatttcgatttcttggctttatatatcttgtggaaaggacgatctccaaatcttccaactaggtaa

SEQ ID NO: 1774 - DNA, 1775 bp, Homo sapiens
  source 1..1775: mol_type = genomic DNA
accgccaccatggtgtccaagctcacgtcgctccagcaagaactcctgagcgccctgctgagctccggggtcaccaaggaggtgctggttcaggccttggaggagttgctgccatccccgaacttcggggtgaagctggagacgctgcccctgtcccctggcagcggggccgagcccgacaccaagccggtcttccatactctcaccaacggccacgccaagggccgcttgtccggcgacgagggctccgaggacggcgacgactatgacacacctcccatcctcaaggagctgcaggcgctcaacaccgaggaggcggcggagcagcgggcggaggtggaccggatgctcagtgaggacccttggagggctgctaaaatgatcaagggttacatgcagcaacacaacatcccccagagggaggtggtcgatgtcaccggcctgaaccagtcgcacctctcccagcatctcaacaagggcacccctatgaagacccagaagcgtgccgctctgtacacctggtacgtcagaaagcaacgagagatcctccgacaattcaaccagacagtccagagttctggaaatatgacagacaaaagcagtcaggatcagctgctgtttctctttccagagttcagtcaacagagccatgggcctgggcagtccgatgatgcctgctctgagcccaccaacaagaagatgcgccgcaaccggttcaaatgggggcccgcgtcccagcaaatcttgtaccaggcctacgatcggcaaaagaaccccagcaaggaagagagagaggccttagtggaggaatgcaacagggcagaatgtttgcagcgaggggtgtccccctccaaagcccacggcctgggctccaacttggtcactgaggtccgtgtctacaactggtttgcaaaccgcaggaaggaggaggcattccggcaaaagctggccatggacgcctatagctccaaccagactcacagcctgaaccctctgctctcccacggctccccccaccaccagcccagctcctctcctccaaacaagctgtcaggagtgcgctacagccagcagggaaacaatgagatcacttcctcctcaacaatcagtcaccatggcaacagcgccatggtgaccagccagtcggttttacagcaagtctccccagccagcctggacccaggccacaatctcctctcacctgatggtaaaatgatctcagtctcaggaggaggtttgcccccagtcagcaccttgacgaatatccacagcctctcccaccataatccccagcaatctcaaaacctcatcatgacacccctctctggagtcatggcaattgcacaaagcctcaacacctcccaagcacagagtgtccctgtcatcaacagtgtggccggcagcctggcagccctgcagcccgtccagttctcccagcagctgcacagccctcaccagcagcccctcatgcagcagagcccaggcagccacatggcccagcagcccttcatggcagctgtgactcagctgcagaactcacacatgtacgcacacaagcaggaacccccccagtattcccacacctcccggtttccatctgcaatggtggtcacagataccagcagcatcagtacactcaccaacatgtcttcaagtaaacagtgtcctctacaagcctggtagtaatgaactagtccgtaacttgaaagtatttcgatttcttggctttatatatcttgtggaaaggacgacaacctaaaccctcccgtcgaagc

SEQ ID NO: 1775 - DNA, 1748 bp, Homo sapiens
  source 1..1748: mol_type = genomic DNA
accgccaccatggtgtccaagctcacgtcgctccagcaagaactcctgagcgccctgctgagctccggggtcaccaaggaggtgctggttcaggccttggaggagttgctgccatccccgaacttcggggtgaagctggagacgctgcccctgtcccctggcagcggggccgagcccgacaccaagccggtcttccatactctcaccaacggccacgccaagggccgcttgtccggcgacgagggctccgaggacggcgacgactatgacacacctcccatcctcaaggagctgcaggcgctcaacaccgaggaggcggcggagcagcgggcggaggtggaccggatgctcagtgaggacccttggagggctgctaaaatgatcaagggttacatgcagcaacacaacatcccccagagggaggtggtcgatgtcaccggcctgaaccagtcgcacctctcccagcatctcaacaagggcacccctatgaagacccagaagcgtgccgctctgtacacctggtacgtcagaaagcaacgagagatcctccgacaattcaaccagacagtccagagttctggaaatatgacagacaaaagcagtcaggatcagctgctgtttctctttccagagttcagtcaacagagccatgggcctgggcagtccgatgatgcctgctctgagcccaccaacaagaagatgcgccgcaaccggttcaaatgggggcccgcgtcccagcaaatcttgtaccaggcctacgatcggcaaaagaaccccagcaaggaagagagagaggccttagtggaggaatgcaacagggcagaatgtttgcagcgaggggtgtccccctccaaagcccacggcctgggctccaacttggtcactgaggtccgtgtctacaactggtttgcaaaccgcaggaaggaggaggcattccggcaaaagctggccatggacgcctatagctccaaccagactcacagcctgaaccctctgctctcccacggctccccccaccaccagcccagctcctctcctccaaacaagctgtcaggagtgcgctacagccagcagggaaacaatgagatcacttcctcctcaacaatcagtcaccatggcaacagcgccatggtgaccagccagtcggttttacagcaagtctccccagccagcctggacccaggccacaatctcctctcacctgatggtaaaatgatctcagtctcaggaggaggtttgcccccagtcagcaccttgacgaatatccacagcctctcccaccataatccccagcaatctcaaaacctcatcatgacacccctctctggagtcatggcaattgcacaaagcctcaacacctcccaagcacagagtgtccctgtcatcaacagtgtggccggcagcctggcagccctgcagcccgtccagttctcccagcagctgcacagccctcaccagcagcccctcatgcagcagagcccaggcagccacatggcccagcagcccttcatggcagctgtgactcagctgcagaactcacacatgtcctctacaagcctggtgatgcccacacaccacttacttcgtgcgcaacaacaaggaccctgttttccacaccatcaccctctgggcagctgtcatggaaaagcccagtagtaatgaactagtccgtaacttgaaagtatttcgatttcttggctttatatatcttgtggaaaggacgagtactgcacgacacgacaactgtc

SEQ ID NO: 1776 - DNA, 1697 bp, Homo sapiens
  source 1..1697: mol_type = genomic DNA
accgccaccatggtgtccaagctcacgtcgctccagcaagaactcctgagcgccctgctgagctccggggtcaccaaggaggtgctggttcaggccttggaggagttgctgccatccccgaacttcggggtgaagctggagacgctgcccctgtcccctggcagcggggccgagcccgacaccaagccggtcttccatactctcaccaacggccacgccaagggccgcttgtccggcgacgagggctccgaggacggcgacgactatgacacacctcccatcctcaaggagctgcaggcgctcaacaccgaggaggcggcggagcagcgggcggaggtggaccggatgctcagtgaggacccttggagggctgctaaaatgatcaagggttacatgcagcaacacaacatcccccagagggaggtggtcgatgtcaccggcctgaaccagtcgcacctctcccagcatctcaacaagggcacccctatgaagacccagaagcgtgccgctctgtacacctggtacgtcagaaagcaacgagagatcctccgacagttcagtcaacagagccatgggcctgggcagtccgatgatgcctgctctgagcccaccaacaagaagatgcgccgcaaccggttcaaatgggggcccgcgtcccagcaaatcttgtaccaggcctacgatcggcaaaagaaccccagcaaggaagagagagaggccttagtggaggaatgcaacagggcagaatgtttgcagcgaggggtgtccccctccaaagcccacggcctgggctccaacttggtcactgaggtccgtgtctacaactggtttgcaaaccgcaggaaggaggaggcattccggcaaaagctggccatggacgcctatagctccaaccagactcacagcctgaaccctctgctctcccacggctccccccaccaccagcccagctcctctcctccaaacaagctgtcaggagtgcgctacagccagcagggaaacaatgagatcacttcctcctcaacaatcagtcaccatggcaacagcgccatggtgaccagccagtcggttttacagcaagtctccccagccagcctggacccaggccacaatctcctctcacctgatggtaaaatgatctcagtctcaggaggaggtttgcccccagtcagcaccttgacgaatatccacagcctctcccaccataatccccagcaatctcaaaacctcatcatgacacccctctctggagtcatggcaattgcacaaagcctcaacacctcccaagcacagagtgtccctgtcatcaacagtgtggccggcagcctggcagccctgcagcccgtccagttctcccagcagctgcacagccctcaccagcagcccctcatgcagcagagcccaggcagccacatggcccagcagcccttcatggcagctgtgactcagctgcagaactcacacatgtacgcacacaagcaggaacccccccagtattcccacacctcccggtttccatctgcaatggtggtcacagataccagcagcatcagtacactcaccaacatgtcttcaagtaaacagtgtcctctacaagcctggtagtaatgaactagtccgtaacttgaaagtatttcgatttcttggctttatatatcttgtggaaaggacgagccacttcgcaactcgccgctctg

SEQ ID NO: 1777 - DNA, 1475 bp, Homo sapiens
  source 1..1475: mol_type = genomic DNA
accgccaccatggtgtccaagctcacgtcgctccagcaagaactcctgagcgccctgctgagctccggggtcaccaaggaggtgctggttcaggccttggaggagttgctgccatccccgaacttcggggtgaagctggagacgctgcccctgtcccctggcagcggggccgagcccgacaccaagccggtcttccatactctcaccaacggccacgccaagggccgcttgtccggcgacgagggctccgaggacggcgacgactatgacacacctcccatcctcaaggagctgcaggcgctcaacaccgaggaggcggcggagcagcgggcggaggtggaccggatgctcagtgaggacccttggagggctgctaaaatgatcaagggttacatgcagcaacacaacatcccccagagggaggtggtcgatgtcaccggcctgaaccagtcgcacctctcccagcatctcaacaagggcacccctatgaagacccagaagcgtgccgctctgtacacctggtacgtcagaaagcaacgagagatcctccgacagttcagtcaacagagccatgggcctgggcagtccgatgatgcctgctctgagcccaccaacaagaagatgcgccgcaaccggttcaaatgggggcccgcgtcccagcaaatcttgtaccaggcctacgatcggcaaaagaaccccagcaaggaagagagagaggccttagtggaggaatgcaacagggcagaatgtttgcagcgaggggtgtccccctccaaagcccacggcctgggctccaacttggtcactgaggtccgtgtctacaactggtttgcaaaccgcaggaaggaggaggcattccggcaaaagctggccatggacgcctatagctccaaccagactcacagcctgaaccctctgctctcccacggctccccccaccaccagcccagctcctctcctccaaacaagctgtcaggagtgcgctacagccagcagggaaacaatgagatcacttcctcctcaacaatcagtcaccatggcaacagcgccatggtgaccagccagtcggttttacagcaagtctccccagccagcctggacccaggccacaatctcctctcacctgatggtaaaatgatctcagtctcaggaggaggtttgcccccagtcagcaccttgacgaatatccacagcctctcccaccataatccccagcaatctcaaaacctcatcatgacacccctctctggagtcatggcaattgcacaaatgtcctctacaagcctggtgatgcccacacaccacttacttcgtgcgcaacaacaaggaccctgttttccacaccatcaccctctgggcagctgtcatggaaaagcccagtagtaatgaactagtccgtaacttgaaagtatttcgatttcttggctttatatatcttgtggaaaggacgaggccgctcaggccgggtatctcct

SEQ ID NO: 1778 - DNA, 2018 bp, Homo sapiens
  source 1..2018: mol_type = genomic DNA
accgccaccatggtttctaaactgagccagctgcagacggagctcctggcggccctgctcgagtcagggctgagcaaagaggcactgatccaggcactgggtgagccggggccctacctcctggctggagaaggccccctggacaagggggagtcctgcggcggcggtcgaggggagctggctgagctgcccaatgggctgggggagactcggggctccgaggacgagacggacgacgatggggaagacttcacgccacccatcctcaaagagctggagaacctcagccctgaggaggcggcccaccagaaagccgtggtggagacccttctgcaggaggacccgtggcgtgtggcgaagatggtcaagtcctacctgcagcagcacaacatcccacagcgggaggtggtcgataccactggcctcaaccagtcccacctgtcccaacacctcaacaagggcactcccatgaagacgcagaagcgggccgccctgtacacctggtacgtccgcaagcagcgagaggtggcgcagcagttcacccatgcagggcagggagggctgattgaagagcccacaggtgatgagctaccaaccaagaaggggcggaggaaccgtttcaagtggggcccagcatcccagcagatcctgttccaggcctatgagaggcagaagaaccctagcaaggaggagcgagagacgctagtggaggagtgcaatagggcggaatgcatccagagaggggtgtccccatcacaggcacaggggctgggctccaacctcgtcacggaggtgcgtgtctacaactggtttgccaaccggcgcaaagaagaagccttccggcacaagctggccatggacacgtacagcgggccccccccagggccaggcccgggacctgcgctgcccgctcacagctcccctggcctgcctccacctgccctctcccccagtaaggtccacggtgtgcgctatggacagcctgcgaccagtgagactgcagaagtaccctcaagcagcggcggtcccttagtgacagtgtctacacccctccaccaagtgtcccccacgggcctggagcccagccacagcctgctgagtacagaagccaagctggtctcagcagctgggggccccctcccccctgtcagcaccctgacagcactgcacagcttggagcagacatccccaggcctcaaccagcagccccagaacctcatcatggcctcacttcctggggtcatgaccatcgggcctggtgagcctgcctccctgggtcctacgttcaccaacacaggtgcctccaccctggtcatcggcctggcctccacgcaggcacagagtgtgccggtcatcaacagcatgggcagcagcctgaccaccctgcagcccgtccagttctcccagccgctgcacccctcctaccagcagccgctcatgccacctgtgcagagccatgtgacccagagccccttcatggccaccatggctcagctgcagagcccccacgccctctacagccacaagcccgaggtggcccagtacacccacacgggcctgctcccgcagactatgctcatcaccgacaccaccaacctgagcgccctggccagcctcacgcccaccaagcaggaggctgctctgctcccccaggtcttcacctcagacactgaggcctccagtgagtccgggcttcacacgccggcatctcaggccaccaccctccacgtccccagccaggaccctgccagcatccagcacctgcagccggcccaccggctcagcgccagccccacagtgtcctccagcagcctggtgctgtaccagagctcagactccagcaatggccagagccacctgctgccatccaaccacagcgtcatcgagaccttcatctccacccagatggcctcttcctcccagtagtaatgaactagtccgtaacttgaaagtatttcgatttcttggctttatatatcttgtggaaaggacgagctcgcgcatggcgatgataacgt

SEQ ID NO: 1779 - DNA, 2090 bp, Homo sapiens
  source 1..2090: mol_type = genomic DNA
accgccaccatggtttctaaactgagccagctgcagacggagctcctggcggccctgctcgagtcagggctgagcaaagaggcactgatccaggcactgggtgagccggggccctacctcctggctggagaaggccccctggacaagggggagtcctgcggcggcggtcgaggggagctggctgagctgcccaatgggctgggggagactcggggctccgaggacgagacggacgacgatggggaagacttcacgccacccatcctcaaagagctggagaacctcagccctgaggaggcggcccaccagaaagccgtggtggagacccttctgcaggaggacccgtggcgtgtggcgaagatggtcaagtcctacctgcagcagcacaacatcccacagcgggaggtggtcgataccactggcctcaaccagtcccacctgtcccaacacctcaacaagggcactcccatgaagacgcagaagcgggccgccctgtacacctggtacgtccgcaagcagcgagaggtggcgcagcagttcacccatgcagggcagggagggctgattgaagagcccacaggtgatgagctaccaaccaagaaggggcggaggaaccgtttcaagtggggcccagcatcccagcagatcctgttccaggcctatgagaggcagaagaaccctagcaaggaggagcgagagacgctagtggaggagtgcaatagggcggaatgcatccagagaggggtgtccccatcacaggcacaggggctgggctccaacctcgtcacggaggtgcgtgtctacaactggtttgccaaccggcgcaaagaagaagccttccggcacaagctggccatggacacgtacagcgggccccccccagggccaggcccgggacctgcgctgcccgctcacagctcccctggcctgcctccacctgccctctcccccagtaaggtccacggtgtgcgctatggacagcctgcgaccagtgagactgcagaagtaccctcaagcagcggcggtcccttagtgacagtgtctacacccctccaccaagtgtcccccacgggcctggagcccagccacagcctgctgagtacagaagccaagctggtctcagcagctgggggccccctcccccctgtcagcaccctgacagcactgcacagcttggagcagacatccccaggcctcaaccagcagccccagaacctcatcatggcctcacttcctggggtcatgaccatcgggcctggtgagcctgcctccctgggtcctacgttcaccaacacaggtgcctccaccctggtcatcggcctggcctccacgcaggcacagagtgtgccggtcatcaacagcatgggcagcagcctgaccaccctgcagcccgtccagttctcccagccgctgcacccctcctaccagcagccgctcatgccacctgtgcagagccatgtgacccagagccccttcatggccaccatggctcagctgcagagcccccacgccctctacagccacaagcccgaggtggcccagtacacccacacgggcctgctcccgcagactatgctcatcaccgacaccaccaacctgagcgccctggccagcctcacgcccaccaagcaggtaaggtccaggcctgctggccctcccttggcctgtgacagagcccctcacccccacatcccccgggctcaggaggctgctctgctcccccaggtcttcacctcagacactgaggcctccagtgagtccgggcttcacacgccggcatctcaggccaccaccctccacgtccccagccaggaccctgccagcatccagcacctgcagccggcccaccggctcagcgccagccccacagtgtcctccagcagcctggtgctgtaccagagctcagactccagcaatggccagagccacctgctgccatccaaccacagcgtcatcgagaccttcatctccacccagatggcctcttcctcccagtagtaatgaactagtccgtaacttgaaagtatttcgatttcttggctttatatatcttgtggaaaggacgatgaattagaacctgtatggtacgc

SEQ ID NO: 1780 - DNA, 1997 bp, Homo sapiens
  source 1..1997: mol_type = genomic DNA
accgccaccatggtttctaaactgagccagctgcagacggagctcctggcggccctgctcgagtcagggctgagcaaagaggcactgatccaggcactgggtgagccggggccctacctcctggctggagaaggccccctggacaagggggagtcctgcggcggcggtcgaggggagctggctgagctgcccaatgggctgggggagactcggggctccgaggacgagacggacgacgatggggaagacttcacgccacccatcctcaaagagctggagaacctcagccctgaggaggcggcccaccagaaagccgtggtggagacccttctgcaggaggacccgtggcgtgtggcgaagatggtcaagtcctacctgcagcagcacaacatcccacagcgggaggtggtcgataccactggcctcaaccagtcccacctgtcccaacacctcaacaagggcactcccatgaagacgcagaagcgggccgccctgtacacctggtacgtccgcaagcagcgagaggtggcgcagcagttcacccatgcagggcagggagggctgattgaagagcccacaggtgatgagctaccaaccaagaaggggcggaggaaccgtttcaagtggggcccagcatcccagcagatcctgttccaggcctatgagaggcagaagaaccctagcaaggaggagcgagagacgctagtggaggagtgcaatagggcggaatgcatccagagaggggtgtccccatcacaggcacaggggctgggctccaacctcgtcacggaggtgcgtgtctacaactggtttgccaaccggcgcaaagaagaagccttccggcacaagctggccatggacacgtacagcgggccccccccagggccaggcccgggacctgcgctgcccgctcacagctcccctggcctgcctccacctgccctctcccccagtaaggtccacggtgtgcgctatggacagcctgcgaccagtgagactgcagaagtaccctcaagcagcggcggtcccttagtgacagtgtctacacccctccaccaagtgtcccccacgggcctggagcccagccacagcctgctgagtacagaagccaagctggtctcagcagctgggggccccctcccccctgtcagcaccctgacagcactgcacagcttggagcagacatccccaggcctcaaccagcagccccagaacctcatcatggcctcacttcctggggtcatgaccatcgggcctggtgagcctgcctccctgggtcctacgttcaccaacacaggtgcctccaccctggtcatcggcctggcctccacgcaggcacagagtgtgccggtcatcaacagcatgggcagcagcctgaccaccctgcagcccgtccagttctcccagccgctgcacccctcctaccagcagccgctcatgccacctgtgcagagccatgtgacccagagccccttcatggccaccatggctcagctgcagagcccccacgccctctacagccacaagcccgaggtggcccagtacacccacacgggcctgctcccgcagactatgctcatcaccgacaccaccaacctgagcgccctggccagcctcacgcccaccaagcaggtcttcacctcagacactgaggcctccagtgagtccgggcttcacacgccggcatctcaggccaccaccctccacgtccccagccaggaccctgccagcatccagcacctgcagccggcccaccggctcagcgccagccccacagtgtcctccagcagcctggtgctgtaccagagctcagactccagcaatggccagagccacctgctgccatccaaccacagcgtcatcgagaccttcatctccacccagatggcctcttcctcccagtagtaatgaactagtccgtaacttgaaagtatttcgatttcttggctttatatatcttgtggaaaggacgacggccagctttcgcagagtgtgtt

SEQ ID NO: 1781 - DNA, 1121 bp, Homo sapiens
  source 1..1121: mol_type = genomic DNA
accgccaccatggaagggcagcacaactacttatgtgctggaagaaatgactgcatcgttgataaaatccgcagaaaaaactgcccagcatgtcgccttagaaagtgctgtcaggctggcatggtccttggaggtcgaaaatttaaaaagttcaataaagtcagagttgtgagagcactggatgctgttgctctcccacagccagtgggcgttccaaatgaaagccaagccctaagccagagattcactttttcaccaggtcaagacatacagttgattccaccactgatcaacctgttaatgagcattgaaccagatgtgatctatgcaggacatgacaacacaaaacctgacacctccagttctttgctgacaagtcttaatcaactaggcgagaggcaacttctttcagtagtcaagtggtctaaatcattgccaggttttcgaaacttacatattgatgaccagataactctcattcagtattcttggatgagcttaatggtgtttggtctaggatggagatcctacaaacacgtcagtgggcagatgctgtattttgcacctgatctaatactaaatgaacagcggatgaaagaatcatcattctattcattatgccttaccatgtggcagatcccacaggagtttgtcaagcttcaagttagccaagaagagttcctctgtatgaaagtattgttacttcttaatacaattcctttggaagggctacgaagtcaaacccagtttgaggagatgaggtcaagctacattagagagctcatcaaggcaattggtttgaggcaaaaaggagttgtgtcgagctcacagcgtttctatcaacttacaaaacttcttgataacttgcatgatcttgtcaaacaacttcatctgtactgcttgaatacatttatccagtcccgggcactgagtgttgaatttccagaaatgatgtctgaagttattgctgcacaattacccaagatattggcagggatggtgaaaccccttctctttcataaaaagtagtaatgaactagtccgtaacttgaaagtatttcgatttcttggctttatatatcttgtggaaaggacgagaatcgatacggacccagttgaac

SEQ ID NO: 1782 - DNA, 2669 bp, Homo sapiens
  source 1..2669: mol_type = genomic DNA
accgccaccatggctgccgcggctacgctgaggctctccgctcagggcacagtgacttttgaagatgtggctgtgaactttacctgggaggaatggaatctccttagtgaggctcagagatgcctgtaccgtgatgtgacgctggagaacctggcacttatatcctccctgggttgttggtgtggagtggaagatgaggcggcaccttctaagcagagtatttatatacaaagagagactcaggtcaggactcctatggcaggtgtgtctcccaagaaggcccacccctgtgagatgtgtggcccgatcttgggagacattttgcatgtggcagatcatcagggaacacatcacaagcagaaactgcacaggtgtgaggcctgggggaataaattgtatgacagtggaaactttcatcagcaccagaatgagcacattggagagaaaccctacagagggagtgttgaggaggcgttgtttgcaaagaggtgtaagttgcatgtgtcaggggagtcatctgtcttcagtgagagtgggaaggactttttgcccaggtcaggattactccagcaggaggccagtcacactggggagaagtcaaacagcaaaactgagtgtgtgtctcccattcagtgtgggggagctcactacagctgtggagaatccatgaaacattttagcaccaaacatatactcagtcagcaccagagactgctcactagagaagagtgttatgtgtgctgtgaatgtgggaagtcctttagcaaatatgctagcttgagtaatcatcagagagttcacactgaaaaaaaacatgaatgtggagaatgtgggaaatcctttagcaaatatgttagcttcagtaatcatcagagagttcacactgaaaaaaaacatgaatgtggagaatgtgggaaatcctttagcaaatatgttagcttcagtaatcatcagagagttcacactgggaaaagaccttatgaatgtggagaatgtgggaaatcgtttagcaaatatgctagcttcagtaatcatcagagagttcacactgaaaaaaaacattatgaatgtggagaatgtgggaaatcctttagcaaatatgttagcttcagtaatcatcagagagttcacactgggaaaagaccttatgaatgtggagaatgtgggaaatcgtttagcaaatatgctagcttcagtaatcatcagagagttcacactgacaaaaaacattatgaatgtggagaatgtgggaaatcctttagtcaaaagagcagcctcattcaacatcagcgatttcacactggagaaaaaccttatgggtgtgaagaatgtgggaaatcttttagttcagaaggacatcttaggagccatcaacgagttcacgccggagaaagacctttcaagtgtggagaatgtgtgaaatctttcagtcataagcgcagccttgttcaccatcagcgagttcacagtggagaaagaccttatcagtgtggagaatgtgggaaatctttcagtcaaaagggcaacctcgttctacaccagcgagttcacactggagcaagaccttatgagtgtggagaatgtgggaaatcatttagttcaaaaggacatcttaggaaccatcagcaaattcacactggggacagactttatgagtgtggagagtgtgggaaatcttttagtcataaaggcaccctcattctacatcagcgagttcaccctagagaaagatcttatgggtgtggagaatgtgggaaatcttttagttcaatcgggcaccttaggagccatcagcgcgttcatactggagagaggccttatgagtgtggagaatgtgggaaatcttttagtcataagcgcagccttgttcaccatcagcgcatgcacactggagaaagaccttacaagtgtggagactgtgggaaatcttttaatgaaaaaggacaccttaggaatcatcagcgagttcacactacagaaagaccttttaagtgtggggaatgtgggaaatgttttagtcacaagggtaacctcattctacaccagcatggccatactggagaaagaccttatgtatgtagggaatgtggaaaattatttaagaagaagtctcacctccttgtacaccagagaattcacaatggagaaaagccatatgcttgtgaagcttgtcagaaattttttagaaacaagtaccaactcattgcacatcagagagttcacactggagaaaggccttatgaatgcaatgattgtggaaaatcatttacccacagctctacattctgtgttcataagcgaattcacactggagaaaagccttatgagtgcagtgaatgtggaaaatctttcgctgaaagctccagtttcacaaaacacaaaagagttcacactggagaaaagccttatgagtgcagtgaatgtggaaaatcttttgctgaaagctccagtctcactaaacacaagagagttcacactggagaaaagccttataaatgtgagaaatgtgggaaattatttaacaagaagtctcacctccttgtacaccagagttcacactggagaaaagccatatagtaatgaactagtccgtaacttgaaagtatttcgatttcttggctttatatatcttgtggaaaggacgagtccacgagaactttggatacgaa

SEQ ID NO: 1783 - DNA, 2456 bp, Homo sapiens
  source 1..2456: mol_type = genomic DNA
accgccaccatggagggcgcgatggcagtgcgggtgacggccgctcatacggcagaagcccaggccgaagccgggcgggaagcgggcgagggtgcagttgcggcggtggcggcggccttggcccccagcggcttcctcggcctcccggcgcccttcagcgaggaagatgaggacgatgtgcacagatgcggccgctgccaggcagagttcaccgccttggaggattttgttcagcacaagattcagaaggcctgccagcgggcccctccggaggccctgcctgccacccctgccaccacagcgttgctgggccaggaggtggtgccggcagcaccaggcccagaggagcccatcactgtggcccacatcgtggtggaggcggcctctctggcagcagacatcagccacgcatctgaccttgttggtggtgggcacatcaaagaggtcatcgtggctgctgaggcggagctgggagacggtgagatggccgaggccccgggcagcccccgccagcaggggctggggctcgcaggggagggtgagcaggcccaggtgaagctactggtgaacaaggatggccgctatgtgtgtgcgctgtgccacaagaccttcaagacgggcagcatcctcaaggcccacatggtcactcacagcagccgcaaggaccacgagtgcaagctctgtggggcctccttccgcaccaagggctcactcatccggcaccaccggcggcacacggatgagcgcccctacaagtgctccaagtgtggaaagagcttccgggagtcgggtgcactgacccggcacctcaagtctctcaccccctgcacagagaaaatccgcttcagtgtgagcaaggacgtggttgtcagcaaagaggacgcacgtgcaggttctggagctggagctgccggcttggggacagccacatcatcggtgacaggcgagcctatagagacttcacccgtgattcacctggtgacagatgccaagggcaccgtcatccacgaagtccacgtccagatgcaggagctgtccctgggcatgaaagccctggccccagagccccccgtctcccaggagctcccctgctccagcgagggcagccgtgagaacctgctgcaccaggccatgcagaactccggcatcgtccttgagcgcgctgctggggaggagggtgccctggagccagctcctgctgccgggtccagtccccagcccctggcagtggcagccccgcagctgccggtactggaagtgcagccgctggagacacaggtggccagcgaggcctcagcggtgcccaggacccacccatgtcctcagtgcagtgagaccttcccgacagcagccaccctggaggcccacaagaggggccacaccgggccgaggccgttcgcctgcgcgcagtgtggcaaggccttccccaaggcctacctgctcaagaagcaccaggaggtgcacgtgcgtgagcgccgcttccgctgtggcgactgcgggaagctctacaagaccattgcccatgtgcgtggccaccggcgcgtccactcagacgagcggccctacccttgtcccaagtgtggcaagcgctacaagactaagaacgcacagcaggtgcacttcaggacacacctggaggagaagccgcacgtgtgccagttctgcagccgtggcttccgagagaagggctcactggtgcggcacgtgcgacaccacacaggcgagaagccgttcaagtgctacaagtgcggccgtggcttcgccgagcacggcacgctgaaccggcacctgcgcaccaaagggggctgcctgctggaggtggaggagttgctggtgtctgaggacagccccgcggcagccaccaccgtcctcacggaagacccgcacacagtgttggtggagttctcgtccgtggtagctgacacccaggagtatatcatcgaggccactgcggacgatgcggagaccagtgaggccacggagatcatcgagggcacccagacagaggtggacagccacatcatgaaggtggtgcagcagatcgtgcaccaggctagcgccggccaccagatcatcgtgcagaacgtcaccatggacgaggagacggcgctgggcccagaggcggctgccgccgacaccatcaccatcgccacccccgagagcctgacagagcaggtggccatgacgctggcctcggccatcagcgagggcactgtgcttgccgcccgggcagggacaagtggcactgaacaggccactgtgaccatggtgtcatcagaggacatcgagatcctggagcatgcaggcgagctggtcatcgcctcgccggagggccagctggaggtgcagacggtcatcgtctagtaatgaactagtccgtaacttgaaagtatttcgatttcttggctttatatatcttgtggaaaggacgagtgagtggtggaagatatggctca

SEQ ID NO: 1784 - DNA, 1925 bp, Homo sapiens
  source 1..1925: mol_type = genomic DNA
accgccaccatggagggcgcgatggcagtgcgggtgacggccgctcatacggcagaagcccaggccgaagccgggcgggaagcgggcgagggtgcagttgcggcggtggcggcggccttggcccccagcggcttcctcggcctcccggcgcccttcagcgaggaagatgaggacgatgtgcacagatgcggccgctgccaggcagagttcaccgccttggaggattttgttcagcacaagattcagaaggcctgccagcgggcccctccggaggccctgcctgccacccctgccaccacagcgttgctgggccaggaggtggtgccggcagcaccaggcccagaggagcccatcactgtggcccacatcgtggtggaggcggcctctctggcagcagacatcagccacgcatctgaccttgttggtggtgggcacatcaaagaggtcatcgtggctgctgaggcggagctgggagacggtgagatggccgaggccccgggcagcccccgccagcaggggctggggctcgcaggggagggtgagcaggcccaggtgaagctactggtgaacaaggatggccgctatgtgtgtgcgctgtgccacaagaccttcaagacgggcagcatcctcaaggcccacatggtcactcacagcagccgcaaggaccacgagtgcaagctctgtggggcctccttccgcaccaagggctcactcatccggcaccaccggcggcacacggatgagcgcccctacaagtgctccaagtgtggaaagagcttccgggagtcgggtgcactgacccggcacctcaagtctctcaccccctgcacagagaaaatccgcttcagtgtgagcaaggacgtggttgtcagcaaagaggacgcacgtgcaggttctggagctggagctgccggcttggggacagccacatcatcggtgacaggcgagcctatagagacttcacccgtgattcacctggtgacagatgccaagggcaccgtcatccacgaagtccacgtccagatgcaggagctgtccctgggcatgaaagccctggccccagagccccccgtctcccaggagctcccctgctccagcgagggcagccgtgagaacctgctgcaccagttctgcagccgtggcttccgagagaagggctcactggtgcggcacgtgcgacaccacacaggcgagaagccgttcaagtgctacaagtgcggccgtggcttcgccgagcacggcacgctgaaccggcacctgcgcaccaaagggggctgcctgctggaggtggaggagttgctggtgtctgaggacagccccgcggcagccaccaccgtcctcacggaagacccgcacacagtgttggtggagttctcgtccgtggtagctgacacccaggagtatatcatcgaggccactgcggacgatgcggagaccagtgaggccacggagatcatcgagggcacccagacagaggtggacagccacatcatgaaggtggtgcagcagatcgtgcaccaggctagcgccggccaccagatcatcgtgcagaacgtcaccatggacgaggagacggcgctgggcccagaggcggctgccgccgacaccatcaccatcgccacccccgagagcctgacagagcaggtggccatgacgctggcctcggccatcagcgagggcactgtgcttgccgcccgggcagggacaagtggcactgaacaggccactgtgaccatggtgtcatcagaggacatcgagatcctggagcatgcaggcgagctggtcatcgcctcgccggagggccagctggaggtgcagacggtcatcgtctagtaatgaactagtccgtaacttgaaagtatttcgatttcttggctttatatatcttgtggaaaggacgaatatgatgcgagcggcgcacggtt

SEQ ID NO: 1785 - DNA, 1355 bp, Homo sapiens
  source 1..1355: mol_type = genomic DNA
accgccaccatgtcccaggactcggtgaccttcgcagacgtggctgtgaacttcaccaaagaggagtggaccctgctggacccagctcagaggaatctctacagagacgtgatgctggaaaattctaggaacttggcattcatagattgggcaactccatgtaaaaccaaagacgcaacccctcagccggatattcttcctaaaagaacatttcctgaagccaacagagtgtgtctcacgagcatcagttcccagcactccacattaagagaagactggagatgccccaaaacagaggaaccacacaggcagggggtgaataatgtgaagccacctgcagttgcccctgagaaagatgaatctcctgttagcatttgtgaagatcatgaaatgaggaaccactctaaacctacctgcaggcttgtgccttcacagggagattccataagacaatgtatcctaacacgtgactcaagtattttcaagtataatcctgtcttaaacgatagtcaaaaaacacatgaaaacaacgaagacgatggagtcttggggtggaacattcagtgggttccgtgtgggagaaaaacagagctgaaatcaagcacatggactggcagtcagaacactgtgcatcatatacgtgatgaaattgatacgggggccaacaggcaccagcggaatccatttggaaaagctttccgtgaagacggatcccttagggcacacaacactcatggtcgagagaaaatgtatgattttactcagtgcgagaacacctccagaaataactcaattcacgccatgcagatgcagttgtataccgcagagacaaacaagaaggattgtcaaactggggcaacctctgccaacgctccaaattccggttcacacaagagtcattgcactggagagaaaacccataaatgccccgaatgtgggagagcctttttttatcagtcattccttatgagacatatgaaaattcacactggagagaaaccgtatgaatgtgggaaatgtgggaaagcctttagatattccttacaccttaataaacatttaagaaagcatgttgtgcagaagaagccctacgaatgtgaagaatgtgggaaagtcattcgggagtcctcaaaatatacacatataaggagccacactggagagaaaccctataaatgtaagacatgtggaaaagactttgcaaagtcgtcaggacttaaaaaacatcttaagactcacaaagatgagaagccctgtgaatagtaatgaactagtccgtaacttgaaagtatttcgatttcttggctttatatatcttgtggaaaggacgaagatggcaaaggtacacgcacgtg

SEQ ID NO: 1786 - DNA, 932 bp, Homo sapiens
  source 1..932: mol_type = genomic DNA
accgccaccatgtccaagccggtggaccacgtcaagcggcccatgaacgccttcatggtgtggtcgcgggctcagcggcgcaagatggcccaggagaaccccaagatgcacaactcggagatcagcaagcgcttgggcgccgagtggaaactgctcacagagtcggagaagcggccgttcatcgacgaggccaagcgtctacgcgccatgcacatgaaggagcaccccgactacaagtaccggccgcggcgcaagcccaagacgctgctcaagaaggacaagttcgccttcccggtgccctacggcctgggcggcgtggcggacgccgagcaccctgcgctcaaggcgggcgccgggctgcacgcgggggcgggcggcggcctggtgcctgagtcgctgctcgccaatcccgagaaggcggccgcggccgccgccgctgccgccgcacgcgtcttcttcccgcagtcggccgctgccgccgccgctgccgccgccgccgccgccgcgggcagcccctactcgctgctcgacctgggctccaaaatggcagagatctcgtcgtcctcgtccggcctcccgtacgcgtcgtcgctgggctacccgaccgcgggcgcgggcgccttccacggcgcggcggcggcggctgcagcggcggccgccgccgccggggggcacacgcactcgcaccccagcccgggcaacccgggctacatgatcccgtgcaactgcagcgcgtggcccagccccgggctgcagccgccgctcgcctacatcctgctgccgggcatgggcaagccccagctggacccctaccccgcggcctacgctgccgcgctatagtaatgaactagtccgtaacttgaaagtatttcgatttcttggctttatatatcttgtggaaaggacgaccctctccgttgtcgtaacgtatt

SEQ ID NO: 1787 - DNA, 722 bp, Homo sapiens
  source 1..722: mol_type = genomic DNA
accgccaccatggatcttgtcagatctgctcccgggggtattcttgacttaaacaaggttgcaacgaaactgggagtccgaaagcggagagtgtatgacatcaccaatgtcttagatggaatcgacctcgttgaaaagaaatccaagaaccatattagatggataggatctgatcttagcaattttggagcagttccccaacaaaagaagctacaggaggaactttctgacttatcagcaatggaagatgctttggatgagttaattaaggattgtgctcagcagctgtttgagttaacagatgacaaagaaaatgaaagactagcatatgtgacctatcaagacattcatagcattcaggccttccatgaacagatcgtcattgcagttaaagctccagcagaaaccagattggatgttccagctcccagagaagactctatcacagtgcacataaggagcaccaacggacctatcgatgtctatttgtgtgaagtggagcagggtcagaccagtaacaaaaggtctgaaggtgtcgggacctcttcatctgagagcactcatccagaaggccctgaggaagaagaaaatcctcagcaaagtgaagaattgcttgaagtaagcaactagtaatgaactagtccgtaacttgaaagtatttcgatttcttggctttatatatcttgtggaaaggacgaggtacttatcgtgatcggtaaatg

SEQ ID NO: 1788 - DNA, 851 bp, Homo sapiens
  source 1..851: mol_type = genomic DNA
accgccaccatgaatccttctccatcaaaaataaggattaatttagaagataatgtacaatatgtgtccatgagaaaagctctaaaagtgaagagacctcgttttgatgtatcgctggtttatttaactcgaaaatttatggatcttgtcagatctgctcccgggggtattcttgacttaaacaaggttgcaacgaaactgggagtccgaaagcggagagtgtatgacatcaccaatgtcttagatggaatcgacctcgttgaaaagaaatccaagaaccatattagatggataggatctgatcttagcaattttggagcagttccccaacaaaagaagctacaggaggaactttctgacttatcagcaatggaagatgctttggatgagttaattaaggattgtgctcagcagctgtttgagttaacagatgacaaagaaaatgaaagactagcatatgtgacctatcaagacattcatagcattcaggccttccatgaacagatcgtcattgcagttaaagctccagcagaaaccagattggatgttccagctcccagagaagactctatcacagtgcacataaggagcaccaacggacctatcgatgtctatttgtgtgaagtggagcagggtcagaccagtaacaaaaggtctgaaggtgtcgggacctcttcatctgagagcactcatccagaaggccctgaggaagaagaaaatcctcagcaaagtgaagaattgcttgaagtaagcaactagtaatgaactagtccgtaacttgaaagtatttcgatttcttggctttatatatcttgtggaaaggacgaatttatgaggccacgctacattgt

SEQ ID NO: 1789 - DNA, 1139 bp, Homo sapiens
  source 1..1139: mol_type = genomic DNA
accgccaccatggcggcggcagagcccgcgagctcgggccagcaggcgccggcagggcaggggcagggccagcggccgccgccgcagcctccgcaggcgcaagccccgcagccgcccccgccgccgcagctcgggggcgccgggggcggcagcagcaggcacgagaagagcctggggctgctcactaccaagttcgtgtcgctgctgcaggaggccaaggacggcgttctggatctcaaagcggctgctgatactttggctgtgaggcaaaaaaggagaatttatgatatcaccaatgtcttagagggaattgacttgattgaaaaaaagtcaaaaaacagtatccagtggaaaggtgtaggtgctggctgtaatactaaagaagtcatagatagattaagatatcttaaagctgaaattgaagatctagaactgaaggaaagagaacttgatcagcagaagttgtggctacagcaaagcatcaaaaatgtgatggacgattccattaataatagattttcctatgtaactcatgaagacatctgtaattgctttaatggtgatacacttttggccattcaggcaccttctggtacacaactggaggtacccattccagaaatgggtcagaatggacaaaagaaataccagatcaatctaaagagtcattcaggacctatccatgtgctgcttataaataaagagtcgagttcatctaagcccgtggtttttcctgttcccccacctgatgacctcacacagccttcctcccagtccttgactccagtgactccacagaaatccagcatggcaactcaaaatctgcctgagcaacatgtctctgaaagaagccaggctctgcagcagacatcagctacagatatatcttcaggatctattagtggagatatcattgatgagttaatgtcttctgacgtgtttcctctcttaaggctttctcctaccccggcagatgactacaactttaatttagatgataacgaaggagtttgtgatctgtttgatgtccagatactaaattattagtaatgaactagtccgtaacttgaaagtatttcgatttcttggctttatatatcttgtggaaaggacgaactaacttgcgcgggcaagcttct

SEQ ID NO: 1790 - DNA, 1142 bp, Homo sapiens
  source 1..1142: mol_type = genomic DNA
accgccaccatggcggcggcagagcccgcgagctcgggccagcaggcgccggcagggcaggggcagggccagcggccgccgccgcagcctccgcaggcgcaagccccgcagccgcccccgccgccgcagctcgggggcgccgggggcggcagcagcaggcacgagaagagcctggggctgctcactaccaagttcgtgtcgctgctgcaggaggccaaggacggcgttctggatctcaaagcggctgctgatactttggctgtgaggcaaaaaaggagaatttatgatatcaccaatgtcttagagggaattgacttgattgaaaaaaagtcaaaaaacagtatccagtggaaaggtgtaggtgctggctgtaatactaaagaagtcatagatagattaagatatcttaaagctgaaattgaagatctagaactgaaggaaagagaacttgatcagcagaagttgtggctacagcaaagcatcaaaaatgtgatggacgattccattaataatagattttcctatgtaactcatgaagacatctgtaattgctttaatggtgatacacttttggccattcaggcaccttctggtacacaactggaggtacccattccagaaatgggtcagaatggacaaaagaaataccagatcaatctaaagagtcattcaggacctatccatgtgctgcttataaataaagagtcgagttcatctaagcccgtggtttttcctgttcccccacctgatgacctcacacagccttcctcccagtccttgactccagtgactccacagaaatccagcatggcaactcaaaatctgcctgagcaacatgtctctgaaagaagccaggctctgcagcagacatcagctacagatatatcttcagcaggatctattagtggagatatcattgatgagttaatgtcttctgacgtgtttcctctcttaaggctttctcctaccccggcagatgactacaactttaatttagatgataacgaaggagtttgtgatctgtttgatgtccagatactaaattattagtaatgaactagtccgtaacttgaaagtatttcgatttcttggctttatatatcttgtggaaaggacgacgatgactcggttcaccactgtat

SEQ ID NO: 1791 - DNA, 659 bp, Homo sapiens
  source 1..659: mol_type = genomic DNA
accgccaccatggacgattccattaataatagattttcctatgtaactcatgaagacatctgtaattgctttaatggtgatacacttttggccattcaggcaccttctggtacacaactggaggtacccattccagaaatgggtcagaatggacaaaagaaataccagatcaatctaaagagtcattcaggacctatccatgtgctgcttataaataaagagtcgagttcatctaagcccgtggtttttcctgttcccccacctgatgacctcacacagccttcctcccagtccttgactccagtgactccacagaaatccagcatggcaactcaaaatctgcctgagcaacatgtctctgaaagaagccaggctctgcagcagacatcagctacagatatatcttcagcaggatctattagtggagatatcattgatgagttaatgtcttctgacgtgtttcctctcttaaggctttctcctaccccggcagatgactacaactttaatttagatgataacgaaggagtttgtgatctgtttgatgtccagatactaaattattagtaatgaactagtccgtaacttgaaagtatttcgatttcttggctttatatatcttgtggaaaggacgacccgcgactactacacgaaagccc

SEQ ID NO: 1792 - DNA, 1343 bp, Homo sapiens
  source 1..1343: mol_type = genomic DNA
accgccaccatggcggaggccgggccacaggcgccgccgcccccgggcactccaagccggcacgaaaagagcctgggactgctcaccaccaagttcgtgtcccttctgcaggaggccaaggacggcgtgcttgacctcaagctggcagctgacaccctagctgtacgccagaagcggcggatttacgacattaccaatgttttggaaggtatcgggctaatcgagaaaaagtccaagaacagcatccagtggaagggtgtggggcctggctgcaatacccgggagattgctgacaaactgattgagctcaaggcagagatcgaggagctgcagcagcgggagcaagaactagaccagcacaaggtgtgggtgcagcagagcatccggaacgtcacagaggacgtgcagaacagctgtttggcctacgtcactcatgaggacatctgcagatgctttgctggagataccctcttggccatccgggccccatcaggcaccagcctggaggtgcccatcccagagggtctcaatgggcagaagaagtaccagattcacctgaagagtgtgagtggtcccattgaggttctgctggtgaacaaggaggcatggagctcaccccctgtggctgtgcctgtgccaccacctgaagatttgctccagagcccatctgctgtttctacacctccacctctgcccaagcctgccctagcccagtcccaggaagcctcacgtccaaatagtcctcagctcactcccactgctgtccctggcagtgcagaagtccagggaatggctggcccagcagctgagatcacagtgagtggcggccctgggactgatagcaaggacagtggtgagctcagttcactcccactgggcccaacaacactggacacccggccactgcagtcttctgccctgctggacagcagcagcagcagcagcagcagcagcagcagcagcagcaacagtaacagcagcagttcgtccggacccaacccttctacctcctttgagcccatcaaggcagaccccacaggtgttttggaactccccaaagagctgtcagaaatctttgatcccacacgagagtgcatgagctcggagctgctggaggagttgatgtcctcagaagtgtttgcccctctgcttcgtctttctccacccccgggagaccacgattatatctacaacctggacgagagtgaaggtgtctgtgacctctttgatgtgcctgttctcaacctctagtaatgaactagtccgtaacttgaaagtatttcgatttcttggctttatatatcttgtggaaaggacgatcgcgacccgtcaggagcataccg

SEQ ID NO: 1793 - DNA, 1499 bp, Homo sapiens
  source 1..1499: mol_type = genomic DNA
accgccaccatgagaaagggaatccagcccgctctggagcagtacctggtgaccgccgggggtggggagggggcggctgtcgtcgccgccgccgctgcagcctccatggacaaaagggcactgctagccagccccggcttcgccgccgccgccgccgctgccgccgccccgggcgcgtacatccagatcctcaccacgaacacttccaccacctcctgttcctcctccctccaaagcggcgccgtagccgccggccccctcctccccagtgcccccggcgcggagcagaccgccggcagcctcctctacaccacgccgcacggaccctccagcagagccgggctgctgcagcagccaccagcgctgggacgcggcggcagcggcggcggcggcggccctccggcaaagcgaaggctggagctaggagaaagcggtcatcagtacctctcagatggtttaaaaacccccaagggcaaaggaagagctgcactacgaagtccagatagtccaaaaactccaaaatctccctcagaaaaaacgcggtatgatacgtctcttggtctgctcaccaagaagttcattcagctcctgagccagtcacccgatggggtattggatttgaacaaggcagcagaagtgctaaaagtgcaaaagagaaggatttatgatatcaccaacgttctggaaggcatccacctcattaagaagaagtctaaaaacaacgtccaatggatgggctgcagtctgtctgaggatgggggcatgctggcccagtgtcaaggcctgtcaaaagaagtgaccgagctcagtcaggaagagaagaaattagatgaactgatccaaagctgcaccctggacctcaaactgttaaccgaggattcagagaatcaaaggttagcttatgttacatatcaagatattcgaaaaattagtggccttaaagaccaaactgttatagttgtgaaagcccctccagaaacaagacttgaagtgcctgactcaatagagagcctacaaatacatttggcaagtacccaagggcccattgaggtttacttatgtccagaagagactgaaacacacagtccaatgaaaacaaacaaccaagaccacaatgggaatatccctaaacccgcttccaaagacttggcttcaaccaactcaggacatagcgattgctcagtttctatgggaaacctttctcctctggcctccccagccaacctcttacagcagactgaggaccaaattccttccaacctagaaggaccgtttgtgaacttactgcctcccctgctgcaagaggactatctcctgagcctcggggaggaggaaggcatcagcgatctcttcgatgcttacgatttggaaaagctcccactggtggaagacttcatgtgtagttagtaatgaactagtccgtaacttgaaagtatttcgatttcttggctttatatatcttgtggaaaggacgaaatcgtcgagccttctagttgaca

SEQ ID NO: 1794 - DNA, 1106 bp, Homo sapiens
  source 1..1106: mol_type = genomic DNA
accgccaccatgcccttacagcagcaggcaaagcgaaggctggagctaggagaaagcggtcatcagtacctctcagatggtttaaaaacccccaagggcaaaggaagagctgcactacgaagtccagatagtccaaaaaaaaaaacgcggtatgatacgtctcttggtctgctcaccaagaagttcattcagctcctgagccagtcacccgatggggtattggatttgaacaaggcagcagaagtgctaaaagtgcaaaagagaaggatttatgatatcaccaacgttctggaaggcatccacctcattaagaagaagtctaaaaacaacgtccaatggatgggctgcagtctgtctgaggatgggggcatgctggcccagtgtcaaggcctgtcaaaagaagtgaccgagctcagtcaggaagagaagaaattagatgaactgatccaaagctgcaccctggacctcaaactgttaaccgaggattcagagaatcaaaggttagcttatgttacatatcaagatattcgaaaaattagtggccttaaagaccaaactgttatagttgtgaaagcccctccagaaacaagacttgaagtgcctgactcaatagagagcctacaaatacatttggcaagtacccaagggcccattgaggtttacttatgtccagaagagactgaaacacacagtccaatgaaaacaaacaaccaagaccacaatgggaatatccctaaacccgcttccaaagacttggcttcaaccaactcaggacatagcgattgctcagtttctatgggaaacctttctcctctggcctccccagccaacctcttacagcagactgaggaccaaattccttccaacctagaaggaccgtttgtgaacttactgcctcccctgctgcaagaggactatctcctgagcctcggggaggaggaaggcatcagcgatctcttcgatgcttacgatttggaaaagctcccactggtggaagacttcatgtgtagttagtaatgaactagtccgtaacttgaaagtatttcgatttcttggctttatatatcttgtggaaaggacgaccatagtaagactcagtttgttgg

SEQ ID NO: 1795 - DNA, 1415 bp, Homo sapiens
  source 1..1415: mol_type = genomic DNA
accgccaccatgctgcaagggccccgggccttggcttcggccgctgggcagaccccgaaggtggtgcccgcgatgagccccacagagctgtggccatccggcctcagcagcccccagctctgcccagctactgctacctactacacaccgctgtacccgcagacggcgcctcccgcagcggcgccaggcacctgcctcgacgccactccccacggacccgagggccaagttgtgcgatgcctgccggcaggccggctgccggccaaaaggaagctggatctggaggggattgggaggcccgtcgtccctgagttcccaacccccaaggggaagtgcatcagagtggatggcctccccagccccaaaacccccaaatcccccggggagaagactcggtatgacacttcgctggggctgctcaccaagaagttcatttacctcctgagcgagtcagaggatggggtcctggacctgaactgggccgctgaggtgctggacgtgcagaagcggcgcatctatgacatcaccaacgtgctggaaggcatccagctcatccgcaagaaggccaagaacaacatccagtgggtaggcaggggaatgtttgaagaccccaccagacctgggaagcagcaacagctggggcaggagctgaaggagctgatgaacacggagcaggccttggaccagctcatccagagctgctctctgagcttcaagcacctgactgaggacaaggccaacaagaggctggcctatgtgacttaccaggatatccgtgctgttggcaactttaaggagcagacagtgattgccgtcaaggcccctccgcagacgagactggaagtgcccgacaggactgaggacaacctgcagatatatctcaagagcacccaagggcccatcgaagtctacctgtgcccagaggaggtgcaggagccggacagtccttccgaggagcctctcccctctacctccaccctctgccccagccctgactctgcccagcccagcagcagcaccgaccctagcatcatggagcccacagcatcctcagtgccagcaccagcgccaaccccccagcaggccccaccgcctccatccctggtccccttggaggctactgacagcctgctggagctgccgcacccactcctgcagcagactgaggaccagttcctgtccccgaccctggcgtgcagctcccctctgatcagcttctccccatccttggaccaggacgactacctgtggggcttggaggcgggtgagggcatcagcgatctcttcgactcctacgaccttggggacctgttgattaattagtaatgaactagtccgtaacttgaaagtatttcgatttcttggctttatatatcttgtggaaaggacgaccaacaggttagaacgtcatctcc

SEQ ID NO: 1796 - DNA, 1415 bp, Homo sapiens
  source 1..1415: mol_type = genomic DNA
accgccaccatggccttggccggggcccctgcgggcggcccatgcgcgccggcgctggaggccctgctcggggccggcgcgctgcggctgctcgactcctcgcagatcgtcatcatctccgccgcgcaggacgccagcgccccgccggctcccaccggccccgcggcgcccgccgccggcccctgcgaccctgacctgctgctcttcgccacaccgcaggcgccccggcccacacccagtgcgccgcggcccgcgctcggccgcccgccggtgaagcggaggctggacctggaaactgaccatcagtacctggccgagagcagtgggccagctcggggcagaggccgccatccaggaaaaggtgtgaaatccccgggggagaagtcacgctatgagacctcactgaatctgaccaccaagcgcttcctggagctgctgagccactcggctgacggtgtcgtcgacctgaactgggctgccgaggtgctgaaggtgcagaagcggcgcatctatgacatcaccaacgtccttgagggcatccagctcattgccaagaagtccaagaaccacatccagtggctgggcagccacaccacagtgggcgtcggcggacggcttgaggggttgacccaggacctccgacagctgcaggagagcgagcagcagctggaccacctgatgaatatctgtactacgcagctgcgcctgctctccgaggacactgacagccagcgcctggcctacgtgacgtgtcaggaccttcgtagcattgcagaccctgcagagcagatggttatggtgatcaaagcccctcctgagacccagctccaagccgtggactcttcggagaactttcagatctcccttaagagcaaacaaggcccgatcgatgttttcctgtgccctgaggagaccgtaggtgggatcagccctgggaagaccccatcccaggaggtcacttctgaggaggagaacagggccactgactctgccaccatagtgtcaccaccaccatcatctcccccctcatccctcaccacagatcccagccagtctctactcagcctggagcaagaaccgctgttgtcccggatgggcagcctgcgggctcccgtggacgaggaccgcctgtccccgctggtggcggccgactcgctcctggagcatgtgcgggaggacttctccggcctcctccctgaggagttcatcagcctttccccaccccacgaggccctcgactaccacttcggcctcgaggagggcgagggcatcagagacctcttcgactgtgactttggggacctcacccccctggatttctagtaatgaactagtccgtaacttgaaagtatttcgatttcttggctttatatatcttgtggaaaggacgatatggcaagtttccctgtagggat

SEQ ID NO: 1797 - DNA, 3401 bp, Homo sapiens
  source 1..3401: mol_type = genomic DNA
accgccaccatggcacaccttgggcccaccccacctccacatagccttaattacaaatcagaggacaggcttagtgagcaagactggccagcatatttcaaggtcccatgttgtggggttgatacatctcaaattgagtcagaagaggcagaagtggatgtgagagaaagagagacacagagagacagagagccaaagagggcaagagacttgactttaagagactcctgtactgacaactccatgcagttcggaaccagaacgactacggctgaaccagggttcatggggacatggcaaaacgctgatactaacctcttattcagaatgtcccaacaggccatccgttgcacactggtaaactgcacatgtgaatgttttcagccagggaagattaacctgaggacttgtgatcagtgtaaacatggctgggtggcacatgccttggataagctcagcacgcagcacctgtaccaccccacccaagtggagattgtgcagtccaacgtcgtgtttgacatcagcagcctgatgctctatgggacacaagcagtgcctgtgcggctaaagatcctgctggaccgtctcttcagcgtcctgaagcaagaggaggtactgcacatactgcacggccttggctggactctgcgggactatgtccgaggatacatccttcaggatgctgctggcaaggtgctggaccgctgggccatcatgtctcgagaagaggaaatcatcacccttcagcagtttctgcggtttggagaaaccaaatccattgtggagctgatggcaattcaggagaaagaagggcaggccgtggctgtaccatcttcaaagacagactcagatataaggactttcattgagagcaataatcgcaccaggagtcccagcctccttgctcacttagagaacagcaatccttccagcattcatcacttcgaaaacatcccaaacagccttgcatttctgcttccattccagtacataaaccctgtctcagcaccactgctagggttgcctccaaatgggctactgttagagcaaccagggttgaggctgcgggaacccagcctttcaactcagaatgaatataatgagagcagcgaatccgaagtttctcccacaccttataagaatgatcaaacacccaatagaaatgccctgaccagcattactaatgtggagcccaaaaccgagccagcctgtgtctctcccattcagaattctgccccagtcagtgatctaaccaaaactgaacacccaaaaagctcattccggattcatcggatgagaaggatggggtcagcctctaggaaaggaagagtgttctgtaatgcatgtgggaagacattctatgacaaaggtactctcaaaattcattacaatgctgttcacctgaagatcaaacatcgatgcaccattgaaggttgcaacatggtctttagctccctccgaagtcgtaatcgccacagtgcaaaccccaatcctcgccttcacatgcctatgctaaggaataaccgagataaagatttaattcgggccacctcaggagctgccacccctgtcatagcaagtacaaaatcaaatctggcactcacaagccctggccgacccccaatgggttttaccactccccctctagaccctgtcttgcaaaatcctctccctagccagctagtattttctgggctaaagactgtacaaccagttcctccattttatagaagtttactcactccaggggaaatggtgagtcctccaacctccctcccaaccagtcccatcattccaaccagtggtaccatagagcagcaccccccgccaccctctgagccagtagtgccagcagtgatgatggccacccatgagcccagtgctgacctggcacccaagaaaaagcccaggaagtcaagcatgcctgtgaagattgagaaggaaattattgataccgccgatgagtttgatgatgaagatgatgaccccaatgatggtggagctgtggtcaatgacatgagccatgacaatcattgtcactcccaagaggagatgagcccaggcatgtctgtgaaggacttttctaagcataacaggacccggtgcatttcaaggactgaaataaggagggccgacagcatgacttctgaagaccaagaacctgagcgggactatgagaacgagtctgagtcttcggagcccaaactgggcgaggaatccatggaaggggatgagcacattcacagcgaagtgagtgaaaaagtcctgatgaatagtgagaggcctgatgagaaccacagtgagccctctcaccaggacgtcatcaaggtgaaggaagaatttacagaccccacttacgacatgttttacatgagccagtatggactgtacaatggtgggggtgccagcatggccgccttgcatgagagctttacatcgtctctgaattatggcagccctcaaaagttctccccagaaggtgacctatgttctagcccagaccccaaaatctgttatgtgtgcaagaagagtttcaaaagctcctacagtgtgaaacttcactacaggaacgttcacttgaaagagatgcacgtctgcacagtggctggttgcaatgctgcattcccctctcgccgaagccgagacagacacagtgccaacataaacctacatcgtaaactgttgaccaaagaactcgatgacatgggcctggactcgtcgcagccctcccttagcaaggacctccgcgatgaatttttggtgaagatatatggtgcccagcaccccatggggctcgatgtcagggaagacgcctcctctcccgcagggactgaagactcccacctgaacgggtatgggagaggcatggcagaggactacatggtccttgacttgagcaccacctccagcctccagtccagcagcagtatccattcctccagagaatccgacgcaggcagcgatgaggggattcttctcgatgacattgacggggcgagtgacagtggggagtcggcacacaaggccgaggcccctgccctccctggcagcctaggggctgaagtttcaggatctcttatgttcagcagcttgtctgggagcaatggtgggatcatgtgcaacatttgccacaaaatgtacagcaacaaggggaccctgagagtgcactacaaaactgtgcatttgagagaaatgcacaagtgcaaagtcccaggttgcaatatgatgttttcctctgtacgaagccgaaatcggcacagtcagaaccctaatctccacaaaaacattcccttcacttcagtagattagtaatgaactagtccgtaacttgaaagtatttcgatttcttggctttatatatcttgtggaaaggacgagccaaataaatccgcgcattactc

SEQ ID NO: 1798 - DNA, 2588 bp, Homo sapiens
  source 1..2588: mol_type = genomic DNA
accgccaccatggacagcgaggcattccagagcgcgcgggactttctggacatgaacttccagtcgctggccatgaaacacatggatctgaagcagatggagctggacacggcggcggccaaggtggatgaactgaccaagcagctggagtcgctgtggtcagactctcccgcgcctcctggcccgcaggccggacccccttctaggccgccccggtacagctccagctcgatccctgagcccttcggcagccgagggtccccccggaaggcggccaccgacggcgcagacaccccgttcggacgatcagagagtgccccaaccctacacccctacagcccgctgtcccccaagggacggccgtcgtcgccgcgcaccccgctctacctgcagccggacgcctacggcagcctggaccgcgcgacctcgccccggccccgcgccttcgatggcgcaggcagctccctcggccgtgcgccctccccgcggcccgggccaggcccgctccgccagcagggtccccccacgcctttcgacttcctgggccgcgcaggctccccccgcggcagccccctggcggaggggccccaggccttcttccccgagcgtgggccgtcaccgcgcccccctgccacagcctacgacgcgccagcgtccgccttcgggagctccctgctaggctccggcggcagcgcattcgccccgcctctgcgcgcgcaagacgacctgacgctgcgccggcggcctccgaaagcctggaacgagtctgacctggacgtggcgtacgagaagaagccttcgcagacagcgagctatgaacgcctggacgtcttcgcaaggcctgcctcgccgagcctgcagctgttgccttggagggagagcagcctggatggactggggggcaccggcaaggacaacctcactagcgccaccctgccgcgcaattacaaggtctctcctctggccagcgaccggcgttcagacgcgggcagctaccggcgctcgctgggctccgcggggccgtcgggcactttgcctcgcagctggcagcccgtcagccgcatccccatgcccccctccagcccccagccccgcggggccccgcgccagcgtcccatccccctcagcatgatcttcaagctgcagaacgccttctgggagcacggggccagccgcgccatgctccctgggtcccccctcttcacccgagcacccccgcctaagctgcagccccaaccacaaccacagccccagccacaatcacaaccacagccccagctgcccccacagccccagacccaaccccaaacccctaccccagccccccagcatccccaacagacatggccccctgtgaacgaaggaccccccaaaccccccaccgagctggagcctgagccggagatagaggggctgctgacaccagtgctggaggctggcgatgtggatgaaggccctgtagcaaggcctctcagccccacgaggctgcagccagcactgccaccggaggcacagtcggtgcccgagctggaggaggtggcacgggtgttggcggaaattccccggcccctcaaacgcaggggctccatggagcaggcccctgctgtggccctgccccctacccacaagaaacagtaccagcagatcatcagccgcctcttccatcgtcatggggggccagggcccggggggccggagccagagctgtcccccatcactgagggatctgaggccagggcagggccccctgctcctgccccaccagctcccattccacccccggccccgtcccagagcagcccaccagagcagccgcagagcatggagatgcgctctgtgctgcggaaggcgggctccccgcgcaaggcccgccgcgcgcgcctcaaccctctggtgctcctcctggacgcggcgctgaccggggagctggaggtggtgcagcaggcggtgaaggagatgaacgacccgagccagcccaacgaggagggcatcactgccttgcacaacgccatctgcggcgccaactactctatcgtggatttcctcatcaccgcgggtgccaatgtcaactcccccgacagccacggctggacacccttgcactgcgcggcgtcgtgcaacgacacagtcatctgcatggcgctggtgcagcacggcgctgcaatcttcgccaccacgctcagcgacggcgccaccgccttcgagaagtgcgacccttaccgcgagggttatgctgactgcgccacctacctggcagacgtcgagcagagtatggggctgatgaacagcggggcagtgtacgctctctgggactacagcgccgagttcggggacgagctgtccttccgcgagggcgagtcggtcaccgtgctgcggagggacgggccggaggagaccgactggtggtgggccgcgctgcacggccaggagggctacgtgccgcggaactacttcgggctgttccccagggtgaagcctcaaaggagtaaagtctagtaatgaactagtccgtaacttgaaagtatttcgatttcttggctttatatatcttgtggaaaggacgaagaaacatgctcggtgctacggtt

SEQ ID NO: 1799 - DNA, 701 bp, Homo sapiens
  source 1..701: mol_type = genomic DNA
accgccaccatgatggagaagcctgcaggcagaaaaaagaagacgccgaccccaagggaggaggcagacgtgcagaagagtgcgctcagagaggagaaggtgtccggggacagaaagccacctgagaggcccactgtgcccaggaagccccgcacagagccctgcctgagtcctgaagacgaagagcacgtctttgatgccttcgacgcttcatttaaagatgactttgagggggttcccgtgttcattccttttcagaggaagaaaccctatgagtgcagtgagtgtgggcggatctttaagcacaagacagaccacattcgccatcagagggtccacactggagagaagcccttcaagtgtgcgcagtgcgggaaggccttccggcacagctctgacgtcaccaaacaccagaggactcacacgggagagaagcccttcaaatgcggggagtgcgggaaagcctttaactgcggctccaatctcctgaaacatcagaagacgcacaccggggagaagccctacgaatgcacgcactgtgggaaagcctttgcctacagctcctgtctcatccgccatcagaaacgccaccctcggaagaagccctagtaatgaactagtccgtaacttgaaagtatttcgatttcttggctttatatatcttgtggaaaggacgaagtcgaagggctcttagattcagg

SEQ ID NO: 1800 - DNA, 665 bp, Homo sapiens
  source 1..665: mol_type = genomic DNA
accgccaccatgccgcgcgtcgtgcccgaccagagaagcaagttcgagaacgaggagttttttaggaagctgagccgcgagtgtgagattaagtacacgggcttcagggaccggccccacgaggaacgccaggcacgcttccagaacgcctgccgcgacggccgctcggaaatcgcttttgtggccacaggaaccaatctgtctctccagttttttccggccagctggcagggagaacagcgacaaacacctagccgagagtatgtcgacttagaaagagaagcaggcaaggtatatttgaaggctcccatgattctgaatggagtctgtgttatctggaaaggctggattgatctccaaagactggatggtatgggctgtctggagtttgatgaggagcgagcccagcaggaggatgcattagcacaacaggcctttgaagaggctcggagaaggacacgcgaatttgaagatagagacaggtctcatcgggaggaaatggaggcaagaagacaacaagaccctagtcctggttccaatttaggtggtggtgatgacctcaaacttcgttagtaatgaactagtccgtaacttgaaagtatttcgatttcttggctttatatatcttgtggaaaggacgatataccagcgtgttaatccagcaa

SEQ ID NO: 1801 - DNA, 1223 bp, Homo sapiens
  source 1..1223: mol_type = genomic DNA
accgccaccatgactgccgagagcgggccgccgccgccgcagccggaggtgctggctaccgtgaaggaagagcgcggcgagacggcagcaggggccggggtcccaggggaggccacgggccgcggggcgggcgggcggcgccgcaagcgccccctgcagcgcgggaagccgccctacagctacatcgcgctcatcgccatggccatcgcgcacgcgcccgagcgccgcctcacgctgggcggcatctacaagttcatcaccgagcgcttccccttctaccgcgacaaccccaaaaagtggcagaacagcatccgccacaacctcacactcaacgactgcttcctcaagatcccgcgcgaggccggccgcccgggtaagggcaactactgggcgcttgaccccaacgcggaggacatgttcgagagcggcagcttcctgcgccgccgcaagcgcttcaagcgctcggacctctccacctacccggcttacatgcacgacgcggcggctgccgcagccgccgccgccgccgccgccgccgccgccgccatcttcccaggcgcggtgcccgccgcgcgccccccctacccgggcgccgtctatgcaggctacgcgccgccgtcgctggccgcgccgcctccagtctactaccccgcggcgtcgcccggcccttgccgcgtcttcggcctggttcctgagcggccgctcagcccagagctggggcccgcaccgtcggggcccggcggctcttgcgcctttgcctccgccggcgcccccgctaccaccaccggctaccagcccgcaggctgcaccggggcccggccggccaacccctccgcctatgcggctgcctacgcgggccccgacggcgcgtacccgcagggcgccggcagtgcgatctttgccgctgctggccgcctggcgggacccgcttcgcccccagcgggcggcagcagtggcggcgtggagaccacggtggacttctacgggcgcacgtcgcccggccagttcggagcgctgggagcctgctacaaccctggcgggcagctcggaggggccagtgcaggcgcctaccatgctcgccatgctgccgcttatcccggtgggatagatcggttcgtgtccgccatgtagtaatgaactagtccgtaacttgaaagtatttcgatttcttggctttatatatcttgtggaaaggacgagcaggaccacttggcgcagagcgt

SEQ ID NO: 1802 - DNA, 677 bp, Homo sapiens
  source 1..677: mol_type = genomic DNA
accgccaccatgccaggctcagaggatcttcgtaaaggcaaggaccagatgcattcacacaggaaacgaaccatgttcactaagaagcaactggaagatctgaacatcttgttcaatgagaacccatacccaaaccccagccttcagaaagaaatggcctcgaaaatagacatacacccaacagtactgcaggtctggttcaagaatcacagagcaaaactcaagaaagcgaaatgcaagcatattcatcaaaaacaagaaactccacaaccgccaataccagagggtggggtctccaccagtgtcggcctgagaaatgcagacacactacccagattgcccaacgctgctcacccgatcggcctggtgtacacgggtcatcgagtcccctcattccagctcatcctgtaccccaacctcaaggtccctgcaaatgacttcattggccacagaatagtccattttggctgctgccgagatcctaatatatactgcctctaccccattttggaatcccaagtttgcgctccaagcttccattctggctctcctgcctgttcatctaaccaaagtcgagagagatagtaatgaactagtccgtaacttgaaagtatttcgatttcttggctttatatatcttgtggaaaggacgaagagtgcccgtggtatctggtaca

SEQ ID NO: 1803 - DNA, 1217 bp, Homo sapiens
  source 1..1217: mol_type = genomic DNA
accgccaccatgtccagcacaccacatgaccccttctattcttctcctttcggcccattttataggaggcatacaccatacatggtacagccagagtaccgaatctatgagatgaacaagagactgcagtctcgcacagaggatagtgacaacctctggtgggacgcctttgccactgaattttttgaagatgacgccacattaaccctttcattttgtttggaagatggaccaaagcgatacactatcggcaggaccctcatcccccgttactttagcactgtgtttgaaggaggggtgaccgacctgtattacattctcaaacactcgaaagagtcataccacaactcatccatcacggtggactgcgaccagtgtaccatggtcacccagcacgggaagcccatgtttaccaaggtatgtacagaaggcagactgatcttggagttcacctttgatgatctcatgagaatcaaaacatggcactttaccattagacaataccgagagttagtcccgagaagcatcctagccatgcatgcacaagatcctcaggtcctggatcagctgtccaaaaacatcaccaggatggggctaacaaacttcaccctcaactacctcaggttgtgtgtaatattggagccaatgcaggaactgatgtcgagacataaaacttacaacctcagtccccgagactgcctgaagacctgcttgtttcagaagtggcagaggatggtggctccgccagcagaacccacaaggcaaccaacaaccaaacggagaaaaaggaaaaattccaccagcagcacttccaacagcagcgctgggaacaatgcaaacagcactggcagcaagaagaagaccacagctgcaaacctgagtctgtccagtcaggatgtgatggtggtaggagagccaactctgatgggaggtgagtttggggacgaggacgaaaggctaatcactagattagaaaacacgcaatatgatgcggccaacggcatggacgacgaggaggacttcaacaattcacccgcgctggggaacaacagcccgtggaacagtaaacctcccgccactcaagagaccaaatcagaaaaccccccaccccaggcttcccaatagtaatgaactagtccgtaacttgaaagtatttcgatttcttggctttatatatcttgtggaaaggacgacacagctggcgtagtccttagact

SEQ ID NO: 1804 - DNA, 1097 bp, Homo sapiens
  source 1..1097: mol_type = genomic DNA
accgccaccatgtccagcacaccacatgaccccttctattcttctcctttcggcccattttataggaggcatacaccatacatggtacagccagagtaccgaatctatgagatgaacaagagactgcagtctcgcacagaggatagtgacaacctctggtgggacgcctttgccactgaattttttgaagatgacgccacattaaccctttcattttgtttggaagatggaccaaagcgatacactatcggcaggaccctcatcccccgttactttagcactgtgtttgaaggaggggtgaccgacctgtattacattctcaaacactcgaaagagtcataccacaactcatccatcacggtggactgcgaccagtgtaccatggtcacccagcacgggaagcccatgtttaccaaggtatgtacagaaggcagactgatcttggagttcacctttgatgatctcatgagaatcaaaacatggcactttaccattagacaataccgagagttagtcccgagaagcatcctagccatgcatgcacaagatcctcaggtcctggatcagctgtccaaaaacatcaccaggatggggctaacaaacttcaccctcaactacctcaggttgtgtgtaatattggagccaatgcaggaactgatgtcgagacataaaacttacaacctcagtccccgagactgcctgaagacctgcttgtttcagaagtggcagaggatggtggctccgccagcagaacccacaaggcaaccaacaaccaaacggagaaaaaggaaaaattccaccagcagcacttccaacagcagcgctgggaacaatgcaaacagcactggcagcaagaagaagaccacagctgcaaacctgagtctgtccagtcaggtacctgggctaggagcgatcccgaactgcagcctcaaccctgggagggatggagacctgtgtcattcaacagcagtgaccccttctggccaatttaaggagaagcattagtaatgaactagtccgtaacttgaaagtatttcgatttcttggctttatatatcttgtggaaaggacgatgagctagacacttagtggttaaa

SEQ ID NO: 1805 - DNA, 1223 bp, Homo sapiens
  source 1..1223: mol_type = genomic DNA
accgccaccatgtccagcacaccacatgaccccttctattcttctcctttcggcccattttataggaggcatacaccatacatggtacagccagagtaccgaatctatgagatgaacaagagactgcagtctcgcacagaggatagtgacaacctctggtgggacgcctttgccactgaattttttgaagatgacgccacattaaccctttcattttgtttggaagatggaccaaagcgatacactatcggcaggaccctcatcccccgttactttagcactgtgtttgaaggaggggtgaccgacctgtattacattctcaaacactcgaaagagtcataccacaactcatccatcacggtggactgcgaccagtgtaccatggtcacccagcacgggaagcccatgtttaccaaggtatgtacagaaggcagactgatcttggagttcacctttgatgatctcatgagaatcaaaacatggcactttaccattagacaataccgagagttagtcccgagaagcatcctagccatgcatgcacaagatcctcaggtcctggatcagctgtccaaaaacatcaccaggatggggctaacaaacttcaccctcaactacctcaggttgtgtgtaatattggagccaatgcaggaactgatgtcgagacataaaacttacaacctcagtccccgagactgcctgaagacctgcttgtttcagaagtggcagaggatggtggctccgccagcagaacccacaaggcaaccaacaaccaaacggagaaaaaggaaaaattccaccagcagcacttccaacagcagcgctgggaacaatgcaaacagcactggcagcaagaagaagaccacagctgcaaacctgagtctgtccagtcaggtacctgatgtgatggtggtaggagagccaactctgatgggaggtgagtttggggacgaggacgaaaggctaatcactagattagaaaacacgcaatatgatgcggccaacggcatggacgacgaggaggacttcaacaattcacccgcgctggggaacaacagcccgtggaacagtaaacctcccgccactcaagagaccaaatcagaaaaccccccaccccaggcttcccaatagtaatgaactagtccgtaacttgaaagtatttcgatttcttggctttatatatcttgtggaaaggacgatgatccctcagcgattccgcactt

SEQ ID NO: 1806 - DNA, 1043 bp, Homo sapiens
  source 1..1043: mol_type = genomic DNA
accgccaccatgtccagcacaccacatgaccccttctattcttctcctttcggcccattttataggaggcatacaccatacatggtacagccagagtaccgaatctatgagatgaacaagagactgcagtctcgcacagaggatagtgacaacctctggtgggacgcctttgccactgaattttttgaagatgacgccacattaaccctttcattttgtttggaagatggaccaaagcgatacactatcggcaggaccctcatcccccgttactttagcactgtgtttgaaggaggggtgaccgacctgtattacattctcaaacactcgaaagagtcataccacaactcatccatcacggtggactgcgaccagtgtaccatggtcacccagcacgggaagcccatgtttaccaaggtatgtacagaaggcagactgatcttggagttcacctttgatgatctcatgagaatcaaaacatggcactttaccattagacaataccgagagttagtcccgagaagcatcctagccatgcatgcacaagatcctcaggtcctggatcagctgtccaaaaacatcaccaggatggggctaacaaacttcaccctcaactacctcaggttgtgtgtaatattggagccaatgcaggaactgatgtcgagacataaaacttacaacctcagtccccgagactgcctgaagacctgcttgtttcagaagtggcagaggatggtggctccgccagcagaacccacaaggcaaccaacaaccaaacggagaaaaaggaaaaattccaccagcagcacttccaacagcagcgctgggaacaatgcaaacagcactggcagcaagaagaagaccacagctgcaaacctgagtctgtccagtcaggtacctattgctagcattgctcgttctccagtgtcaggctgcgcactaaggacatagtaatgaactagtccgtaacttgaaagtatttcgatttcttggctttatatatcttgtggaaaggacgaattgtacgtacaggaggttgatat

SEQ ID NO: 1807 - DNA, 1229 bp, Homo sapiens
  source 1..1229: mol_type = genomic DNA
accgccaccatgctggatagggatgtgggcccaactcccatgtatccgcctacatacctggagccagggattgggaggcacacaccatatggcaaccaaactgactacagaatatttgagcttaacaaacggcttcagaactggacagaggagtgtgacaatctctggtgggatgcattcacgactgagttctttgaggatgatgccatgttgaccatcactttctgcctggaggatggaccaaagagatataccattggccggaccctgatcccacgctacttccgcagcatctttgaggggggtgctacggagctgtactatgttcttaagcaccccaaggaggcattccacagcaactttgtgtccctcgactgtgaccagggcagcatggtgacccagcatggcaagcccatgttcacccaggtgtgtgtggagggccggttgtacctggagttcatgtttgacgacatgatgcggataaagacgtggcacttcagcatccggcagcaccgagagctcatcccccgcagcatccttgccatgcatgcccaagacccccagatgttggatcagctctccaaaaacatcactcggtgtgggctgtccaattccactctcaactacctccgactctgtgtgatactcgagcccatgcaagagctcatgtcacgccacaagacctacagcctcagcccccgcgactgcctcaagacctgccttttccagaagtggcagcgcatggtagcaccccctgcggagcccacacgtcagcagcccagcaaacggcggaaacggaagatgtcagggggcagcaccatgagctctggtggtggcaacaccaacaacagcaacagcaagaagaagagcccagctagcaccttcgccctctccagccaggtacctgatgtgatggtggtgggggagcccaccctgatgggcggggagttcggggacgaggacgagaggctcatcacccggctggagaacacccagtttgacgcagccaacggcattgacgacgaggacagctttaacaactcccctgcactgggcgccaacagcccctggaacagcaagcctccgtccagccaagaaagcaaatcggagaaccccacgtcacaggcctcccagtagtaatgaactagtccgtaacttgaaagtatttcgatttcttggctttatatatcttgtggaaaggacgaattgatcgaagcgcagcctctagg

SEQ ID NO: 1808 - DNA, 1337 bp, Homo sapiens
  source 1..1337: mol_type = genomic DNA
accgccaccatgtcagtgggctgtgcctgtcctggttgttcctcaaagtcattcaagctgtactcgccgaaggagcccccgaacggcaacgcctttccccccttccatcccggcaccatgctggatagggatgtgggcccaactcccatgtatccgcctacatacctggagccagggattgggaggcacacaccatatggcaaccaaactgactacagaatatttgagcttaacaaacggcttcagaactggacagaggagtgtgacaatctctggtgggatgcattcacgactgagttctttgaggatgatgccatgttgaccatcactttctgcctggaggatggaccaaagagatataccattggccggaccctgatcccacgctacttccgcagcatctttgaggggggtgctacggagctgtactatgttcttaagcaccccaaggaggcattccacagcaactttgtgtccctcgactgtgaccagggcagcatggtgacccagcatggcaagcccatgttcacccaggtgtgtgtggagggccggttgtacctggagttcatgtttgacgacatgatgcggataaagacgtggcacttcagcatccggcagcaccgagagctcatcccccgcagcatccttgccatgcatgcccaagacccccagatgttggatcagctctccaaaaacatcactcggtgtgggctgtccaattccactctcaactacctccgactctgtgtgatactcgagcccatgcaagagctcatgtcacgccacaagacctacagcctcagcccccgcgactgcctcaagacctgccttttccagaagtggcagcgcatggtagcaccccctgcggagcccacacgtcagcagcccagcaaacggcggaaacggaagatgtcagggggcagcaccatgagctctggtggtggcaacaccaacaacagcaacagcaagaagaagagcccagctagcaccttcgccctctccagccaggtacctgatgtgatggtggtgggggagcccaccctgatgggcggggagttcggggacgaggacgagaggctcatcacccggctggagaacacccagtttgacgcagccaacggcattgacgacgaggacagctttaacaactcccctgcactgggcgccaacagcccctggaacagcaagcctccgtccagccaagaaagcaaatcggagaaccccacgtcacaggcctcccagtagtaatgaactagtccgtaacttgaaagtatttcgatttcttggctttatatatcttgtggaaaggacgaggatgcattaaccacgtcagtcgc

SEQ ID NO: 1809 - DNA, 2030 bp, Homo sapiens
  source 1..2030: mol_type = genomic DNA
accgccaccatggaggaagaaagaaaaactgctgagttacagaaaaatagaatacaggactcagtagtctttgaggatgtggctgtggactttacccaggaggaatgggctttgctggatcttgctcagagaaacctctacagagatgtgatgctggaaaacttccagaacctggcctcactagggtatccgctacacacaccccatctgatctcccagtgggaacaagaggaggacctgcagacagtgaagagagaacttatccagggcatctttatgggagagcaccgggaaggttttgagactcaacttaaaactaatgaatcagttgcttcacaagatatttgtggagaaaaaatatccaatgaacagaaaatagtaagattcaaaaggaatgattcctggttctccagtttacatgaaaaccaggagtcctgtggtattgattatcagaacaaaagccatgagagacatttgagaaatcatatggtagagaacatctatgaatgttatgaagaaaatcaagatggacagactttcagccaagttccaaatcttgattcactcaagagaaatactgaagtaaaatcctgtgaatgccatgagtgtggaaaggccttcgtggatcattcatcccttaagagtcacatcaggtctcatactggaagcaaaccctatcagtgcaaggaatgtgggaaggccttccattttcttgcttgtttcaagaagcatatgaaaacccccactgaagagaagccctatgaatgtaaggaatgtaccaaagccttcagctgttcctcattctttagggcacatatgaagattcacatcggaaagacaaactatgaatgtaaagaatgtgggaaaggttttagttgttcctcatcgctcacagaacacaaaagaattcacagtggagataagccttatgaatgtaaggaatgtgggaaggccttcagttgttcctcctcactctccaaacacaaaagaattcacagtggagataagccatatgaatgtaaggaatgtgggaaggcctttagctcttcctctcaccttataatacatataagaattcacactggagagaagccttatgaatgtaaagagtgtgggaaggccttcagcgagtcctcaaaactcactgtacatgggaggacacatactggagagaaaccctataaatgtaaggaatgtgggaaagcctacaattgtccctcctccttaagtatccatatgagaaaacacactggagaaaaaccgtatgaatgtctggaatgtggaaaggccttctaccttcccacttcccttaatacacatgtgaaaaatcaaagtcgagagaaaccctatgaatgtaaggaatgtgggaaggcctttagttgtccctcgtcctttagagcacatgtgagagatcacactggaaagatacagtatgaatgtaaggagtgtgggaagacctttagtcgttcctcatccctcaccgaacacctaagaactcacagcggagagaagccgtatgaatgtaaagaatgtgggaaagcctttattagttcctcccaccttacagtacatatcagaactcacactggagagaaaccctatgaatgtaagaaatgtgggaaagcctttatttatccctcagcccttaggatccacatgagaacgcacactggggaaaaaccctatgaatgtaaggaatgtgggaaagcatttcgtcattcttcataccttactgtacatgcaagaatgcacactggagagaaaccctttgaatgtctggaatgtggaaaagctttcagttgtccctcatcctttcgaaggcatgtgagaagccacactggagagaaaccctatgaatgtaaggaatgtgggaaagcctttgtttgtcctgcctactttcgaaggcatgtgaaaactcacactagagaaaacatatagtaatgaactagtccgtaacttgaaagtatttcgatttcttggctttatatatcttgtggaaaggacgaatcttacaccctagcagaggtcgt

SEQ ID NO: 1810 - DNA, 1787 bp, Homo sapiens
  source 1..1787: mol_type = genomic DNA
accgccaccatggccgacccgcaggctggctccgcggccggggactgggagatcgatgtcgagagcctggagctggaagaggacgtctgcggggcgccgcggtccacgccccccgggcccagcccgccgccggcggacggggactgcgaggacgacgaagatgacgacggggtggacgaagacgcggaagaagagggcgacggcgaggaggcaggcgcgtcccccgggatgcccggccagccggagcagcgggggggaccgcagccgaggccgccgctcgcgcctcaggcctcacccgccggcaccggtccccgagagcgctgcactcccgcgggcggcggcgcggagccgcgcaagctgagccgcacgcccaagtgcgcgcgctgccgcaaccacggcgtggtgtcctgcctgaagggccacaagcgcttctgtcgctggcgcgactgccagtgcgccaactgcctgctggtggtggagcggcagcgcgtcatggccgcccaggtggcgctccggaggcagcaggccaccgaggacaagaaggggctttccgggaaacagaataatttcgagcgcaaagctgtgtaccagaggcaagtcagagcccccagtttgctggccaaaagcattttagaaggctatcgccccattccagcggagacttatgtaggagggaccttccctctacctcccccagttagtgacaggatgaggaaaagaagagcctttgctgataaagagttggagaacattatgctggagagagaatataaagaaagggagatgttggaaacttctcaagctgctgctctgtttctgcccaaccgcatggtgcctggacctgactacaattcctacaaaagtgcctacagccccagcccagtggaaccaccaagcaaggacttctgtaattttttgcccacctgccttgatttaaccatgcagtattcagggtctgggaatatggaactaatttcttctaatgtcagcgtggccacaacttatagacagtatcccttgtcctcaagatttttagtttggcccaagtgtggccccattagcgacaccctcctctaccagcaatgcctgctaaatgccaccacctcagttcaagccctgaagcctggggccagctgggacttgaagggagcacgagtccaggatggactcagtgcagagcaggacatgatgccatcgaaattggaaggttccctggtgctgcctcacactcctgagatccagaccacgagaagtgaccttcagggtcatcaggctgtcccagagaggtccgcgttctccccaccccgacggaatttctctcccattgttgacacggactccctggcagctcaagggcatgtcttaacgaagatcagcaaagaaaacaccaggcaccctctgccacttagacataatccattccactcattattccagcaaacacttactgacaaatcgggtcctgagttgaaaacaccatttgtcaaagaggcctttgaagagacccctaagaaacacagagagtgtttagttaaggacaaccagaagtacacatttacaatagatagatgtgcaaaagacctttttgtagccaaacaagttggaacaaaactctcggtgaatgaaccactgtcattttctgttgagtctattcttaagaggccttcatctgccatcactcgtgtctctcagtagtaatgaactagtccgtaacttgaaagtatttcgatttcttggctttatatatcttgtggaaaggacgaacatctcaccacgctgggctatta

SEQ ID NO: 1811 - DNA, 782 bp, Homo sapiens
  source 1..782: mol_type = genomic DNA
accgccaccatggccgacccgcaggctggctccgcggccggggactgggagatcgatgtcgagagcctggagctggaagaggacgtctgcggggcgccgcggtccacgccccccgggcccagcccgccgccggcggacggggactgcgaggacgacgaagatgacgacggggtggacgaagacgcggaagaagagggcgacggcgaggaggcaggcgcgtcccccgggatgcccggccagccggagcagcgggggggaccgcagccgaggccgccgctcgcgcctcaggcctcacccgccggcaccggtccccgagagcgctgcactcccgcgggcggcggcgcggagccgcgcaagctgagccgcacgcccaagtgcgcgcgctgccgcaaccacggcgtggtgtcctgcctgaagggccacaagcgcttctgtcgctggcgcgactgccagtgcgccaactgcctgctggtggtggagcggcagcgcgtcatggccgcccaggtggcgctccggaggcagcaggccaccgaggacaagaaggggctttccgggaaacagaataatttcgagcgcaaagctgtgtaccagaggcaagtcagagcccccagtttgctggccaaaagcattttagaagttctccttggattattctacagctattatgtgtacataatgaaccatctttagtaatgaactagtccgtaacttgaaagtatttcgatttcttggctttatatatcttgtggaaaggacgaccaagaggcacagactcgcgtgtg

SEQ ID NO: 1812 - DNA, 1520 bp, Homo sapiens
  source 1..1520: mol_type = genomic DNA
accgccaccatgaacggctacggctccccctacctgtacatgggcggcccggtgtcgcagccgccacgggcgcccctgcagcgcacgcccaagtgcgcgcgctgccgcaaccatggcgtcctgtcctggctcaagggccacaagcgttactgccgcttcaaggactgcacctgcgagaagtgcatcctcatcatcgagcggcagcgggtcatggctgcgcaggtggcgctgcgccggcagcaggccaacgagagcttggagagcctcatccccgactcgctgcgcgctctgccagggcccccgccgccgggggacgccgtcgccgccccgcagccgccgccagcctctcagccgtcgcagccgcagccgccgcgccctgctgccgagttggccgcggccgccgcgctgcgttggactgccgagccgcagcccggggctctgcaggcgcagctcgccaagccagatttgactgaagaacgacttggagacggcaagtcggcagacaatacagaggtcttcagtgacaaagacactgaccagaggagttccccagatgtggcaaagagtaagggctgcttcacccctgagagccctgagatagtgtccgtggaggaagggggatacgctgtccagaaaaacggaggcaaccccgagagccgccctgacagccccaagtgtcacgcggagcagaatcacctcctgattgagggcccctcggggactgtttctctgcccttcagcttgaaagccaacagaccgccgcttgaagtgttaaaaaagatattccccaaccagaagccaacggtgcttgagctcatcctcaagggctgtggcggggacctggtgagcgccgtggaagtccttctgtccagccgatcctcagtcacgggagcagagcgaacttccgcagaacctgagagtctagcgttgccctccaatgggcacatctttgaacacaccttgagctcctaccccatctcgtcttccaaatggtctgtgggatcagcctttcgagtcccagacacgttgaggttttctgccgactctagcaacgttgtccccagtcccttggctgggcctctgcagccccctttcccccagccaccccggtacccgctgatgctgaggaatactttggcgagaagccagtcgagcccctttttgcccaatgatgtcaccctgtggaacaccatgacgctgcagcagcagtatcagctgaggtcccagtatgtcagtcctttccccagtaactctaccagcgtcttcagaagctcgcccgtccttcctgcccgcgccacggaagaccctcggatttccatccctgatgatgggtgtccatttgtgtcaaagcagtccatttacaccgaggacgactatgacgagaggtctgactcctcagactctagaacactcaacacatcatcttagtaatgaactagtccgtaacttgaaagtatttcgatttcttggctttatatatcttgtggaaaggacgaacgagatactgtcttgtcgggtga

SEQ ID NO: 1813 - DNA, 1049 bp, Homo sapiens
  source 1..1049: mol_type = genomic DNA
accgccaccatgtcactctgttcaccaacccactctgctgaaatgtcgttatttcttcaaggcccggaggaaatgctaccactctcatcagagggttcagagatgggcagtgagaaggagcagagtccagaaccacacctgcctgaggaaggggaagggggtaagccttggagagtggatgactcagagggttcttggatcccacctggggagaaggagcatgggcaagagagcctgtcggatgaactgcaagaaactcatccaaaaaagccatggcagaaagtcactgtccgggctcgagagctaggggaccccattgctcatccaaggcatgaggcagatgagaagccctttatatgtgcccagtgtggcaaaaccttcaataatacctccaacctgagaacacaccagcggatccacactggtgagaagccttacaagtgttctgaatgtggcaagagcttctcgagaagctccaaccgcatccggcacgagcggatccacctggaagagaaacactacaaatgccccaagtgccaggagagctttcggcggcgctcagacctcaccacgcaccagcaagatcacctaggcaagcggccataccgctgtgacatctgtggcaagagcttcagccagagtgccacgctagctgtgcatcaccggacccacctggagccagcaccctacatctgctgtgagtgtgggaagagcttcagcaacagctccagctttggcgtgcatcaccgcacccacacaggtgagagaccttatgagtgcactgagtgtgggcggaccttcagcgatatctccaactttggagcacaccagcggacccacagaggggagaagccctaccggtgcactgtgtgtgggaaacacttctcccggagctcgaatctcatccgccaccagaaaactcacttgggcgaacaggctgggaaagattccagctagtaatgaactagtccgtaacttgaaagtatttcgatttcttggctttatatatcttgtggaaaggacgaagggtcacacagtcctgccttgtg

SEQ ID NO: 1814 - DNA, 1022 bp, Homo sapiens
  source 1..1022: mol_type = genomic DNA
accgccaccatggcacaaatatcatctggtggtggtggacaaagccggtgccttctttttgctctgggttcagagatgggcagtgagaaggagcagagtccagaaccacacctgcctgaggaaggggaagggggtaagccttggagagtggatgactcagagggttcttggatcccacctggggagaaggagcatgggcaagagagcctgtcggatgaactgcaagaaactcatccaaaaaagccatggcagaaagtcactgtccgggctcgagagctaggggaccccattgctcatccaaggcatgaggcagatgagaagccctttatatgtgcccagtgtggcaaaaccttcaataatacctccaacctgagaacacaccagcggatccacactggtgagaagccttacaagtgttctgaatgtggcaagagcttctcgagaagctccaaccgcatccggcacgagcggatccacctggaagagaaacactacaaatgccccaagtgccaggagagctttcggcggcgctcagacctcaccacgcaccagcaagatcacctaggcaagcggccataccgctgtgacatctgtggcaagagcttcagccagagtgccacgctagctgtgcatcaccggacccacctggagccagcaccctacatctgctgtgagtgtgggaagagcttcagcaacagctccagctttggcgtgcatcaccgcacccacacaggtgagagaccttatgagtgcactgagtgtgggcggaccttcagcgatatctccaactttggagcacaccagcggacccacagaggggagaagccctaccggtgcactgtgtgtgggaaacacttctcccggagctcgaatctcatccgccaccagaaaactcacttgggcgaacaggctgggaaagattccagctagtaatgaactagtccgtaacttgaaagtatttcgatttcttggctttatatatcttgtggaaaggacgattcccgaataacgagcttagcagt

SEQ ID NO: 1815 - DNA, 956 bp, Homo sapiens
  source 1..956: mol_type = genomic DNA
accgccaccatgggcagtgagaaggagcagagtccagaaccacacctgcctgaggaaggggaagggggtaagccttggagagtggatgactcagagggttcttggatcccacctggggagaaggagcatgggcaagagagcctgtcggatgaactgcaagaaactcatccaaaaaagccatggcagaaagtcactgtccgggctcgagagctaggggaccccattgctcatccaaggcatgaggcagatgagaagccctttatatgtgcccagtgtggcaaaaccttcaataatacctccaacctgagaacacaccagcggatccacactggtgagaagccttacaagtgttctgaatgtggcaagagcttctcgagaagctccaaccgcatccggcacgagcggatccacctggaagagaaacactacaaatgccccaagtgccaggagagctttcggcggcgctcagacctcaccacgcaccagcaagatcacctaggcaagcggccataccgctgtgacatctgtggcaagagcttcagccagagtgccacgctagctgtgcatcaccggacccacctggagccagcaccctacatctgctgtgagtgtgggaagagcttcagcaacagctccagctttggcgtgcatcaccgcacccacacaggtgagagaccttatgagtgcactgagtgtgggcggaccttcagcgatatctccaactttggagcacaccagcggacccacagaggggagaagccctaccggtgcactgtgtgtgggaaacacttctcccggagctcgaatctcatccgccaccagaaaactcacttgggcgaacaggctgggaaagattccagctagtaatgaactagtccgtaacttgaaagtatttcgatttcttggctttatatatcttgtggaaaggacgagtttagacacgtagttaacttcta

SEQ ID NO: 1816 - DNA, 1676 bp, Homo sapiens
  source 1..1676: mol_type = genomic DNA
accgccaccatgcctctggtgcacatggcttcctccccggcggtggacgtgtcctgcaggcggcgggagaagcggcggcagctggacgcgcgccgcagcaagtgccgcatccgcctgggcggccacatggagcagtggtgcctcctcaaggagcggctgggcttctccctgcactcgcagctcgccaagttcctgttggaccggtacacttcttcaggctgtgtcctctgtgcaggtcctgagcctttgcctccaaaaggtctgcagtatctggtgctcttgtctcatgcccacagccgagagtgcagcctggtgcccgggcttcgggggcctggcggccaagatggggggcttgtgtgggagtgctcagcaggccataccttctcctggggaccctctttgagccctacaccttcagaggcacccaagccagcctcccttccacatactactcggagaagttggtgttccgaggccacgagtgggcaggagcttgcagatttggaatctgagcatgatgagaggactcaagaggccaggttgcccaggagggtgggacccccaccagagaccttcccacctccaggagaggaagagggtgaggaagaagaggacaatgatgaggatgaagaggagatgctcagtgatgccagcttatggacctacagctcctccccagatgatagtgagcctgatgcccccagactactgccttcccctgtcacctgcacacctaaagagggggagacaccaccagcccctgcagcactctccagtcctcttgctgtgccggccttgtcagcatcctcattgagttccagagctcctccacctgcagaagtcagggtgcagccacagctcagcaggacccctcaagcggcccagcagactgaggccctggccagcactgggagtcaggcccagtctgctccaaccccggcctgggatgaggacactgcacaaattggccccaagagaattaggaaagctgccaaaagagagctgatgccttgtgacttccctggctgtggaaggatcttctccaaccggcagtatttgaatcaccacaaaaagtaccagcacatccaccagaagtctttctcctgcccagagccagcctgtgggaagtctttcaactttaagaaacacctgaaggagcacatgaagctgcacagtgacacccgggactacatctgtgagttctgcgcccggtctttccgcactagcagcaaccttgtcatccacagacgtatccacactggagaaaaacccctgcagtgtgagatatgcgggtttacctgccgccagaaggcttccctgaactggcaccagcgcaagcatgcagagacggtggctgccttgcgcttcccctgtgaattctgcggcaagcgctttgagaagccagacagtgttgcagcccaccgtagcaaaagtcacccagccctgcttctagcccctcaagagtcacccagtggtcccctagagccctgtcccagcatctctgcccctgggcctctgggatccagcgaggggtccaggccctctgcatctcctcaggctccaaccctgcttcctcagcaatagtaatgaactagtccgtaacttgaaagtatttcgatttcttggctttatatatcttgtggaaaggacgatcggctgcaactagatgcattaca

SEQ ID NO: 1817 - DNA, 1526 bp, Homo sapiens
  source 1..1526: mol_type = genomic DNA
accgccaccatggcttcctccccggcggtggacgtgtcctgcaggcggcgggagaagcggcggcagctggacgcgcgccgcagcaagtgccgcatccgcctgggcggccacatggagcagtggtgcctcctcaaggagcggctgggcttctccctgcactcgcagctcgccaagttcctgttggaccggtacacttcttcaggctgtgtcctctgtgcaggtcctgagcctttgcctccaaaaggtctgcagtatctggtgctcttgtctcatgcccacagccgagagtgcagcctggtgcccgggcttcgggggcctggcggccaagatggggggcttgtgtgggagtgctcagcaggccataccttctcctggggaccctctttgagccctacaccttcagaggcacccaagccagcctcccttccacatactactcggagaagttggtgttccgaggccacgagtgggcaggagcttgcagatttggaatctgagcatgatgagaggactcaagaggccaggttgcccagtagtgagcctgatgcccccagactactgccttcccctgtcacctgcacacctaaagagggggagacaccaccagcccctgcagcactctccagtcctcttgctgtgccggccttgtcagcatcctcattgagttccagagctcctccacctgcagaagtcagggtgcagccacagctcagcaggacccctcaagcggcccagcagactgaggccctggccagcactgggagtcaggcccagtctgctccaaccccggcctgggatgaggacactgcacaaattggccccaagagaattaggaaagctgccaaaagagagctgatgccttgtgacttccctggctgtggaaggatcttctccaaccggcagtatttgaatcaccacaaaaagtaccagcacatccaccagaagtctttctcctgcccagagccagcctgtgggaagtctttcaactttaagaaacacctgaaggagcacatgaagctgcacagtgacacccgggactacatctgtgagttctgcgcccggtctttccgcactagcagcaaccttgtcatccacagacgtatccacactggagaaaaacccctgcagtgtgagatatgcgggtttacctgccgccagaaggcttccctgaactggcaccagcgcaagcatgcagagacggtggctgccttgcgcttcccctgtgaattctgcggcaagcgctttgagaagccagacagtgttgcagcccaccgtagcaaaagtcacccagccctgcttctagcccctcaagagtcacccagtggtcccctagagccctgtcccagcatctctgcccctgggcctctgggatccagcgaggggtccaggccctctgcatctcctcaggctccaaccctgcttcctcagcaatagtaatgaactagtccgtaacttgaaagtatttcgatttcttggctttatatatcttgtggaaaggacgagaagtcacaactaaccaagtgtgc

SEQ ID NO: 1818 - DNA, 620 bp, Homo sapiens
  source 1..620: mol_type = genomic DNA
accgccaccatgggactattggcattcagggatgtggctctagaattctctccagaggagtgggaatgcctggacccagctcagcggagtttgtatagggatgtgatgttagagaactacagaaacctgatctcccttggtgaggatagcttcaatatgcaattcctatttcacagtcttgctatgtctaagccagaactgatcatctgtctggaggcaaggaaagagccctggaacgtgaacacagagaagacagccagacactcagttttgtcttcttatcttactgaagacattttgccagagcagggcctgcaagtttcattccaaaaagtgatgctgagaagatatgaaagatgttgtcttgagaaattacgcttaaggaatgactgggaaattccatgtgaagatgtgcttgcttcccctttgccttctgccatgattctaagtttcctgaggcctccccagaagcagaagcatgtaaagcccacagaaccggtccagtcgtcgaccatcgagctgctttagtaatgaactagtccgtaacttgaaagtatttcgatttcttggctttatatatcttgtggaaaggacgagaacgctacgtcagccttgattac

SEQ ID NO: 1819 - DNA, 1649 bp, Homo sapiens
  source 1..1649: mol_type = genomic DNA
accgccaccatgggactattggcattcagggatgtggctctagaattctctccagaggagtgggaatgcctggacccagctcagcggagtttgtatagggatgtgatgttagagaactacagaaacctgatctcccttggtgaggatagcttcaatatgcaattcctatttcacagtcttgctatgtctaagccagaactgatcatctgtctggaggcaaggaaagagccctggaacgtgaacacagagaagacagccagacactcagttttgtcttcttatcttactgaagacattttgccagagcagggcctgcaagtttcattccaaaaagtgatgctgagaagatatgaaagatgttgtcttgagaaattacgcttaaggaatgactgggaaattgtgggtgagtggaaagggcagaaggcaagttataatggacttgacctatgctcagcaactactcatagcaaaaactttcaatgcaataaatgtgtgaaaggttttagtaaatttgcaaatctaaataaatgtaagataagccatactggagaaaaaccattcaaatgcaaagaatgtggcaatgtctcttgcatgtctttaataatgactcaacagcagagaatccatattggagagaacccgtaccaatgtaaaaaatgtggcaaagcctttaatgagtgctcatgctttactgactgtaagagaattcatgttggagagaaacattgcaaatgtgaagaatgtaataacatttttaagtcttgctcaagtcttgctgttgttgagaaaaatcatactgaaaagaaaacctacagatgtgaagaatgtggcaaagcttttaacctgtgctcagttcttactaaacataagaaaattcatactggagagaaaccatacaaatgtgaagaatgtggcaaatcctttaagttgttcccataccttactcaacacaagagaattcatagtagagagaaaccctacaagtgtgaagaatgtggcaaagtctttaaattgttgtcataccttactcaacatagaagaattcatactggagagaaaaccttccgatgtgaagaatgtggaaaagcctttaaccagagctcacatctgactgaacataggagaattcatactggtgagaaaccatacaaatgtgaggaatgtggcaaagcttttacctggttctcataccttattcagcataagagaattcatactgggcagaaaccctacaaatgtgaggaatgtggcaaagcttttacctggttttcataccttactcaacataagagaattcatactggagagaaaccctacaaatgtgatgaatgtggcaaagcttttaactggttttcatatcttactaatcataagagaattcatactggagagaaaccctacaaatgtgaagaatgtggcaaagcctttggccagagctcacacctttctaaacataagacaattcataccagagagaaaccatacaagtgtgaggaatgtggcaaagcctttaaccactctgcacaacttgctgtacatgagaaaactcatacctagtaatgaactagtccgtaacttgaaagtatttcgatttcttggctttatatatcttgtggaaaggacgataatacacctcatgggtcatggtc

SEQ ID NO: 1820 - DNA, 3911 bp, Homo sapiens
  source 1..3911: mol_type = genomic DNA
accgccaccatgacagtgaagttgggcgacggcggcagcggggaggacgggctcaagaagctgggcaagcgggcggccgatgaggagtccctggaaggagaaggggccggcggcgcagacgcggccgaggagagcagcggcacaaagagggacgagaagaccccccgggccggcgccgacggcccccccgcgccccccggcgcgccgcaggcgccgtccccgccgcagggcagcccccaggaccagcaccacttcctccggtccagcgtgcggccgcagagcaagaggcccaggaaggatcctccgagcgctgtggggagcggcaacgccggtggctcggggccccgcggaaaaggagctgaaggtggtggatcatcgtctggaaatgtgtctggggttgcccctgctgcccctgcagggggctcgcgctcctcctcccggaacttagggtcttctggtggcgagaaggaagaaggcaaaaaggtccggcggcagtgggagtcgtggagcacagaggacaagaacaccttcttcgaggggctgtacgagcatgggaaagactttgaagcgattcagaacaacattgcgctgaagtacaagaagaaaggcaagccagcaagcatggtgaagaacaaggagcaggtccgccacttctactaccgcacctggcacaagatcaccaagtacatcgactttgatcatgtgttctctcgaggcctgaagaagtcatcccaggaactgtatggcctgatctgctatggcgagctgcgcaagaagattgggggctgtatggatgacaagaatgcaacaaagctgaatgaactcattcaggttggggccaccactgtacgttacaaagggcggaacctgcggatcaaagcgcccatgtgccgggccctgaagaagctgtgcgatccagatggcttgagtgatgaagaggaccagaagccagtgcgcctgcctctgaaagtccctatagagctacagccgcggaacaaccacgcctgggcccgtgtgcagagccttgcccagaacccacgcctcaggatgatcgtggagctacatcgaaaggtctccagcctcatcgaattcttgaagcagaagtgggcgctccatgaggtgcgagttcggaagacactcgaggagcggcagctgcaggactcatgctccgcaccgatgcaggagaaggtgacactgcacttgttcccaggcgagaactgtacactgacaccgctgccgggcgtggctcgcgtggtgcactccaaggccttctgcacagtgcactggcaggagggcggccggtgcaagcagagtgccaaggacgcccacgtgctgcccccagcccagatcctgggcatccagagtgggcagggcacggcccggggccaggtgaaatgcccgcggagcggagctgagggcaagggtgtggggcggccccctcctgcggctgacgccttgcagagctccggagagagttcccccgaaagcgcccccggggagggggctgccctaagcttgagcagcccggacgctcctgacaggcctcctcccaggcaccaggacactgggccatgtcttgagaagacccctgcagaaggcagggacagtcccacccgggagccaggggccttgccgtgtgcctgtggccagctcccagacctggaggacgagctctcgcttctagaccccttgccccgctacctaaagtcctgtcaggacctcattgtccccgagcagtgccgctgtgcggacacacggcctgggagcgagcagccccctctgggcggggcggcctccccagaggtgctggctcctgtcagcaaggaggctgctgaccttgctcccactggcccatccccgaggcccggccccgggctcctgctggatgtttgcactaaagacttggcagatgcacctgcggaggagctccaggagaaggggagccccgcggggcctccgccgtctcagggacagcctgccgccaggcccccgaaggaggtccccgccagccggctggctcagcagctccgtgaggagggctggaacctgcagacctccgaaagcctcacgctggccgaagtctacctcatgatgggcaagcccagcaagctgcagctggagtacgactggctggggcccggccgccaggacccccgccccggctccctacccaccgccctccacaagcagcgcctcctcagctgcctcctgaagctcatttccaccgaggtcaaccccaagctggctctggaagcaaacaccatctctacagcctcagtaaggcccgcccaggaggagcagtcgatgacgcccccagggaaggtggtgaccgtcagctctcgcagcccccgctgccctcggaaccaggcctccctccgcagcagcaagaccttcccgcccagctctgcaccctgctcctcaggtttgagaaaccctccaagacccctcttggtgcctggtccctccagcacaggaagcaatgactcagatggaggcctttttgctgtcccgacaaccttgccacccaacagccgacacgggaagctcttctctcccagtaaagaagcagagctgactttccgccagcatctgaactccatcagtatgcagtcggatttcttcctgccaaagccccggaagctgcggaaccggcacctgcggaagccactggtggtccagagaacactgctccctagaccatcggaaaaccagtcccacaacgtttgttccttctccatcctgtctaactcttccgtaactgggagaggttcgttccggcccatccagtcttctctgaccaaagcagctctgtctcggccgatcgtgcccaaggtccttccaccccaggccacgagtcacctggccagtgctatcgacttagcagctacaagtgccggcatcctttccgggaaccccctccctgccttggacaccgagggcttgtctggcatctctccactgtcttcagacgaggtgacgggtgccatctcggggcaggactctactggaactcaccaggatggagacaccctccccaccgtggggggctccgacccatttgtcagcatcccttcgaggcctgagcaggagccagtggcagacagtttccagggctcatctgttctctccttatctgagctgcccaaggcccctctccagaatggcctctccataccgctgtcctcgtcagagagctccagcacccggctgtctccaccagacgtctctgctctgctcgacatctccctgcccggcccacctgaggatgcgctgtcacagggcgagcctgccacacacattagcgactccatcattgagatcgccatcagctccggtcagtacggtgaaggagtccctctttctccagcaaaactgaatggcagtgacagttccaagagccttccctccccgtccagcagcccccagccacactggatcgcctctcccacccacgacccccagtggtaccccagtgactccaccgactcctcgctcagcagcctgtttgcaagcttcatctccccagagaagagccggaagatgttgccgactcccattgggaccaacagtggcacttccttgcttggccccagcttgttggatggaaactcgcgggactcatttgtgtccaggtccctggctgacgttgcagaggttgtggattcccagctggtgtgcatgatgaacgaaaacagcattgattacatttctcggttcaatgacctggcccaagagctgtccatcgctgagcctggccgccgagaagctctgtttgatggtggtggaggcggccccgctgtcagtgacctgtcccagtagtaatgaactagtccgtaacttgaaagtatttcgatttcttggctttatatatcttgtggaaaggacgaatgcatctagtcaaccacctgcca

SEQ ID NO: 1821 - DNA, 1739 bp, Homo sapiens
  source 1..1739: mol_type = genomic DNA
accgccaccatgaaacaagaagataatcagggtgtctgtgcacaccaggactcagaagacaaagggatgggttctgattttgaggactctgaggacagggaaggggacccagaagaaagagaaatgggctctaatccacatgacacaaacaagagagaaggccatccggagccggagatgggctccaacccacaggactcaaggcacagggaagcagtgcccgacatctgcacagaggggcagctgagtgaggaagaaggcgtttctgtccgtggggaagaggatgaccaatccggtgtagctgacatggcgatgttcccaggactgtctgagtctgacagcatatcccggagcctccgggaggacgacgacgagagtgctggggagaaccggctggaggaggaagaggagcagccggcccctcccgtacttccctggaggcgacatctctccctggggagtcggcaccgaggtgacaagcccgcccaccgccgcttccaccggctccaccaccccatggccgtggacctcggggagctggatagcctggtggccagcatcatggacgcgcccaccatctgccccgactgcggggagagcttcagtcctggcgccgccttcctgcagcaccagcgcattcaccgcctggctgaggccgctgccgccgccagcctggagcccttcggcctggcgggcgagtgcgacgcgatggtgggcatgatgggggtgggtgtggcggggggcttcggggccgggcccccgctggcccggcccccgcgcgaaaagcccttccgctgcggggagtgcggcaagggcttcagccgcaacacctacctgaccaaccacctgcgcctgcacacgggcgagcggcccaacctgtgcgccgactgcggcaagagcttcagctggcgcgccgacctgctcaagcaccggcgcctgcacacgggcgagaagccctacccgtgccccgagtgcggcgaggccttcagcctcagctcgcatctgttgagccaccggcgcgcgcacgcggcggccagcggcgcgggggcggcggcgctgcggcccttcgcctgcggggagtgcggcaagggcttcgtgcgccgttcgcacctggccaaccaccagcgcatccacacgggcgagaagccgcacggctgtggcgagtgcggcaagcgcttcagctggcgctcggacttggtgaagcaccagcgcgtgcacacgggcgagaagccctacatgtgctccgagtgcggcgagaccttcagcgtcagctcgcacctcttcacgcacaagcgcacgcactcgggtgagcggccctacgtgtgccgcgagtgcgggaagggcttcgggcgtaactcgcacctggtgaaccacctgcgcgtgcacaccggcgagaagcccttccgctgtggccagtgcgagaagcgcttcagcgacttctccacgctcacgcagcaccagcgcacgcacacgggcgagaagccctacacgtgcatcgagtgcggcaagagctttatccagagctcccacctgatccgccaccgccgcatccacacgggcaacaagccgcacaagtgtgcgggctgcggcaaaggcttccgctataaaacgcacctcgcgcagcaccagaagctgcacctgtgttagtaatgaactagtccgtaacttgaaagtatttcgatttcttggctttatatatcttgtggaaaggacgactctgctacttgcactaaggccgg

SEQ ID NO: 1822 - DNA, 2000 bp, Homo sapiens
  source 1..2000: mol_type = genomic DNA
accgccaccatgagtagtaagaactctgaatctggaacagcaacaacaggaacctctttgtcagctccagacatcacagtcagaaatgtggttaatattgctcgaccctcaagccagcagtcttcttggacatctgccaataatgatgtcattgtaactggtatatacagtccagccagttcatcaagtaggcaaggaacaaacaaacatacagacacacaaattacagaagcacataaaatccctattcagaaaacagccactaaaaatgatactgagtttcagttacacattcctgtccaaagacaagtagcacactgtaaaaatgcttccctactcctaggtgaaaaaacaattattttgtcaagacagacaagtgtgctaaatgctggaaactcagtattcaatcacgcaaagaaaaactatggaaactcttcagtacaagcttctgaaatgacagtacctcaaaagccttctgtgtgccaccgaccttgtaaaattgaaccagttgggattcaaaggtcatataagcctgaacacacaggcccagcattacataacttatgtgggcaaaagccaactattagagacccttactgtagaacacaaaacttggaaatccgtgaagtgttttcattggcagttagcgattacccccagagaattctgggaggaaatgccccacagaagcctagctcagcagaaggaaattgtttgtccattgcaatggagactggagatgctgaggatgaatatgccagagaggaagagctggcatcgatgagagcacagataccaagctattcgagattttatgaaagtggcagttcccttcgagctgagaaccaaagtacaaccttgcccggaccaggaagaaatatgccaaattcacaaatggtgaatattagagatatgtcagacaatgtactgtatcaaaacagaaactaccatttgacaccacggacctcattacatacagcatctagtacaatgtacagtaataccaatccattacggagtaatttttctcctcattttgcatcatcaaaccaattgagattatcacaaaaccaaaacaattaccagatttcaggaaaccttactgtgccttggattacagggtgttctagaaaaagagcactacaggaccgcactcagttcagtgaccgagacttagccacccttaagaagtattgggacaatggcatgaccagcctgggctctgtttgtagagagaaaattgaagctgtggcaactgaattaaatgttgactgtgaaatagttcggacttggattgggaatcgaagaaggaaatatcgtttaatggggattgaagttccacctccaagaggaggccctgctgatttctctgagcagcctgagtctggttctttatctgcactcacaccaggagaggaagctgggcctgaagtaggagaggataatgacagaaatgatgaagtatccatctgtttgtctgaaggaagctctcaagaagagcccaatgaagttgttccgaatgatgcaagggctcataaggaagaggaccaccatgcagtaaccacagataatgtgaaaatagaaattattgatgatgaagaaagtgacatgataagtaattctgaagtagaacaagtaaactctttcttggattataagaatgaagaagtcaaattcattgaaaatgagctcgagattcaaaagcaaaaatactttaaacttcagacttttgttagaagcttgatattagcaatgaaagctgatgataaggaacaacagcaggcactgctgtcagatttacctcctgaattagaggaaatggatttcaatcatgcctcactggagcctgatgatacctcattcagtgtatcttctttgtcagagaaaaatgtctcagaaagtttgtagtaatgaactagtccgtaacttgaaagtatttcgatttcttggctttatatatcttgtggaaaggacgaatgattcttacgtctcgaactaat

SEQ ID NO: 1823 - DNA, 1913 bp, Homo sapiens
  source 1..1913: mol_type = genomic DNA
accgccaccatgtcaccaggactcctgacaaccaggaaggaggcattgatggccttccgggatgtggctgtggccttcacccagaaggagtggaagctattgagttctgctcagaggaccctgtacagggaggtgatgctggagaactacagccatctggtctccctgggaattgcattttccaaaccaaaactcatcgaacagctggagcaaggcgacgaaccttggagagaggagaacgaacatcttctggacctttgtccagagcctagaacagaattccagccaagttttccccacctggtggccttttctagctcgcagctcctcagacaatatgcgctaagtggccatcccacacagatcttcccaagctcatctgcaggaggtgacttccaactagaagctccaagatgctctagtgaaaaaggagaaagtggagagacagaaggccccgacagctcattaagaaagaggccaagcagaatttctaggacattcttcagcccacatcaaggtgacccagtagaatgggtagaagggaacagagaaggaggaacagaccttcgcctggcccaaaggatgagtcttggggggtcagacacaatgttgaagggagcagacacttcagaatctggagcagtcatacgtggaaactatagactgggacttagcaaaaagtcaagcctgttcagccaccagaagcatcatgtgtgccctgaatgcgggagaggcttttgccagagatcagaccttatcaagcaccagaggacacacaccggggagaagccatacctgtgtcctgagtgtgggcgtcggtttagccagaaggcctccctctccatacaccagaggaagcactcgggggagaagccgtatgtgtgcagggaatgtgggcgacacttcaggtatacatcctctctcactaatcacaagaggattcactccggggagaggccctttgtatgtcaggagtgtgggcgaggctttcgccagaagatagccctccttctacaccagaggacgcacttggaggagaagcccttcgtgtgtcctgagtgtgggagaggcttttgccagaaggcatcactcctccagcaccagagctcacacacaggggagaggcccttcctgtgccttgagtgtgggcgtagcttcaggcagcagtcactcctccttagtcaccaggtcacacactcaggagagaagccttatgtctgtgctgagtgtgggcacagctttcgccaaaaggtcactctcatcaggcaccagaggacacacacaggggagaagccttacctgtgcccccagtgtgggcggggttttagccagaaggtcaccctcattggacaccagaggacacacacaggggagaagccctacctgtgccctgattgtgggcgtggctttggtcagaaggtcaccctcatcagacaccagaggacacacacaggggagaagccttatctgtgccccaagtgtgggcgtgcatttggctttaagtcgctcctcacccgacaccagaggacacactcagaggaggagctttacgtagacagggtgtgtggacaaggacttggccagaagtcacaccttatctctgaccaaaggacacactcaggagagaagccctgcatttgcgatgaatgtgggcgcggctttggctttaagtctgccctcatccgacatcagcggacccattctggggagaagccgtatgtctgcagggagtgtgggcgtggctttagccagaagtctcacttgcatagacacaggaggaccaagtctggtcatcagctcctaccccaagaggtcttctagtaatgaactagtccgtaacttgaaagtatttcgatttcttggctttatatatcttgtggaaaggacgagaacgtgatcccgtctcctacaac

SEQ ID NO: 1824 - DNA, 1049 bp, Homo sapiens
  source 1..1049: mol_type = genomic DNA
accgccaccatggctggaagagctgtcttgttggcaggacctcctggaactggcaagacagctctggctctggctattgctcaggagctgggtagtaaggtccccttctgcccaatggtggggagtgaagtttactcaactgagatcaagaagacagaggtgctgatggagaacttccgcagggccattgggctgcgaataaaggagaccaaggaagtttatgaaggtgaagtcacagagctaactccgtgtgagacagagaatcccatgggaggatatggcaaaaccattagccatgtgatcataggactcaaaacagccaaaggaaccaaacagttgaaactggaccccagcatttttgaaagtttgcagaaagagcgagtagaagctggagatgtgatttacattgaagccaacagtggggccgtgaagaggcagggcaggtgtgatacctatgccacagaattcgaccttgaagctgaagagtatgtccccttgccaaaaggggatgtgcacaaaaagaaagaaatcatccaagatgtgaccttgcatgacttggatgtggctaatgcgcggccccaggggggacaagatatcctgtccatgatgggccagctaatgaagccaaagaagacagaaatcacagacaaacttcgaggggagattaataaggtggtgaacaagtacatcgaccagggcattgctgagctggtcccgggtgtgctgtttgttgatgaggtccacatgctggacattgagtgcttcacctacctgcaccgcgccctggagtcttctatcgctcccatcgtcatctttgcatccaaccgaggcaactgtgtcatcagaggcactgaggacatcacatcccctcacggcatccctcttgaccttctggaccgagtgatgataatccggaccatgctgtatactccacaggaaatgaaacaggtcccatagtaatgaactagtccgtaacttgaaagtatttcgatttcttggctttatatatcttgtggaaaggacgaggagacggcgagtacacgcaccca

SEQ ID NO: 1825 - DNA, 3782 bp, Homo sapiens
  source 1..3782: mol_type = genomic DNA
accgccaccatgaatccgcggcaggggtattccctcagcggatactacacccatccatttcaaggctatgagcacagacagctcagataccagcagcctgggccaggatcttcccccagtagtttcctgcttaagcaaatagaatttctcaaggggcagctcccagaagcaccggtgattggaaagcagacaccgtcactgccaccttccctcccaggactccggccaaggtttccagtactacttgcctccagtaccagaggcaggcaagtggacatcaggggtgtccccaggggcgtgcatctcagaagtcaggggctccagagagggttccagcatccttcaccacgtggcaggagtctgccacagagaggtgttgattgcctttcctcacatttccaggaactgagtatctaccaagatcaggaacaaaggatcttaaagttcctggaagagcttggggaagggaaggccaccacagcacatgatctgtctgggaaacttgggactccgaagaaagaaatcaatcgagttttatactccctggcaaagaagggcaagctacagaaagaggcaggaacaccccctttgtggaaaatcgcggtctccactcaggcttggaaccagcacagcggagtggtaagaccagacggtcatagccaaggagccccaaactcagacccgagtttggaaccggaagacagaaactccacatctgtctcagaagatcttcttgagccttttattgcagtctcagctcaggcttggaaccagcacagcggagtggtaagaccagacagtcatagccaaggatccccaaactcagacccaggtttggaacctgaagacagcaactccacatctgccttggaagatcctcttgagtttttagacatggccgagatcaaggagaaaatctgcgactatctcttcaatgtgtctgactcctctgccctgaatttggctaaaaatattggccttaccaaggcccgagatataaatgctgtgctaattgacatggaaaggcagggggatgtctatagacaagggacaacccctcccatatggcatttgacagacaagaagcgagagaggatgcaaatcaagagaaatacgaacagtgttcctgaaaccgctccagctgcaatccctgagaccaaaagaaacgcagagttcctcacctgtaatatacccacatcaaatgcctcaaataacatggtaaccacagaaaaagtggagaatgggcaggaacctgtcataaagttagaaaacaggcaagaggccagaccagaaccagcaagactgaaaccacctgttcattacaatggcccctcaaaagcagggtatgttgactttgaaaatggccagtgggccacagatgacatcccagatgacttgaatagtatccgcgcagcaccaggtgagtttcgagccatcatggagatgccctccttctacagtcatggcttgccacggtgttcaccctacaagaaactgacagagtgccagctgaagaaccccatcagcgggctgttagaatatgcccagttcgctagtcaaacctgtgagttcaacatgatagagcagagtggaccaccccatgaacctcgatttaaattccaggttgtcatcaatggccgagagtttcccccagctgaagctggaagcaagaaagtggccaagcaggatgcagctatgaaagccatgacaattctgctagaggaagccaaagccaaggacagtggaaaatcagaagaatcatcccactattccacagagaaagaatcagagaagactgcagagtcccagacccccaccccttcagccacatccttcttttctgggaagagccccgtcaccacactgcttgagtgtatgcacaaattggggaactcctgcgaattccgtctcctgtccaaagaaggccctgcccatgaacccaagttccaatactgtgttgcagtgggagcccaaactttccccagtgtgagtgctcccagcaagaaagtggcaaagcagatggccgcagaggaagccatgaaggccctgcatggggaggcgaccaactccatggcttctgataaccagcctgaaggtatgatctcagagtcacttgataacttggaatccatgatgcccaacaaggtcaggaagattggcgagctcgtgagatacctgaacaccaaccctgtgggtggccttttggagtacgcccgctcccatggctttgctgctgaattcaagttggtcgaccagtccggacctcctcacgagcccaagttcgtttaccaagcaaaagttgggggtcgctggttcccagccgtctgcgcacacagcaagaagcaaggcaagcaggaagcagcagatgcggctctccgtgtcttgattggggagaacgagaaggcagaacgcatgggtttcacagaggtaaccccagtgacaggggccagtctcagaagaactatgctcctcctctcaaggtccccagaagcacagccaaagacactccctctcactggcagcaccttccatgaccagatagccatgctgagccaccggtgcttcaacactctgactaacagcttccagccctccttgctcggccgcaagattctggccgccatcattatgaaaaaagactctgaggacatgggtgtcgtcgtcagcttgggaacagggaatcgctgtgtgaaaggagattctctcagcctaaaaggagaaactgtcaatgactgccatgcagaaataatctcccggagaggcttcatcaggtttctctacagtgagttaatgaaatacaactcccagactgcgaaggatagtatatttgaacctgctaagggaggagaaaagctccaaataaaaaagactgtgtcattccatctgtatatcagcactgctccgtgtggagatggcgccctctttgacaagtcctgcagcgaccgtgctatggaaagcacagaatcccgccactaccctgtcttcgagaatcccaaacaaggaaagctccgcaccaaggtggagaacggagaaggcacaatccctgtggaatccagtgacattgtgcctacgtgggatggcattcggctcggggagagactccgtaccatgtcctgtagtgacaaaatcctacgctggaacgtgctgggcctgcaaggggcactgttgacccacttcctgcagcccatttatctcaaatctgtcacattgggttaccttttcagccaagggcatctgacccgtgctatttgctgtcgtgtgacaagagatgggagtgcatttgaggatggactacgacatccctttattgtcaaccaccccaaggttggcagagtcagcatatatgattccaaaaggcaatccgggaagactaaggagacaagcgtcaactggtgtctggctgatggctatgacctggagatcctggacggtaccagaggcactgtggatgggccacggaatgaattgtcccgggtctccaaaaagaacatttttcttctatttaagaagctctgctccttccgttaccgcagggatctactgagactctcctatggtgaggccaagaaagctgcccgtgactacgagacggccaagaactacttcaaaaaaggcctgaaggatatgggctatgggaactggattagcaaaccccaggaggaaaagaacttttatctctgcccagtatagtaatgaactagtccgtaacttgaaagtatttcgatttcttggctttatatatcttgtggaaaggacgaactatactggtacgccatgctgtc

SEQ ID NO: 1826 - DNA, 2897 bp, Homo sapiens
  source 1..2897: mol_type = genomic DNA
accgccaccatggccgagatcaaggagaaaatctgcgactatctcttcaatgtgtctgactcctctgccctgaatttggctaaaaatattggccttaccaaggcccgagatataaatgctgtgctaattgacatggaaaggcagggggatgtctatagacaagggacaacccctcccatatggcatttgacagacaagaagcgagagaggatgcaaatcaagagaaatacgaacagtgttcctgaaaccgctccagctgcaatccctgagaccaaaagaaacgcagagttcctcacctgtaatatacccacatcaaatgcctcaaataacatggtaaccacagaaaaagtggagaatgggcaggaacctgtcataaagttagaaaacaggcaagaggccagaccagaaccagcaagactgaaaccacctgttcattacaatggcccctcaaaagcagggtatgttgactttgaaaatggccagtgggccacagatgacatcccagatgacttgaatagtatccgcgcagcaccaggtgagtttcgagccatcatggagatgccctccttctacagtcatggcttgccacggtgttcaccctacaagaaactgacagagtgccagctgaagaaccccatcagcgggctgttagaatatgcccagttcgctagtcaaacctgtgagttcaacatgatagagcagagtggaccaccccatgaacctcgatttaaattccaggttgtcatcaatggccgagagtttcccccagctgaagctggaagcaagaaagtggccaagcaggatgcagctatgaaagccatgacaattctgctagaggaagccaaagccaaggacagtggaaaatcagaagaatcatcccactattccacagagaaagaatcagagaagactgcagagtcccagacccccaccccttcagccacatccttcttttctgggaagagccccgtcaccacactgcttgagtgtatgcacaaattggggaactcctgcgaattccgtctcctgtccaaagaaggccctgcccatgaacccaagttccaatactgtgttgcagtgggagcccaaactttccccagtgtgagtgctcccagcaagaaagtggcaaagcagatggccgcagaggaagccatgaaggccctgcatggggaggcgaccaactccatggcttctgataaccagcctgaaggtatgatctcagagtcacttgataacttggaatccatgatgcccaacaaggtcaggaagattggcgagctcgtgagatacctgaacaccaaccctgtgggtggccttttggagtacgcccgctcccatggctttgctgctgaattcaagttggtcgaccagtccggacctcctcacgagcccaagttcgtttaccaagcaaaagttgggggtcgctggttcccagccgtctgcgcacacagcaagaagcaaggcaagcaggaagcagcagatgcggctctccgtgtcttgattggggagaacgagaaggcagaacgcatgggtttcacagaggtaaccccagtgacaggggccagtctcagaagaactatgctcctcctctcaaggtccccagaagcacagccaaagacactccctctcactggcagcaccttccatgaccagatagccatgctgagccaccggtgcttcaacactctgactaacagcttccagccctccttgctcggccgcaagattctggccgccatcattatgaaaaaagactctgaggacatgggtgtcgtcgtcagcttgggaacagggaatcgctgtgtgaaaggagattctctcagcctaaaaggagaaactgtcaatgactgccatgcagaaataatctcccggagaggcttcatcaggtttctctacagtgagttaatgaaatacaactcccagactgcgaaggatagtatatttgaacctgctaagggaggagaaaagctccaaataaaaaagactgtgtcattccatctgtatatcagcactgctccgtgtggagatggcgccctctttgacaagtcctgcagcgaccgtgctatggaaagcacagaatcccgccactaccctgtcttcgagaatcccaaacaaggaaagctccgcaccaaggtggagaacggagaaggcacaatccctgtggaatccagtgacattgtgcctacgtgggatggcattcggctcggggagagactccgtaccatgtcctgtagtgacaaaatcctacgctggaacgtgctgggcctgcaaggggcactgttgacccacttcctgcagcccatttatctcaaatctgtcacattgggttaccttttcagccaagggcatctgacccgtgctatttgctgtcgtgtgacaagagatgggagtgcatttgaggatggactacgacatccctttattgtcaaccaccccaaggttggcagagtcagcatatatgattccaaaaggcaatccgggaagactaaggagacaagcgtcaactggtgtctggctgatggctatgacctggagatcctggacggtaccagaggcactgtggatgggccacggaatgaattgtcccgggtctccaaaaagaacatttttcttctatttaagaagctctgctccttccgttaccgcagggatctactgagactctcctatggtgaggccaagaaagctgcccgtgactacgagacggccaagaactacttcaaaaaaggcctgaaggatatgggctatgggaactggattagcaaaccccaggaggaaaagaacttttatctctgcccagtatagtaatgaactagtccgtaacttgaaagtatttcgatttcttggctttatatatcttgtggaaaggacgattcaaggtcgcgacaagatagcga

SEQ ID NO: 1827 - DNA, 1721 bp, Homo sapiens
  source 1..1721: mol_type = genomic DNA
accgccaccatggggagccccgaggatgacctgattgggattccattcccggaccacagcagtgagctcctgagctgcctcaatgagcagcgccagctgggccacctatgtgacctcaccatccggacgcagggccttgaataccgcacccacagggctgtgctagctgcctgtagccactacttcaagaagcttttcactgagggcggtggcggagctgtcatgggggccgggggtagcgggacggccactgggggagcaggggccggtgtgtgtgagctggactttgtagggccagaggcactaggcgccctccttgaatttgcctatacagccacactgaccaccagcagcgccaacatgccagctgtgctccaggctgcccgcctgctggagatcccgtgtgtcatcgctgcttgcatggagattctgcagggcagtgggctagaagctcccagcccggacgaggatgactgtgagcgagcccgccagtatctggaggcctttgccacagccacggcctctggagttcccaatggtgaagacagtcctccacaggtgcccctcccaccacctccgccaccgccacctcggcctgttgcccgccgcagccgcaagccccggaaagctttcctgcaaaccaagggggccagagcaaaccacctagtccctgaggtgcccacagtgcccgcccatcccttgacctatgaggaggaggaggtggcgggcagagtgggcagcagtgggggcagtgggccgggggacagctacagccctcccacaggaactgcctcccctcctgagggtccccagagctacgaaccctatgagggtgaggaagaagaagaggagctggtatatcccccagcctatgggctggcgcagggtggcgggcccccgctgtccccagaggagctgggctcagatgaggatgccatcgatcctgacctgatggcctacctaagctccctgcaccaggacaacctggcaccaggcctggacagccaagacaagctggtgcgcaaacgccgctcccagatgcctcaggagtgccctgtctgccacaagatcatccatggggcaggcaaactgcctcgccacatgaggacccacacaggcgagaagccctttgcctgcgaggtctgcggtgttcgattcaccaggaacgacaagctgaagatccacatgcggaagcacacgggagagcgcccctactcatgcccgcactgcccagcccgcttcctgcacagctacgacctcaagaaccacatgcacctgcacacaggggaccggccctatgagtgccacctgtgccacaaggctttcgccaaggaggaccacctgcagcgccacctcaaaggccagaactgcctggaggtgcgcacccgacggcgccgcaaggacgatgcaccaccccactacccaccaccctctaccgctgctgcatcccccgctggcctcgacctctccaatggccacctggacaccttccgcctctctctagctcgattctgggagcagtcagcccccactgggcccccggtctctaccccagggccccctgatgacgatgaggaggaaggggcacccaccacaccccaggctgaaggtgccatggagtcctcttagtaatgaactagtccgtaacttgaaagtatttcgatttcttggctttatatatcttgtggaaaggacgaaggcggtgacgatcatacgcccga

SEQ ID NO: 1828 - DNA, 1823 bp, Homo sapiens
  source 1..1823: mol_type = genomic DNA
accgccaccatgttacagcctggtcctcatcctccctcaccccaagctgctgctcctggagaagcctggccaggcccctctcaggctccctggcagagcctagaggagaagatggggagccccgaggatgacctgattgggattccattcccggaccacagcagtgagctcctgagctgcctcaatgagcagcgccagctgggccacctatgtgacctcaccatccggacgcagggccttgaataccgcacccacagggctgtgctagctgcctgtagccactacttcaagaagcttttcactgagggcggtggcggagctgtcatgggggccgggggtagcgggacggccactgggggagcaggggccggtgtgtgtgagctggactttgtagggccagaggcactaggcgccctccttgaatttgcctatacagccacactgaccaccagcagcgccaacatgccagctgtgctccaggctgcccgcctgctggagatcccgtgtgtcatcgctgcttgcatggagattctgcagggcagtgggctagaagctcccagcccggacgaggatgactgtgagcgagcccgccagtatctggaggcctttgccacagccacggcctctggagttcccaatggtgaagacagtcctccacaggtgcccctcccaccacctccgccaccgccacctcggcctgttgcccgccgcagccgcaagccccggaaagctttcctgcaaaccaagggggccagagcaaaccacctagtccctgaggtgcccacagtgcccgcccatcccttgacctatgaggaggaggaggtggcgggcagagtgggcagcagtgggggcagtgggccgggggacagctacagccctcccacaggaactgcctcccctcctgagggtccccagagctacgaaccctatgagggtgaggaagaagaagaggagctggtatatcccccagcctatgggctggcgcagggtggcgggcccccgctgtccccagaggagctgggctcagatgaggatgccatcgatcctgacctgatggcctacctaagctccctgcaccaggacaacctggcaccaggcctggacagccaagacaagctggtgcgcaaacgccgctcccagatgcctcaggagtgccctgtctgccacaagatcatccatggggcaggcaaactgcctcgccacatgaggacccacacaggcgagaagccctttgcctgcgaggtctgcggtgttcgattcaccaggaacgacaagctgaagatccacatgcggaagcacacgggagagcgcccctactcatgcccgcactgcccagcccgcttcctgcacagctacgacctcaagaaccacatgcacctgcacacaggggaccggccctatgagtgccacctgtgccacaaggctttcgccaaggaggaccacctgcagcgccacctcaaaggccagaactgcctggaggtgcgcacccgacggcgccgcaaggacgatgcaccaccccactacccaccaccctctaccgctgctgcatcccccgctggcctcgacctctccaatggccacctggacaccttccgcctctctctagctcgattctgggagcagtcagcccccactgggcccccggtctctaccccagggccccctgatgacgatgaggaggaaggggcacccaccacaccccaggctgaaggtgccatggagtcctcttagtaatgaactagtccgtaacttgaaagtatttcgatttcttggctttatatatcttgtggaaaggacgagctgtcaacgagacaaacaagtcg

SEQ ID NO: 1829 - DNA, 1559 bp, Homo sapiens
  source 1..1559: mol_type = genomic DNA
accgccaccatggctacagaaccaaagaaagctgcagcccagaactctccagaggatgaaggacttctgatagtgaagatagaagaggaagaatttatccatgggcaggacacttgcttacagagaagtgaactccttaagcaggagctctgcaggcagctttttaggcagttctgctaccaggattctcctggacctcgcgaggcactgagccgcctccgggagctctgctgtcagtggctgaagccagagatccataccaaggaacagattctggaactgctggtgctagagcagttcctgaccatcctgccaggagatttgcaggcctgggtacatgaacattacccagagagtggagaggaggcagtgaccatactagaagatttggagagaggcactgatgaagcagtactccaggttcaagcccatgaacatggacaagaaatattccagaaaaaagtgtcacctcctggaccagcacttaatgtcaagttacagccagtggagaccaaggcccattttgattcatcagaaccccagctcctatgggactgtgataatgagagtgaaaacagtagatccatgccaaagctggaaatttttgaaaaaattgaatcacagagaattatatctggaagaatctcaggatacatatcagaagcatctggtgagtctcaagacatctgtaagtctgcaggcagggtaaagagacaatgggaaaaagaatcaggggagtctcagagactctcgtctgcccaggatgaaggttttggtaaaatcctcacccacaaaaatacagtcagaggtgaaataataagccacgatggatgtgagaggagattaaatctgaactcaaatgaattcacacaccagaaatcttgtaaacatggtacctgtgaccagagcttcaaatggaactcagattttattaaccatcaaataatttatgctggagaaaaaaatcaccaatatggaaaatctttcaagagcccaaaacttgctaaacatgcagcagttttcagtggagataaaactcatcagtgtaatgaatgtgggaaagctttcaggcacagctcaaaacttgctaggcatcagagaatccacactggagagagatgctatgaatgtaatgaatgtgggaaaagctttgcagagagctcagatcttactagacatcggcgaattcacactggggaaagaccctttggttgcaaagaatgtgggagagcattcaacctgaactcacatcttatcaggcatcagagaattcacaccagagagaaaccctacgagtgtagtgaatgtgggaaaaccttccgagtgagctcacatcttattcgacactttagaattcacactggagaaaaaccctatgaatgcagtgagtgtggaagagccttcagtcagagctcaaaccttagtcaacaccagagaattcacatgagggaaaacctattaatgtagtaatgaactagtccgtaacttgaaagtatttcgatttcttggctttatatatcttgtggaaaggacgaagttcagcaaggtgctaatactgg

SEQ ID NO: 1830 - DNA, 1631 bp, Homo sapiens
  source 1..1631: mol_type = genomic DNA
accgccaccatgagtgagaatgaggaagaggaaatttctcagcaagaaggcagtggggactatgaagtcgaagagataccatttgggcttgaaccccagagccctgggtttgagccacaaagcccagagtttgaaccccaaagccccagatttgagcctgaaagcccggggtttgagtcccgaagccctgggcttgtgcccccaagccctgagtttgcacccagaagccctgaatcagattctcagagccctgagtttgaatcccagagccctaggtatgaaccccaaagccctggctatgaacctcggagccccgggtatgaaccccggagccctggctatgaatctgagagctctagatatgaatcccagaacactgagctcaaaacccaaagcccagaatttgaagctcaaagttccaaattccaggaaggtgcggagatgcttctgaaccccgaggaaaagagtcctttgaatatctccgtaggagttcaccccctggactccttcactcaggggtttggggagcagcccacaggggacctgcccatagggccaccttttgagatgcccacaggggccctgctgtctacaccgcagtttgagatgcttcagaatcccctgggtctcacaggagcccttcgaggtccaggtcggcggggtggccgggccaggggtgggcagggccctcggcctaacatctgtggcatctgcgggaagagcttcgggcggggctccaccctgatccagcaccagcgcatccacaccggtgagaagccctacaaatgtgaggtctgcagcaaggccttctcccagagctctgacctcatcaaacaccagcgcacccacactggcgagcggccctacaaatgtccccgttgcggcaaggccttcgccgacagctcttacctgcttcgccaccagcgcactcactctggccagaagccctacaagtgcccacattgtggcaaggccttcggcgacagctcctacctcctgcgacaccagcgcacccacagccacgagcggccctacagctgcaccgagtgcggcaagtgctatagccagaactcgtccctgcgcagccatcagagggtgcacaccggtcagaggcccttcagctgtggcatctgcggcaagagcttctcccagcggtcggcccttatcccccatgcccgcagccacgcccgggagaagcccttcaagtgccctgagtgcggcaagcgctttggccagagctcggtgctggccatccacgcccgcacccacctgccaggccgcacctacagctgccccgactgcggcaagaccttcaatcgctcctccactctcatccagcaccagcgctcccacacgggcgagcggccctacaggtgcgccgtgtgcggcaagggcttctgccgctcctccacgcttctgcagcatcaccgggtccacagtggcgagcggccttacaagtgcgatgactgcggaaaggccttctcccagagctccgacctcatccgccaccagcggacccacgcggcgggccggcgctagtaatgaactagtccgtaacttgaaagtatttcgatttcttggctttatatatcttgtggaaaggacgaaacgctacaggtacgtgtaaatgc

SEQ ID NO: 1831 - DNA, 1724 bp, Homo sapiens
  source 1..1724: mol_type = genomic DNA
accgccaccatggagcgggaggcgttgccgtggggcctcgagccccaggatgtgcagagttctgacgaaatgaggagccccgaagggtacctcagaggcaacatgagtgagaatgaggaagaggaaatttctcagcaagaaggcagtggggactatgaagtcgaagagataccatttgggcttgaaccccagagccctgggtttgagccacaaagcccagagtttgaaccccaaagccccagatttgagcctgaaagcccggggtttgagtcccgaagccctgggcttgtgcccccaagccctgagtttgcacccagaagccctgaatcagattctcagagccctgagtttgaatcccagagccctaggtatgaaccccaaagccctggctatgaacctcggagccccgggtatgaaccccggagccctggctatgaatctgagagctctagatatgaatcccagaacactgagctcaaaacccaaagcccagaatttgaagctcaaagttccaaattccaggaaggtgcggagatgcttctgaaccccgaggaaaagagtcctttgaatatctccgtaggagttcaccccctggactccttcactcaggggtttggggagcagcccacaggggacctgcccatagggccaccttttgagatgcccacaggggccctgctgtctacaccgcagtttgagatgcttcagaatcccctgggtctcacaggagcccttcgaggtccaggtcggcggggtggccgggccaggggtgggcagggccctcggcctaacatctgtggcatctgcgggaagagcttcgggcggggctccaccctgatccagcaccagcgcatccacaccggtgagaagccctacaaatgtgaggtctgcagcaaggccttctcccagagctctgacctcatcaaacaccagcgcacccacactggcgagcggccctacaaatgtccccgttgcggcaaggccttcgccgacagctcttacctgcttcgccaccagcgcactcactctggccagaagccctacaagtgcccacattgtggcaaggccttcggcgacagctcctacctcctgcgacaccagcgcacccacagccacgagcggccctacagctgcaccgagtgcggcaagtgctatagccagaactcgtccctgcgcagccatcagagggtgcacaccggtcagaggcccttcagctgtggcatctgcggcaagagcttctcccagcggtcggcccttatcccccatgcccgcagccacgcccgggagaagcccttcaagtgccctgagtgcggcaagcgctttggccagagctcggtgctggccatccacgcccgcacccacctgccaggccgcacctacagctgccccgactgcggcaagaccttcaatcgctcctccactctcatccagcaccagcgctcccacacgggcgagcggccctacaggtgcgccgtgtgcggcaagggcttctgccgctcctccacgcttctgcagcatcaccgggtccacagtggcgagcggccttacaagtgcgatgactgcggaaaggccttctcccagagctccgacctcatccgccaccagcggacccacgcggcgggccggcgctagtaatgaactagtccgtaacttgaaagtatttcgatttcttggctttatatatcttgtggaaaggacgatcctatgcatcgaattacaccgcg

SEQ ID NO: 1832 - DNA, 1673 bp, Homo sapiens
  source 1..1673: mol_type = genomic DNA
accgccaccatggctcttcctcagggtctattgacattcagggatgtggccatagaattctctcaggaggagtggaaatgcctggaccctgctcagaggactctatacagggacgtgatgctggagaattataggaacctggtctccctggatatctcttccaaatgcatgatgaaggagttctcgtcaacagcacaaggcaatagagaagtgttccatgcagggacatctcaaagacatgaaagtcatcacaatggagatttttgtttccaggatattgataaagatattcatgacattgagtttcagtggcaagaagatgaaagaaatggccatgaagcactcatgacaaaaatcaaaaagttgacaggtagtacagagcgatatgatcaaaattatgctggaaacaagcctgttaaatatcagcttggattcagctttcattcgcatctgcctgaactgcacatatttcacactgaagagaaaattgataatcaagttgtgaagtctatccacgatgcttccttggtttcaacagcccaaagaatttcttgtaggcctgaaacccatatttctaatgactatgggaataatttcctgaattcttcattattcacacaaaaacaggaagtacatatgagggaaaaatctttccaatgcaatgacagtggcaaagcctataattgtagctcactcttaaggaaacatcagttaatccatttaggagagaaacaatataaatgcgatatatgtggcaaggtctttaattcgaagcgatacgttgcacgccatcgtagatgtcacactggtgagaaaccttacaagtgtaatgagtgtggcaagaccttcagtcagacatattacctaacatgccatcgtagacttcatactggagagaaaccttacaaatgtgaagaatgtgacaaagctttccatttcaaatcaaagcttcaaatacataggagaattcatactggagagaaaccgtacaagtgtaatgagtgtggcaagacctttagtcagaagtcgtaccttacatgccatcgtaggcttcatactggagagaaaccttacaagtgtaatgagtgtggcaagacctttagtcggaagtcacattttacatgccatcatagagttcatactggagagaaaccttacaagtgtaatgagtgtagcaagacctttagtcacaagtcatctcttacataccatcgtagacttcatactgaagagaaaccttacaagtgtaatgagtgtggcaagaccttcaatcagcagttaacccttaacatttgtagacttcatagtggagagaaaccttacaaatgtgaagaatgtgacaaagcctacagtttcaaatcaaaccttgaaatacatcagaaaattcatactgaagagaatccttacaagtgtaatgagtgtggcaagaccttcagccggacgtcatcccttacataccatcatagacttcatactggacagaaaccttacaaatgtgaagattgtgatgaagctttcagtttcaaatcaaaccttgaaagacataggagaatttatactggagagaaactacacgtgtagtaatgaactagtccgtaacttgaaagtatttcgatttcttggctttatatatcttgtggaaaggacgacatccgttactaggcccgcttagc

SEQ ID NO: 1833 - DNA, 1325 bp, Homo sapiens
  source 1..1325: mol_type = genomic DNA
accgccaccatggcgccgcctctggccccgctccctccccgggacccaaacggggccggacccgagtggagggagccgggggctgtgagcttcgcggacgtggccgtgtacttctgccgggaggagtggggctgcttgcggccagcgcagagggccctgtaccgggacgtgatgcgggagacctacggccacctgagcgctctcggaatcggaggcaacaagccagctctcatctcctgggtggaggaggaggccgaactgtggggtccggctgcccaggatccggaggtggcgaaatgtcagacacaaacggacccagattccagaaacaagaaaaaggaaagacaaagggaagggacgggagccctggagaagcccgaccctgtggccgccgggtctcctgggctgaagtctccccaagccccctcggccgggcccccttatggttgggagcagctgtccaaggcaccgcaccggggacgcccctccctctgtgcccacccccctgtcccccgagctgaccagcgtcatggctgctacgtgtgcgggaagagctttgcctggcgctccacactggtggagcacgtctacagtcacactggcgagaagcccttccactgcactgactgcggcaagggcttcggccacgcttcctccctgagcaaacaccgggccatccatcgtggggagcggccccaccgctgtctggagtgtggccgggccttcacgcagcgctcggcgctgacttcgcacctgcgcgtccacaccggcgagaaaccctatggctgcgccgactgtggccgccgcttcagccagagctctgccctctaccagcaccggcgcgtgcacagcggcgagacccccttcccctgcccggactgtggccgcgccttcgcctacccctcggacctgcggcgccacgtgcgcacccacaccggcgagaagccctacccgtgcccggactgcgggcgctgcttccgccagagctcggagatggcagcccacaggcgcacccacagcggcgagaagccctacccctgcccgcagtgcggccgccgctttggccagaagtcagccgtggccaaacaccagtgggttcatcggcccggggccgggggccacaggggccgggtcgccgggcgtctgtctgtgaccctgacccctggccacggagacctggacccgcccgtgggcttccagctgtacccggagatattccaggagtgtgggtagtaatgaactagtccgtaacttgaaagtatttcgatttcttggctttatatatcttgtggaaaggacgaggatactgccttgctactcgtccg

SEQ ID NO: 1834 - DNA, 1328 bp, Homo sapiens
  source 1..1328: mol_type = genomic DNA
accgccaccatggcgccgcctctggccccgctccctccccgggacccaaacggggccggacccgagtggagggagccgggggctgtgagcttcgcggacgtggccgtgtacttctgccgggaggagtggggctgcttgcggccagcgcagagggccctgtaccgggacgtgatgcgggagacctacggccacctgagcgctctcggaatcggaggcaacaagccagctctcatctcctgggtggaggaggaggccgaactgtggggtccggctgcccaggatccggaggtggcgaaatgtcagacacaaacggacccagcagattccagaaacaagaaaaaggaaagacaaagggaagggacgggagccctggagaagcccgaccctgtggccgccgggtctcctgggctgaagtctccccaagccccctcggccgggcccccttatggttgggagcagctgtccaaggcaccgcaccggggacgcccctccctctgtgcccacccccctgtcccccgagctgaccagcgtcatggctgctacgtgtgcgggaagagctttgcctggcgctccacactggtggagcacgtctacagtcacactggcgagaagcccttccactgcactgactgcggcaagggcttcggccacgcttcctccctgagcaaacaccgggccatccatcgtggggagcggccccaccgctgtctggagtgtggccgggccttcacgcagcgctcggcgctgacttcgcacctgcgcgtccacaccggcgagaaaccctatggctgcgccgactgtggccgccgcttcagccagagctctgccctctaccagcaccggcgcgtgcacagcggcgagacccccttcccctgcccggactgtggccgcgccttcgcctacccctcggacctgcggcgccacgtgcgcacccacaccggcgagaagccctacccgtgcccggactgcgggcgctgcttccgccagagctcggagatggcagcccacaggcgcacccacagcggcgagaagccctacccctgcccgcagtgcggccgccgctttggccagaagtcagccgtggccaaacaccagtgggttcatcggcccggggccgggggccacaggggccgggtcgccgggcgtctgtctgtgaccctgacccctggccacggagacctggacccgcccgtgggcttccagctgtacccggagatattccaggagtgtgggtagtaatgaactagtccgtaacttgaaagtatttcgatttcttggctttatatatcttgtggaaaggacgagatattcctctatggtcacctcag

SEQ ID NO: 1835 - DNA, 1508 bp, Homo sapiens
  source 1..1508: mol_type = genomic DNA
accgccaccatggcgcaactgcggcgcggacacttgacattcagggacgtggccatagaattctctcaggaggagtggaaatgcctggaccctgtgcagaaggctttatacagggatgtgatgttggagaactacaggaacctggtctccctgggaatctgtcttcctgacctgagtattatctccatgatgaagcaaaggacagagccctggactgtggagaatgaaatgaaagtagcaaaaaatccagataggtgggaaggtatcaaagatatcaacacagggaggagctgtgcagtgagaagcaaagcaggaaacaagcctattacaaatcaacttggattaacctttcagttacctctgccagaactggagatatttcaaggtgaagggaagatttatgaatgtaatcaagttcaaaagttcatcagccacagttcttcagtttcgccacttcaaagaatttactctggggtcaaaacccacatatttaataaacataggaatgattttgttgattttccattgctgtcacaagaacagaaagcacacattaggagaaaaccttacgaatgtaatgagcagggcaaagtcttcagagtgtcttcaagccttcctaatcatcaagtaatccacactgcagataaacctaacagatgtcatgaatgtggtaaaaccgtcagggacaagtcaggcctcgcagaacattggagaattcgtacaggagagaaaccttacaaatgtaaagagtgtggcaagctcttcaatcgaattgcataccttgcacgacacgagaaagtgcatactggagagagtccttacaaatgtaatgagtgtggcaaggtcttcagtcgaattacataccttgtacgacatcagaaaattcatactagagagaaacctcataaatgtaacaaatgtggcaaggtttatagtagcagttcatacctagcacaacattggagaattcatacaggagagaaactttacaaatgtaataaatgtggcaaagaatttagtgggcattcaagcctcaccacccatctgttaatccacactggagagaaaccttacaaatgtaaagaatgtgacaaagcttttaggcacaagttctccctgacagttcatcagagaaatcataatggagagaaaccttataaatgtcatgaatgtggcaaagtcttcactcaagtttcacatcttgcacgacatcagaaaattcacactggagagaaaccttacaaatgtaatgagtgtggcaaagtcttcactcagaattcacaccttgcaaatcatcagagaatccacactggagagaaaccttacaaatgccatgtgtgtggtaaggtctttaggcacagttcatggtttgtacagcatcagagaagtgttcatgagagagtccttacaaactagtaatgaactagtccgtaacttgaaagtatttcgatttcttggctttatatatcttgtggaaaggacgaatgtcggaacgtgtagggtcaaat

SEQ ID NO: 1836 - DNA, 2342 bp, Homo sapiens
  source 1..2342: mol_type = genomic DNA
accgccaccatggctttttctcagggtctattgacattcagggatgtggccatagaattctctcaggaggagtggaaatgcctggaccctgctcagaggactctatacagggacgtgatgctggagaattataggaacctggtctccctggatatctcttccaaatgcacgatgaaggagttcttgtcaacagcgcaaggcaacagagaagtgttccatgcagggacattgcaaatacatgaaagtcatcacaatggagatttttgctaccaggatgttgataaagatattcatgactatgaatttcaatggcaagaagatgaaagaaatggccatgaagcacccatgacaaaaatcaaaaagttgacaggtattacagaacgatatgatcaaagtcatgctagaaacaagcctattaaagatcagcttggatcaagctttcattcgcatctgcctgaaatgcacatatttcagaccgaagagaaaattgataatcaagttgtgaagtctgtccacgatgcttccttggtttcaacagcccaaagaatttcttgtaggcccaaaacccatatatctaataaccatgggaataatttctggaattcttcattactcacacaaaaacaggaagtacacatgagagaaaaatctttccaatgtaatgagagtggcaaagcctttaattacagctcactcttaaggaaacatcagataatccatttagcagacaaatataaatgtgatgtatgtggcaagctctttaatcagaagcgaaacctagcatgccatcgtagatgtcacactggtgagaatccttacaagtgtaatgagtgtggcaagaccttcagtcagacgtcatcccttacatgccatcgtagacttcatactggagagaaaccttacaaatgtgaagaatgtgacaaagctttccatttcaaatcaatacttgaaagacataggataattcatactgaagagaaaccatataagtgtaatgagtgtggcaagacctttaggcagaagtcaatccttacacgccatcatcgacttcatactggagagaaaccttacaagtgtaatgagtgtggcaagacctttagtcacaagtcatcccttacatgccatcatagacttcatactggagagaaaccctacaaatgtaatgagtgtggcaagacctttagtcacaagtcatcccttacatgccatcgtagacttcatactggagagaaaccttacaaatgtgaagaatgtgacaaagcttacagtttcagatcaaattttgaaatacatcggaaaattcatactgaagacaatgcttacaagtgtaatgagtgtggaaagacctttagccggacatcatcccttacatgccatcgtagacgtcatactggagagcaaccttacaaatgtgaagaatgtgacaaagctttccgtttcaaatcaaaccttgaaagacataggagaattcatactggagagaaaccatacaagtgtaatgagtgtggcaagacctttagtcggaagtcatacctcacatgccatcatagacttcatactggagagaaagcttacaagtgtaatgagtgcggcaagacctttagttggaagtcatcccttacctgccatcgtagacttcattctggagagaaaccttacaagtgtaaggagtgtggcaagaccttcaatcagcagttaacccttaaacgccatcgtagacttcatagtggagagaacccttacaaatgtgaagatagtgacaaagcttacagtttcaaatcaaaccttgaaatacatcagaaaattcatactgaagagaatccttacaagtgtaatgagtgtggcaagaccttcagtcggacgtcatcccttacatgccatcgtagacttcataccggagagaaaccttacaaatgtgaagaatgtgacaaagctttccgtgtgaaatcaaaccttgaaggacataggagaattcatactggagagaaaccttacaagtgtaatgagtgtggcaagacctttagtcggaagtcatattttatatgccatcatagacttcatactggagagaaaccttataagtgtaatgagtgtggcaagaactttagtcagaagtcatcccttatatgccaccatagacttcatactggagagaaaccttacaagtgtaatgagtgtggcaagacctttagtcagaagtcaaaccttacatgccatcgtagacttcatactggagaaaaacaagtgtagtaatgaactagtccgtaacttgaaagtatttcgatttcttggctttatatatcttgtggaaaggacgacggcgcgggctcgagtgtgaagga

SEQ ID NO: 1837 - DNA, 314 bp, Homo sapiens
  source 1..314: mol_type = genomic DNA
accgccaccatggctttttctcagggtctattgacattcagggatgtggccatagaattctctcaggaggagtggaaatgcctggaccctgctcagaggactctatacagggacgtgatgctggagaattataggaacctggtctccctggggtcttgctgtgttgttgaaattcatcttgatctcctgagctcaagagatcctcctcagtctcccaagtagtaatgaactagtccgtaacttgaaagtatttcgatttcttggctttatatatcttgtggaaaggacgaagcagccagtctactacctttatg

SEQ ID NO: 1838 - DNA, 1295 bp, Homo sapiens
  source 1..1295: mol_type = genomic DNA
accgccaccatgatgtttcaggaccctgtggcctgtgaggatgttgctgtgaacttcacccaggaggagtgggctttgctggatatttcgcagaggaaactctacagggaagtgatgctggaaactttcaggaacctgacctctatagggaaaaagtggaaagaccagaacattgaatatgagtaccaaaaccccaggagaaacttcaggagtctcatagaagggaatgtcaatgaaattaaagaagacagtcattgtggagaaacttttacccaggttccagatgacaggctgaacttccaggagaagaaagcttctcctgaagcaaaatcatgtgataactttgtatgtggagaagttggcataggtaactcatcttttaatatgaacatcagaggtgacattgggcacaaggcatacgagtatcaggactatgcaccaaagccatataagtgtcaacaacctaagaaagccttcagatatcacccctcctttagaacacaagaaaggaatcacaccggagagaaaccctatgcttgtaaagaatgtggaaaaacctttatttcccattcaggcattcgaagacgcatggtaatgcacagtggggatggaccttataaatgtaagttttgtgggaaagctgtccattgtctcagattatatcttatccatgaaagaactcacactggagagaaaccgtatgaatgtaaacaatgtgttaaatcctttagttattctgctacccatcgaatacatgaaagaactcacactggagaaaagccttatgaatgtcagcaatgtgggaaagcattccatagttccagttcttttcaagcacataaaagaacccacactgggggaaagccatatgaatgtaaacaatgtggcaaatccttcagttggtgtcattcctttcaaatacatgaaagaactcacactggggagaagccctgtgaatgtagcaaatgtaataaagcattccgtagttacagatcctatcttagacataaaaggagtcacacgggagagaagccttatcaatgtaaggaatgtagaaaagcattcacgtatcccagttcccttcgtagacatgaaaggacccactctgcgaaaaaaccttatgaatgtaagcagtgtgggaaagcattatcttataagttttcaaacacacctaagaatgcgctctggagaaagaccttatagtaatgaactagtccgtaacttgaaagtatttcgatttcttggctttatatatcttgtggaaaggacgaaatatccgtcattgctgtgactcc

SEQ ID NO: 1839 - DNA, 2357 bp, Homo sapiens
  source 1..2357: mol_type = genomic DNA
accgccaccatggaagatctgtcctctccagactccacccttctccaagggggacataatctactctcatcagccagttttcaggaagcggtgactttcaaggatgtgatagtggactttacccaggaagaatggaaacagctggaccctggccagagagatttgttcagggatgtgacattggaaaattatacacacctggtctctataggactccaagtttctaaacctgatgtgatttcccagttagagcaagggacagagccatggatcatggagccaagcattccagtaggtacctgtgcagactgggagacaagacttgaaaatagtgtgtcagccccagagcctgacatttctgaagaagagctatctccagaggtaatagtggaaaaacacaaaagagatgattcttggagttccaacttgctagaaagttgggaatatgaaggcagtttagagagacagcaggcaaaccaacagacactgccaaaggaaataaaggtaaccgaaaagacaatacccagttgggaaaaaggccctgtaaataatgaatttgggaaaagtgtcaatgtgagttcaaaccttgtaacacaagaaccatctccagaagagacctctactaaaagaagcatcaaacagaattcaaacccagttaaaaaagagaaatcttgtaagtgcaatgaatgtgggaaagcctttagttattgttcagctcttattcgccatcagagaacacatactggagaaaaaccctacaaatgtaatgaatgtgaaaaagccttcagccggagtgaaaaccttataaaccatcaaagaattcatactggagataaaccatataaatgtgatcagtgtggaaaaggcttcattgagggtccatctcttactcaacatcaaagaattcatactggagaaaaaccatataaatgtgatgaatgtgggaaagcctttagtcagaggacccatcttgttcagcatcagagaattcatactggcgagaagccatacacttgtaatgagtgtggaaaagcctttagccagagaggccactttatggaacatcagaaaattcatacgggagaaaaaccttttaaatgtgatgaatgtgataaaaccttcaccaggagcacacaccttactcaacatcaaaaaattcatactggagaaaaaacctataaatgtaatgaatgtggaaaggccttcaacgggccctcaacttttatccgtcatcatatgattcatactggtgaaaaaccgtacgaatgcaatgaatgtgggaaagccttcagccagcactcaaacctcactcagcatcaaaaaactcatactggggagaaaccctatgattgtgcagaatgtggaaaatcttttagttactggtcatcccttgctcaacacctgaaaattcatactggagaaaaaccttacaaatgcaatgaatgtggaaaggccttcagttactgctcatcccttactcaacatcggagaattcacacgagagaaaagccctttgaatgcagtgaatgtggaaaggctttcagttatctctcaaaccttaatcagcatcagaaaactcatactcaagagaaagcttatgaatgtaaagaatgtgggaaagcttttattcggagttcatctcttgctaagcatgaaagaattcatactggagagaaaccctatcagtgtcatgaatgtgggaaaaccttcagttatggttcatcccttattcagcataggaagatccatactggagaacgaccttacaagtgtaatgagtgtgggagagcattcaaccagaacatacaccttacacagcataagagaattcatacaggagccaagccttatgagtgtgctgagtgtggtaaagcctttcgacattgttcatctcttgctcaacatcaaaaaactcacacagaagaaaaaccctaccagtgtaataaatgtgaaaagacctttagccagagctcccatctaactcagcatcaacgaattcacactggggagaagccctataagtgcaatgaatgtgacaaagcctttagccggagcactcatctgactgaacatcagaatactcatactggagagaaaccttataactgtaatgaatgcagaaagacttttagccagagcacatatctcattcagcaccagagaattcattcaggagagaagccttttggatgtaatgattgtggaaaatccttcagatatcgctctgctctcaacaaacatcagagactgcatcctggcatatagtaatgaactagtccgtaacttgaaagtatttcgatttcttggctttatatatcttgtggaaaggacgattctgcagaggttggtcgccatcg

SEQ ID NO: 1840 - DNA, 1814 bp, Homo sapiens
  source 1..1814: mol_type = genomic DNA
accgccaccatgcctcaggtgacatttaatgatgtggctatagacttcactcatgaagagtggggatggctcagttctgctcagagggacttatacaaggatgtgatggtccagaattatgagaacctggtctctgtaggtctttctgtaactaagccatatgtgatcacgttattggaggatggaaaagagccctggatgatggagaaaaaactgtcaaaaggtatgattccagattgggaatcaagatgggaaaacaaggaattatcaacaaagaaggataattatgatgaagattcaccccaaacagtaataatagaaaaagttgtaaaacaaagttatgaattttcaaattctaagaagaatttggaatatatagagaagttggaagggaagcatggaagtcaggtagaccatttcagaccagcaattctcacctctagagaaagccccactgcagacagtgtttacaaatacaatatatttagaagcacctttcattcaaagtctactctttctgaaccacaaaaaatttctgctgaagggaattcacacaaatatgatatattaaagaagaacttaccaaaaaagtcagttataaaaaatgagaaagtcaatggtggaaagaaacttttgaattctaataaaagtggggcagccttcagccagggcaaatctcttacccttccccagacttgtaatagagagaaaatctatacatgcagtgaatgtgggaaagcctttggcaaacagtcaatcctcaatcgccactggagaattcatacaggagagaagccctatgaatgtcgtgaatgtgggaagacttttagccatggctcatcccttacacgacatctgataagccatagtggagagaaaccttacaaatgtattgaatgtgggaaggcctttagccatgtctcatcacttactaaccatcagagcactcacactggagagaaaccatatgaatgtatgaactgtggaaagtcttttagtcgtgtgtcccatcttattgaacatctaagaattcatactcaagaaaaactctatgagtgtcgtatatgtggaaaggccttcattcataggtcatctctcattcaccatcagaaaatccatactggagagaagccttatgaatgtagagaatgtgggaaagctttctgctgtagctcacaccttactcgacatcaaagaattcacactatggagaaacaatatgaatgcaacaaatgtctgaaagtctttagtagcctctcatttcttgttcagcatcagagtattcatactgaagaaaaaccctttgaatgtcagaaatgcaggaaatccttcaaccagcttgaatcactgaatatgcatttgagaaatcacattagattgaaaccctacgaatgcagtatatgtgggaaagcctttagtcataggtcatccctgcttcaacatcacagaattcatactggagagaaaccttatgaatgtattaaatgtgggaagaccttcagctgtagttcaaaccttaccgtacatcagagaattcacactggagaaaagccatataaatgtaatgagtgtgggaaagcttttagcaaaggctcaaatcttactgcccatcaaagagtacataatggagagaaacccaatagtgtggtaagtgtggaaaagcctttagactatatgaatcactatacatgtgagaaatcttacagaagagaaactgtatagtaatgaactagtccgtaacttgaaagtatttcgatttcttggctttatatatcttgtggaaaggacgaaactcagccgctggaatgaaccca

SEQ ID NO: 1841 - DNA, 2105 bp, Homo sapiens
  source 1..2105: mol_type = genomic DNA
accgccaccatgcgcgcatgcgcagggtctacgcgggaagctggaagcggtgctcaggacctcagcaccctgctgtgcctggaggagagcatggaagagcaggatgagaagcccccagagcccccgaaggtctgtgcacaggaaggagtgaacttcaaaattgtgactgtggacttcacacgggaggaacagggtacttgcaaccctgctcagaggaccctggacagagatgtgatcctggagaaccacagggacctagtctcttgggacttggcaactgcagttggaaaaaaagattcaacttcaaagcagaggatttttgatgaagaaccagctaatggagtgaagatagaaaggtttacaagggatgatccttggttatcttcatgtgaagaagtggatgattgtaaagaccagttggagaagcaacaggaaaaacaagagatacttttgcaggaagtggcattcactcaaaggaaagcagttattcatgagagagtctgcaaaagtgatgaaactggggagaagagtggtctgaattccagtctattttcatccccagttatacccataagaaaccattttcataaacatgtatcacatgctaaaaaatggcatcttaatgctgctgtaaacagtcatcagaagattaatgagaatgagacactatatgaaaataatgaatgtggaaaaccccctcagagcattcaccttattcagtttacaagaactcaaacaaaagataaatcctatggatttagtgaccgtattcaatctttttgccatggtacacccctacatatacatgaaaaaattcatggaggaggaaaaacctttgattttaaagaatgtgggcaggttttgaaccccaaaatatcccataatgaacaacagagaattccttttgaagagagtcaatataaatgtagtgaaacctctcatagttcctcccttactcaaaacatgagaaataattctgaagagaaaccttttgaatgtaatcagtgtgggaaatccttcagctggagctcgcatcttgttgcacatcagagaactcacacaggggagaaaccttatgaatgtagtgaatgtggaaaatccttcagccggagctcgcaccttgtttcccatcagagaactcatactggagagaaaccttacaggtgtaatcaatgtgggaaatcctttagccagagttatgtccttgttgtgcatcaaagaactcatactggggagaagccttatgaatgcaatcagtgtggaaagtcattcaggcagagctataaacttattgcacatcaaagaacacataccggagagaagccctatgaatgtaatcaatgtgggaaatcatttatccagagctataaacttattgcacatcaaagaattcatactggggaaaaaccctatgaatgcaatcagtgtgggaaatcctttagtcaaagttataaacttgttgctcatcagagaactcacacaggagaaaaaccctttgaatgtaatcagtgtgggaaatccttcagctggagctctcagcttgttgcacatcaaagaactcacactggagagaaaccgtatgaatgtagtgaatgtggaaaatcttttaaccgcagttctcaccttgttatgcatcagagaattcacactggggaaaaaccgtatgaatgtaatcagtgtgggaaatccttcagccagagttatgttcttgttgtacatcagagaactcatactggagaaaagccctatgaatgcagtcaatgtgggaagtccttcagacagagttcatgccttactcaacatcagagaactcatactggagagaaaccatttgaatgtaatcagtgtggaaaaacatttagcttgagtgctcgacttattgtgcatcaaagaactcatactggagagaaaccctttacatgtattcagtgtggaaaagctttcattaatagctataaacttattaggcatcaggcaactcatactgaagagaaactctatgaatgtaactagtaatgaactagtccgtaacttgaaagtatttcgatttcttggctttatatatcttgtggaaaggacgaagcagaagaagcgctaggctgagc

SEQ ID NO: 1842 - DNA, 2180 bp, Homo sapiens
  source 1..2180: mol_type = genomic DNA
accgccaccatgcgcgcatgcgcagggtctacgcgggaagctggaagcggtgctcaggacctcagcaccctgctgtgcctggaggagagcatggaagagcaggatgagaagcccccagagcccccgaaggtctgtgcacaggattctttccttcctcaagagattatcatcaaagtcgagggagaagacactgggtctctgaccatcccatctcaggaaggagtgaacttcaaaattgtgactgtggacttcacacgggaggaacagggtacttgcaaccctgctcagaggaccctggacagagatgtgatcctggagaaccacagggacctagtctcttgggacttggcaactgcagttggaaaaaaagattcaacttcaaagcagaggatttttgatgaagaaccagctaatggagtgaagatagaaaggtttacaagggatgatccttggttatcttcatgtgaagaagtggatgattgtaaagaccagttggagaagcaacaggaaaaacaagagatacttttgcaggaagtggcattcactcaaaggaaagcagttattcatgagagagtctgcaaaagtgatgaaactggggagaagagtggtctgaattccagtctattttcatccccagttatacccataagaaaccattttcataaacatgtatcacatgctaaaaaatggcatcttaatgctgctgtaaacagtcatcagaagattaatgagaatgagacactatatgaaaataatgaatgtggaaaaccccctcagagcattcaccttattcagtttacaagaactcaaacaaaagataaatcctatggatttagtgaccgtattcaatctttttgccatggtacacccctacatatacatgaaaaaattcatggaggaggaaaaacctttgattttaaagaatgtgggcaggttttgaaccccaaaatatcccataatgaacaacagagaattccttttgaagagagtcaatataaatgtagtgaaacctctcatagttcctcccttactcaaaacatgagaaataattctgaagagaaaccttttgaatgtaatcagtgtgggaaatccttcagctggagctcgcatcttgttgcacatcagagaactcacacaggggagaaaccttatgaatgtagtgaatgtggaaaatccttcagccggagctcgcaccttgtttcccatcagagaactcatactggagagaaaccttacaggtgtaatcaatgtgggaaatcctttagccagagttatgtccttgttgtgcatcaaagaactcatactggggagaagccttatgaatgcaatcagtgtggaaagtcattcaggcagagctataaacttattgcacatcaaagaacacataccggagagaagccctatgaatgtaatcaatgtgggaaatcatttatccagagctataaacttattgcacatcaaagaattcatactggggaaaaaccctatgaatgcaatcagtgtgggaaatcctttagtcaaagttataaacttgttgctcatcagagaactcacacaggagaaaaaccctttgaatgtaatcagtgtgggaaatccttcagctggagctctcagcttgttgcacatcaaagaactcacactggagagaaaccgtatgaatgtagtgaatgtggaaaatcttttaaccgcagttctcaccttgttatgcatcagagaattcacactggggaaaaaccgtatgaatgtaatcagtgtgggaaatccttcagccagagttatgttcttgttgtacatcagagaactcatactggagaaaagccctatgaatgcagtcaatgtgggaagtccttcagacagagttcatgccttactcaacatcagagaactcatactggagagaaaccatttgaatgtaatcagtgtggaaaaacatttagcttgagtgctcgacttattgtgcatcaaagaactcatactggagagaaaccctttacatgtattcagtgtggaaaagctttcattaatagctataaacttattaggcatcaggcaactcatactgaagagaaactctatgaatgtaactagtaatgaactagtccgtaacttgaaagtatttcgatttcttggctttatatatcttgtggaaaggacgagccgaccaatttggaatacgcatc

SEQ ID NO: 1843 - DNA, 2099 bp, Homo sapiens
  source 1..2099: mol_type = genomic DNA
accgccaccatggaagagcaggatgagaagcccccagagcccccgaaggtctgtgcacaggattctttccttcctcaagagattatcatcaaagtcgagggagaagacactgggtctctgaccatcccatctcaggaaggagtgaacttcaaaattgtgactgtggacttcacacgggaggaacagggtacttgcaaccctgctcagaggaccctggacagagatgtgatcctggagaaccacagggacctagtctcttgggacttggcaactgcagttggaaaaaaagattcaacttcaaagcagaggatttttgatgaagaaccagctaatggagtgaagatagaaaggtttacaagggatgatccttggttatcttcatgtgaagaagtggatgattgtaaagaccagttggagaagcaacaggaaaaacaagagatacttttgcaggaagtggcattcactcaaaggaaagcagttattcatgagagagtctgcaaaagtgatgaaactggggagaagagtggtctgaattccagtctattttcatccccagttatacccataagaaaccattttcataaacatgtatcacatgctaaaaaatggcatcttaatgctgctgtaaacagtcatcagaagattaatgagaatgagacactatatgaaaataatgaatgtggaaaaccccctcagagcattcaccttattcagtttacaagaactcaaacaaaagataaatcctatggatttagtgaccgtattcaatctttttgccatggtacacccctacatatacatgaaaaaattcatggaggaggaaaaacctttgattttaaagaatgtgggcaggttttgaaccccaaaatatcccataatgaacaacagagaattccttttgaagagagtcaatataaatgtagtgaaacctctcatagttcctcccttactcaaaacatgagaaataattctgaagagaaaccttttgaatgtaatcagtgtgggaaatccttcagctggagctcgcatcttgttgcacatcagagaactcacacaggggagaaaccttatgaatgtagtgaatgtggaaaatccttcagccggagctcgcaccttgtttcccatcagagaactcatactggagagaaaccttacaggtgtaatcaatgtgggaaatcctttagccagagttatgtccttgttgtgcatcaaagaactcatactggggagaagccttatgaatgcaatcagtgtggaaagtcattcaggcagagctataaacttattgcacatcaaagaacacataccggagagaagccctatgaatgtaatcaatgtgggaaatcatttatccagagctataaacttattgcacatcaaagaattcatactggggaaaaaccctatgaatgcaatcagtgtgggaaatcctttagtcaaagttataaacttgttgctcatcagagaactcacacaggagaaaaaccctttgaatgtaatcagtgtgggaaatccttcagctggagctctcagcttgttgcacatcaaagaactcacactggagagaaaccgtatgaatgtagtgaatgtggaaaatcttttaaccgcagttctcaccttgttatgcatcagagaattcacactggggaaaaaccgtatgaatgtaatcagtgtgggaaatccttcagccagagttatgttcttgttgtacatcagagaactcatactggagaaaagccctatgaatgcagtcaatgtgggaagtccttcagacagagttcatgccttactcaacatcagagaactcatactggagagaaaccatttgaatgtaatcagtgtggaaaaacatttagcttgagtgctcgacttattgtgcatcaaagaactcatactggagagaaaccctttacatgtattcagtgtggaaaagctttcattaatagctataaacttattaggcatcaggcaactcatactgaagagaaactctatgaatgtaactagtaatgaactagtccgtaacttgaaagtatttcgatttcttggctttatatatcttgtggaaaggacgatatcgccggagcgatcagcgaatg

SEQ ID NO: 1844 - DNA, 1964 bp, Homo sapiens
  source 1..1964: mol_type = genomic DNA
accgccaccatggccaaaccccaggggctagtgacatttgaagatgtagctgtggatttcacccaggaggagtggcagtacctgaacccaccacagaggaccctgtacagagacgtgatgctggagacctacagcaacttggtctttgtggggcagcaggttaccaaaccaaacctcatcctcaagttggaggtagaagaatgcccggcagaaggaaaaatcccattttggaactttccagaagtctgtcaagttgatgaacagattgagaggcaacatcaggatgaccaagataaatgtctgctgatgcaagttggattttctgacaagaaaacaattatcaccaagagtgctcgtgactgtcatgagtttggaaacatacttcatctgagtacaaaccttgttgcttcaatacaaagacccgataaacacgaatcatttggaaataatatggtagataatttagacttatttagtagaagttctgcagaaaataaatatgataatggatgtgcaaaattgttcttccatactgagtatgagaaaacaaatcctggaatgaagccctatggctataaagagtgtgggaaaggtcttaggcgaaagaaaggccttagtctacatcagagaattaaaaatggagagaaaccctttgaatgtactgcatgtaggaaaaccttcagcaagaagtcacacctcattgtacattggagaactcatacgggagagaaaccttttggatgtaccgaatgtggaaaagcttttagccaaaaatctcagctcattatacacttgcgaactcatacaggagagagaccctttgagtgtcctgaatgtggaaaagccttcagagaaaagtcaactgtcatcatacattacaggactcacacaggagaaaaaccttatgaatgtaatgaatgtggaaaagccttcactcagaagtccaacctcattgtccatcagaaaacccacactggagagaaaacctatgaatgcactaaatgtggagaatctttcatacagaagcttgatctaattatacatcatagtacccatacaggaaagaaaccccatgaatgtaatgagtgtaagaaaactttcagtgataagtcaactctcattatacaccagagaactcatacgggagagaaacctcataaatgtactgaatgtgggaagtctttcaatgagaagtcaaccctcattgtgcatcaaagaactcatacaggagagaaaccctatgaatgtgatgtgtgtggaaaaaccttcacgcaaaagtcaaaccttggtgtacatcagagaactcattcaggagagaaaccctttgaatgtaatgaatgtgagaaagccttctctcagaagtcctacctcatgctgcatcagagaggtcatacaggagagaaaccttacgagtgcaatgaatgtgaaaaagcattttcacagaaatcatatctcattatacatcaaagaactcatacagaagaaaaaccctataaatgtaatgaatgtggcaaagccttcagagaaaagtcaaagctcattatacatcagagaattcatacaggagagaaaccttatgaatgtcctgtgtgttggaaagcttttagccagaagtcacagctcataatacatcagagaacgcacacgggagagaaaccctatgcatgcactgagtgtggcaaagccttccgagaaaagtcaacattcactgtacatcaaagaactcatactggagagaaaccctataaatgtacagaatgtgggaaagcctttacccaaaaatcaaaccttattgtacatcagcgaacccatgcaggaaagaaagcccatggaagaggccacactcggaagtcaaagttcatggcacattagtaatgaactagtccgtaacttgaaagtatttcgatttcttggctttatatatcttgtggaaaggacgactagtctcgtcggtttattcctac

SEQ ID NO: 1845 - DNA, 2021 bp, Homo sapiens
  source 1..2021: mol_type = genomic DNA
accgccaccatgacaccagcatctgcatctggtgaggactcaggaagcttctactcatggcagaaggcaaagagggaacaggggctagtgacatttgaagatgtagctgtggatttcacccaggaggagtggcagtacctgaacccaccacagaggaccctgtacagagacgtgatgctggagacctacagcaacttggtctttgtggggcagcaggttaccaaaccaaacctcatcctcaagttggaggtagaagaatgcccggcagaaggaaaaatcccattttggaactttccagaagtctgtcaagttgatgaacagattgagaggcaacatcaggatgaccaagataaatgtctgctgatgcaagttggattttctgacaagaaaacaattatcaccaagagtgctcgtgactgtcatgagtttggaaacatacttcatctgagtacaaaccttgttgcttcaatacaaagacccgataaacacgaatcatttggaaataatatggtagataatttagacttatttagtagaagttctgcagaaaataaatatgataatggatgtgcaaaattgttcttccatactgagtatgagaaaacaaatcctggaatgaagccctatggctataaagagtgtgggaaaggtcttaggcgaaagaaaggccttagtctacatcagagaattaaaaatggagagaaaccctttgaatgtactgcatgtaggaaaaccttcagcaagaagtcacacctcattgtacattggagaactcatacgggagagaaaccttttggatgtaccgaatgtggaaaagcttttagccaaaaatctcagctcattatacacttgcgaactcatacaggagagagaccctttgagtgtcctgaatgtggaaaagccttcagagaaaagtcaactgtcatcatacattacaggactcacacaggagaaaaaccttatgaatgtaatgaatgtggaaaagccttcactcagaagtccaacctcattgtccatcagaaaacccacactggagagaaaacctatgaatgcactaaatgtggagaatctttcatacagaagcttgatctaattatacatcatagtacccatacaggaaagaaaccccatgaatgtaatgagtgtaagaaaactttcagtgataagtcaactctcattatacaccagagaactcatacgggagagaaacctcataaatgtactgaatgtgggaagtctttcaatgagaagtcaaccctcattgtgcatcaaagaactcatacaggagagaaaccctatgaatgtgatgtgtgtggaaaaaccttcacgcaaaagtcaaaccttggtgtacatcagagaactcattcaggagagaaaccctttgaatgtaatgaatgtgagaaagccttctctcagaagtcctacctcatgctgcatcagagaggtcatacaggagagaaaccttacgagtgcaatgaatgtgaaaaagcattttcacagaaatcatatctcattatacatcaaagaactcatacagaagaaaaaccctataaatgtaatgaatgtggcaaagccttcagagaaaagtcaaagctcattatacatcagagaattcatacaggagagaaaccttatgaatgtcctgtgtgttggaaagcttttagccagaagtcacagctcataatacatcagagaacgcacacgggagagaaaccctatgcatgcactgagtgtggcaaagccttccgagaaaagtcaacattcactgtacatcaaagaactcatactggagagaaaccctataaatgtacagaatgtgggaaagcctttacccaaaaatcaaaccttattgtacatcagcgaacccatgcaggaaagaaagcccatggaagaggccacactcggaagtcaaagttcatggcacattagtaatgaactagtccgtaacttgaaagtatttcgatttcttggctttatatatcttgtggaaaggacgatgaaccttgcgaattacgtctggt

SEQ ID NO: 1846 - DNA, 359 bp, Homo sapiens
  source 1..359: mol_type = genomic DNA
accgccaccatggcttccccgagccccccgccggagtcgaaggaggagtgggattatctggacccagctcagagaagcctgtataaagatgtcatgatggagaattatggaaacctggtctcactgggtctcactctattgcctaggctggtgtgcagcgacgcaaacacagcttgctgcagcctcaacctgttgggcttaagtgatcaatcctcccacctcagctacctgagtagctgggactacagatgttttgaacagagatagtaatgaactagtccgtaacttgaaagtatttcgatttcttggctttatatatcttgtggaaaggacgatgctcctagctacttgtagcgacc

SEQ ID NO: 1847 - DNA, 1856 bp, Homo sapiens
  source 1..1856: mol_type = genomic DNA
accgccaccatgatggagaattatggaaacctggtctcactggatgttttgaacagagataaggatgaggagccaactgtaaaacaagagattgaagaaattgaggaagaagtggaaccacagggtgtaatagttacaagaatcaaaagtgaaattgaccaggatcctatgggtagagaaacatttgaacttgttggtaggttagataaacaaagagggatcttcctatgggaaataccaagggaatctttgacccaggaacagagaatgttcagagaaaacactaacattatccgtaaaagaccaaactcagaagagaaatgccataaatgtgaagaatgtggaaagggttttgtccgcaaggcccatttcattcaacatcaaagggtccatactggtgagaaaccttttcagtgcaatgaatgtgggaaaagttttagtcgcagttcatttgttattgaacatcagagaattcacactggggaaaggccctatgagtgtaattactgtggaaaaacctttagtgtgagctcaacccttattagacatcagagaatccacactggagaaagaccctatcagtgtaatcagtgtaaacagagcttcagccagagaaggagccttgttaaacatcaaaggattcatacaggtgagaaaccccataaatgtagtgactgtgggaaagccttcagttggaaatcacaccttattgagcatcaaagaactcacactggtgagaaaccttatcactgtaccaaatgtaagaagagctttagtcgaaattcattgcttgttgagcatcaaagaattcacactggggaaagaccccataaatgtggtgaatgtgggaaagcctttcgattaagcacataccttatacaacaccaaaaaattcacactggcgagaagccttttctttgtattgagtgtggaaaaagtttcagtcggagctcattccttattgaacatcagaggatccatactggtgaaagaccttatcagtgcaaagagtgtgggaaaagtttcagtcagctttgcaaccttactcgtcatcagagaattcacacaggagacaagccccataaatgtgaggaatgtggaaaagcctttagtagaagctcaggtcttattcagcatcagagaattcacaccagggagaagacttatccatacaatgaaactaaggaaagttttgatccaaattgcagtcttgttatacagcaggaagtctaccctaaggagaaatcttataaatgtgatgaatgtgggaaaacttttagtgttagtgctcatcttgtacaacatcaaagaatccacactggtgaaaagccctatctatgtactgtctgtgggaaaagcttcagccggagctcatttcttattgaacatcagagaatccacactggtgagagaccctatctgtgcagacagtgtggaaaaagctttagtcagctttgtaatcttattcgacatcagggtgttcacacaggtaataaaccccataaatgtgatgaatgtggaaaggcctttagccggaactcgggtcttattcagcatcagagaatacacacaggagagaaaccttataagtgtgagaagtgcgacaaaagtttcagtcaacagcgcagtcttgtcaaccatcagaagatccatgcagaggtgaaaacccaagaaacccatgaatgtgacgcttgtggtgaagcctttaattgccgtatttctcttattcagcatcagaaattgcacacagcatggatgcaatagtaatgaactagtccgtaacttgaaagtatttcgatttcttggctttatatatcttgtggaaaggacgaacactctgtgacaatacggcttta

SEQ ID NO: 1848 - DNA, 1982 bp, Homo sapiens
  source 1..1982: mol_type = genomic DNA
accgccaccatggcttccccgagccccccgccggagtcgaaggggttgctgacatttgaggatgtggctgtgttttttacccaggaggagtgggattatctggacccagctcagagaagcctgtataaagatgtcatgatggagaattatggaaacctggtctcactggatgttttgaacagagataaggatgaggagccaactgtaaaacaagagattgaagaaattgaggaagaagtggaaccacagggtgtaatagttacaagaatcaaaagtgaaattgaccaggatcctatgggtagagaaacatttgaacttgttggtaggttagataaacaaagagggatcttcctatgggaaataccaagggaatctttgacccaggaacagagaatgttcagagaaaacactaacattatccgtaaaagaccaaactcagaagagaaatgccataaatgtgaagaatgtggaaagggttttgtccgcaaggcccatttcattcaacatcaaagggtccatactggtgagaaaccttttcagtgcaatgaatgtgggaaaagttttagtcgcagttcatttgttattgaacatcagagaattcacactggggaaaggccctatgagtgtaattactgtggaaaaacctttagtgtgagctcaacccttattagacatcagagaatccacactggagaaagaccctatcagtgtaatcagtgtaaacagagcttcagccagagaaggagccttgttaaacatcaaaggattcatacaggtgagaaaccccataaatgtagtgactgtgggaaagccttcagttggaaatcacaccttattgagcatcaaagaactcacactggtgagaaaccttatcactgtaccaaatgtaagaagagctttagtcgaaattcattgcttgttgagcatcaaagaattcacactggggaaagaccccataaatgtggtgaatgtgggaaagcctttcgattaagcacataccttatacaacaccaaaaaattcacactggcgagaagccttttctttgtattgagtgtggaaaaagtttcagtcggagctcattccttattgaacatcagaggatccatactggtgaaagaccttatcagtgcaaagagtgtgggaaaagtttcagtcagctttgcaaccttactcgtcatcagagaattcacacaggagacaagccccataaatgtgaggaatgtggaaaagcctttagtagaagctcaggtcttattcagcatcagagaattcacaccagggagaagacttatccatacaatgaaactaaggaaagttttgatccaaattgcagtcttgttatacagcaggaagtctaccctaaggagaaatcttataaatgtgatgaatgtgggaaaacttttagtgttagtgctcatcttgtacaacatcaaagaatccacactggtgaaaagccctatctatgtactgtctgtgggaaaagcttcagccggagctcatttcttattgaacatcagagaatccacactggtgagagaccctatctgtgcagacagtgtggaaaaagctttagtcagctttgtaatcttattcgacatcagggtgttcacacaggtaataaaccccataaatgtgatgaatgtggaaaggcctttagccggaactcgggtcttattcagcatcagagaatacacacaggagagaaaccttataagtgtgagaagtgcgacaaaagtttcagtcaacagcgcagtcttgtcaaccatcagaagatccatgcagaggtgaaaacccaagaaacccatgaatgtgacgcttgtggtgaagcctttaattgccgtatttctcttattcagcatcagaaattgcacacagcatggatgcaatagtaatgaactagtccgtaacttgaaagtatttcgatttcttggctttatatatcttgtggaaaggacgagcgtcgaccctttgatagtacggt

SEQ ID NO: 1849 - DNA, 896 bp, Homo sapiens
  source 1..896: mol_type = genomic DNA
accgccaccatgcccgattccgcgcccgccatggccgacaaaatggacatgtctctggacgacatcattaaactgaaccggagccagcgaggcggccggggcgggggccggggccgcggccgggccggctcccagggcggccgcggcggtggggcgcaggccgccgcgcgagtgaatcgaggcggcgggcccatccggaaccggccggccatcgcccgcggcgcggccggcggaggcggcaggaaccgaccggcgccctacagcaggccaaaacaacttcccgacaagtggcagcacgatcttttcgacagtggcttcggcggtggtgccggcgtggagacaggtgggaaactgctggtgtccaatctggattttggagtctcagacgccgatattcaggaactctttgctgaatttggaacgctgaagaaggcggctgtgcactatgatcgctctggtcgcagcttaggaacagcagacgtgcactttgagcggaaggcagatgccctgaaggccatgaagcagtacaacggcgtccctctggatggccgccccatgaacattcagcttgtcacgtcacagattgacgcacagcggaggcctgcacagagcgtaaacagaggtggcatgactagaaaccgtggcgctggaggttttggtggtggtggaggcacccggagaggcacccgcggaggcgcccgtggaagaggcagaggtgccggcaggaattcaaagcagcagctttcggcagaggagctggatgcccagctggacgcctataatgcgagaatggacaccagttagtaatgaactagtccgtaacttgaaagtatttcgatttcttggctttatatatcttgtggaaaggacgaggtcgtacttattgaattgacatt

SEQ ID NO: 1850 - DNA, 1472 bp, Homo sapiens
  source 1..1472: mol_type = genomic DNA
accgccaccatgaacaagttccagggacccgtgacattaaaggatgttattgtggaattcaccaaggaagaatggaagttactgacccctgctcagaggactctgtataaggatgtgatgctggaaaactatagtcaccttgtctcagtgggttaccatgtgaataagccaaatgcagtcttcaagttgaagcaaggaaaagagccatggatattagaagtagaatttccacatcggggcttccctgaagacctatggagcattcatgatctagaagcaagataccaggaaagccaagctggaaattcaaggaatggagaactcacaaaacatcagaaaactcataccacagagaaagcctgtgaatgtaaggaatgtgggaagttcttctgccagaagtctgccctcatagtacatcagcatactcactcaaagggcaaatcctatgactgtgataaatgtgggaaatctttctctaaaaatgaagacctcataagacatcagaaaattcacacgagagataaaacctatgagtgtaaagaatgtaagaaaatattttaccacctatcatctctcagtagacatctgagaacccatgcaggagagaaaccctatgaatgtaatcagtgtgaaaaatccttctaccagaaaccacatctcacagaacatcagaaaacacacacaggggagaaaccttttgaatgtactgaatgtgggaagttcttctatgtgaaggcatacctcatggtacatcagaaaacacacacaggggagaaaccctatgagtgtaaggagtgtgggaaagccttttcccagaagtcacacctcacagtacatcagagaatgcacacaggggagaaaccctataaatgtaaggaatgtgggaaattcttctctaggaattcacacctcaaaactcatcagagaagtcacacaggagagaaaccctatgaatgtaaggaatgtaggaaatgcttctaccagaagtcagccctcacagtacatcagcgaactcacacaggggagaaaccctttgaatgtaataaatgtgggaaaacattttactataaatcagacctcactaaacatcagagaaaacacacaggggagaagccctatgaatgcacagaatgtggcaaatcttttgctgtgaattcagtcctcagattacatcaaaggactcacacaggagagaagccctatgcatgcaaggaatgtgggaagtccttttctcagaagtcacattttattatacatcagagaaaacacacaggggagaagccctatgagtgtcaggagtgtggggaaacctttatccagaagtcacaactcactgcacatcagaagacacacacaaagaagaggaatgctgagaagtagtaatgaactagtccgtaacttgaaagtatttcgatttcttggctttatatatcttgtggaaaggacgagagatcacttaacgcgcctcatcg

SEQ ID NO: 1851 - DNA, 1208 bp, Homo sapiens
  source 1..1208: mol_type = genomic DNA
accgccaccatgtctgcacagtcagtggaagaagattcaatacttatcatcccaactccagatgaagaggaaaaaattctgagagtgaagttggaggaggatcctgatggcgaagagggatcaagtatcccctggaaccatctcccagacccagagattttccgacagcgattcaggcagtttggataccaggattcacctgggccccgtgaggctgtgagccagctccgagaactttgccgtctgtggctcaggccagagacgcacacaaaagaacaaatcttggagctggtagtgctggagcagtttgttgccatcctacccaaagagctacagacttgggttcgagatcatcatccagagaatggagaggaggcagtgacagtgctggaggatttggagagtgaacttgatgaccctggacaaccggtttctctccgtcgacgaaaacgggaagtactagtagaagacatggtatctcaagaagaagctcagggattaccaagttctgagcttgatgctgtggagaaccagctcaagtgggcatcctgggagctccattccctaaggcactgtgatgatgatggtaggactgaaaatggagcactagctccaaagcaggagcttccttcagcattagaatcccatgaagttcctggcactctcaatatgggtgttcctcaaatttttaaatatggagaaacctgtttccccaagggcaggtttgaaagaaagagaaatccctctcgaaagaaacaacatatatgtgatgaatgtggaaaacacttcagtcagggctcagcccttattcttcatcaaagaattcacagtggggagaaaccttatggatgtgttgagtgtgggaaagcattcagccgaagttccattcttgtgcaacaccagagagtccacactggagaaaaaccttacaaatgtcttgaatgtgggaaagcctttagccagaattcggggcttattaatcatcagagaatccatactggggagaaaccttatgaatgcgttcagtgtgggaaatcgtatagtcaaagctcaaatctttttagacatcagagaagacacaatgcagaaaaacttctgaatgttgtgaaagtttagtaatgaactagtccgtaacttgaaagtatttcgatttcttggctttatatatcttgtggaaaggacgacgtgggtcccttaacgtgcaggtt

SEQ ID NO: 1852 - DNA, 683 bp, Homo sapiens
  source 1..683: mol_type = genomic DNA
accgccaccatgtctgcacagtcagtggaagaagattcaatacttatcatcccaactccagatgaagaggaaaaaattctgagagtgaagttggaggaggatcctgatggcgaagagggatcaagtatcccctggaaccatctcccagacccagagattttccgacagcgattcaggcagtttggataccaggattcacctgggccccgtgaggctgtgagccagctccgagaactttgccgtctgtggctcaggccagagacgcacacaaaagaacaaatcttggagctggtagtgctggagcagtttgttgccatcctacccaaagagctacagacttgggttcgagatcatcatccagagaatggagaggaggcagtgacagtgctggaggatttggagagtgaacttgatgaccctggacaaccggtttctctccgtcgacgaaaacgggaagtactagtagaagacatggtatctcaagaagaagctcagggattaccaagttctgagcttgatgctgtggagaaccagctcaagtgggcatcctgggagctccattccctaaggcactgtgtaatcattccttagtaatgaactagtccgtaacttgaaagtatttcgatttcttggctttatatatcttgtggaaaggacgagggacaacgtctgcgaggtcccta

SEQ ID NO: 1853 - DNA, 1643 bp, Homo sapiens
  source 1..1643: mol_type = genomic DNA
accgccaccatggagttcacctgggatgaatggcagctactggattctacacagaagtacctgtacagagatgtgatattggaaaactatcataacctgatatcagtggggtatcatggtaccaagcctgacttaatcttcaagttggaacaaggagaagatccatggataataaatgccaaaatttccaggcagagctgtccagatggctgggaagaatggtaccagaacaatcaagatgagcttgagagtattgaaagaagctatgcttgtagtgtgttgggaagacttaatctgagcaaaacccatgattcttcaagacagagactctataacacacgtggaaaaagtttgacacaaaactcagctccaagcagaagttatttaagaaagaatcctgataagtttcatggttatgaagaaccatattttcttaagcatcaaagagctcatagcatagaaaaaaactgtgtgtgtagtgaatgtgggaaagcttttcgttgtaagtcacagctcattgtacatctcagaattcatacaggagagagaccttatgaatgcagtaaatgtgaaagagccttcagtgccaagtcaaaccttaatgctcatcagagagttcatacaggagaaaaaccctactcatgtagtgagtgcgagaaggtcttctctttcaggtcacagctcattgtccatcaggaaattcacacaggagggaaaccctatggctgcagtgaatgtgggaaagcctacagttggaaatcacagcttcttttacaccagagaagtcacacaggagtgaaaccgtatgaatgcagcgaatgtgggaaagcctttagtttgaagtctccattcgttgtacaccagagaactcatacaggagtgaaaccccataaatgcagtgaatgtgggaaagcctttaggagtaagtcctatctccttgttcacatccgaatgcatacaggagaaaaaccctatcaatgcagtgattgtgggaaagccttcaatatgaagacacaactcattgtacatcagggagttcacacaggaaataatccttatcaatgcggtgaatgtgggaaagcctttggtaggaaggaacagctcactgcacatctgagagctcatgcaggagagaagccctatggatgcagtgaatgtgggaaggctttcagcagcaagtcataccttgttatacataggagaacacacaccggagagagaccctatgaatgtagtttgtgtgagagagccttttgtggaaaatcacagctgattatacatcagagaactcattcaactgagaagccctatgaatgcaatgaatgtgaaaaagcctaccctaggaaggcatcacttcagatacaccagaaaactcattcgggagagaaaccttttaaatgcagtgaatgtggaaaagccttcactcagaagtcatctctcagtgaacatcagagagttcacaccggagagaaaccatggaaatgctctgaatgtgggaaatccttctgttggaattcagggcttcgtatacatcggaagactcataaatagtaatgaactagtccgtaacttgaaagtatttcgatttcttggctttatatatcttgtggaaaggacgattgaatctgccaagggtcgcttgc

SEQ ID NO: 1854 - DNA, 1700 bp, Homo sapiens
  source 1..1700: mol_type = genomic DNA
accgccaccatgatgtttcaggattcagtggcctttgaggatgtggctgtcagcttcacccaggaggagtgggctttgctggatccttcccagaagaatctctacagggatgtgatgcaggaaaccttcaagaacctgacctctgtaggaaaaacatggaaagttcagaacattgaagatgagtacaaaaatcccaggagaaatctaagtcttatgagagagaaactctgtgaaagtaaagaaagtcatcactgtggagaaagcttcaaccagattgcagatgacatgctgaacaggaaaactcttcctggaataacaccatgtgaaagcagtgtgtgtggagaagttggcacgggtcattcatctcttaatacgcatatcagagctgacactggacacaagtcatctgagtatcaggaatatggagagaatccatatagaaataaggaatgtaagaaagccttcagttatcttgactcctttcaatcacatgataaagcttgcactaaagagaaaccctatgatggtaaagaatgtacagaaaccttcatttcccattcatgcattcaaagacacagggtaatgcacagtggagatggaccttataaatgtaagttttgtgggaaagccttctattttctcaatttatgtcttatccatgaacgaattcacactggtgtgaaaccatataagtgtaaacaatgtggtaaggcctttactcgttccactacccttccagtacatgaaagaactcacacaggagtgaatgccgatgaatgtaaagaatgtgggaatgcattcagttttcctagtgaaattcgtagacataaaaggtctcacactggagaaaaaccctatgagtgtaagcaatgtgggaaagtcttcatttctttcagttccattcagtatcataagatgactcacactggagagaaaccctatgaatgtaagcagtgtgggaaagcctttagatgtggctcacaccttcaaaagcatggaaggactcacactggagagaaaccctatgaatgtaggcaatgtggtaaagccttcagatgtacctcggaccttcaaaggcatgaaaagacacacactgaggataaaccctatggatgtaagcagtgtgggaaaggctttagatgtgcttcacaacttcaaattcatgaaaggacgcacagtggagagaaaccccatgaatgtaaggaatgtggaaaagtattcaagtatttttcttccttgcgtatacatgaaaggacgcacactggagagaagccccatgaatgtaagcaatgtggaaaagcattcaggtatttctcttccttgcatatacatgaaaggacacacactggagataagccatatgagtgtaaggtatgtggcaaagccttcacttgttccagttccattcgatatcatgaaaggactcacactggagagaaaccctatgaatgtaagcactgtggtaaggcctttatttccaattacattcgatatcatgaaaggactcacactggagagaaaccctatcaatgcaagcaatgtggcaaagcctttattcgtgccagttcatgtcgagaacatgaaagaactcataccattaatagatagtaatgaactagtccgtaacttgaaagtatttcgatttcttggctttatatatcttgtggaaaggacgacaggataccagcagtgatcccttc

SEQ ID NO: 1855 - DNA, 2033 bp, Homo sapiens
  source 1..2033: mol_type = genomic DNA
accgccaccatgctggagaattatgggaatgtggcctccctgggatttccacttctcaaacctgctgtgatctcacaactggagggaggaagtgagctggggggctcatctccactggctgcaggaacaggcctccagggcctccagactgatattcagactgacaatgatttgacaaaggaaatgtatgaaggaaaagagaatgtatcatttgaacttcaaagagacttttcccaggaaacagacttttcagaagcctctcttctagagaaacaacaggaagtccactcagcaggaaatataaagaaggagaagagcaacaccattgatggaacagtgaaagatgagacaagccccgtggaggagtgtttttttagtcaaagttcaaactcatatcagtgtcataccatcactggagagcagccctctgggtgtacaggattggggaaatccatcagctttgatacaaaactcgtgaagcatgaaataattaattctgaggaaagacctttcaaatgtgaagaattagtagagccctttaggtgtgactctcaacttattcaacatcaagagaacaacactgaggaaaagccttatcagtgttcggagtgtggcaaagctttcagcattaatgagaaattaatttggcatcagagacttcacagtggggagaaacccttcaaatgtgtggagtgtgggaaaagcttcagctacagttcccattatatcacacatcagacaatccacagtggggagaagccctatcagtgtaagatgtgtgggaaggccttcagtgttaatggaagcctaagtaggcatcagagaatccatacgggagagaagccctatcagtgcaaggaatgtggaaatggcttcagctgtagttctgcatatattacacatcagagagtccacactggagagaaaccttacgagtgtaatgactgtgggaaagcgttcaatgttaatgcaaaattaattcaacatcagagaatccatactggagagaaaccttatgaatgtaatgaatgtggaaaaggcttcaggtgcagctcccagcttaggcagcatcagagcatccacacaggagaaaagccctatcagtgtaaagagtgtggaaaaggcttcaataataatacaaaactcattcagcatcagagaatccacacaggtgagaaaccctatgaatgcactgaatgtggaaaagccttcagtgtcaaagggaagttaatccaacaccagagaattcacacaggcgagaaaccctatgagtgtaatgaatgcgggaaagccttcagatgtaactcccaatttcggcagcatctgagaattcacactggggagaagccctatgagtgtaatgagtgtggaaaggccttcagcgttaatgggaaactaatgcggcatcagagaattcacactggggagaaaccttttgaatgtaatgagtgtgggagatgctttacttctaaaagaaacctacttgatcatcaccgaatccatactggagaaaagccctatcaatgtaaggaatgtgggaaagccttcagtatcaatgccaaactaactaggcatcagaggatacatactggggagaaacctttcaaatgtatggaatgtgagaaagcattcagctgtagttctaactatattgtgcaccagagaatccatacaggagagaaaccctttcagtgtaaggagtgtggaaaagccttccatgttaatgcccatttaattcggcatcagagaagccacactggggagaaacccttcagatgtgtggaatgtggcaaaggcttcagctttagttctgactacattatacatcagacagtccacacttggaagaaaccctatatgtgtagtgtgtgtgggaaagcattcaggtttagcttccagctcagtcagcatcagagtgtccatagtgaaggaaaatcctagtaatgaactagtccgtaacttgaaagtatttcgatttcttggctttatatatcttgtggaaaggacgaatggtctcgttatattgttaggat

SEQ ID NO: 1856 - DNA, 1859 bp, Homo sapiens
  source 1..1859: mol_type = genomic DNA
accgccaccatgtatgaaggaaaagagaatgtatcatttgaacttcaaagagacttttcccaggaaacagacttttcagaagcctctcttctagagaaacaacaggaagtccactcagcaggaaatataaagaaggagaagagcaacaccattgatggaacagtgaaagatgagacaagccccgtggaggagtgtttttttagtcaaagttcaaactcatatcagtgtcataccatcactggagagcagccctctgggtgtacaggattggggaaatccatcagctttgatacaaaactcgtgaagcatgaaataattaattctgaggaaagacctttcaaatgtgaagaattagtagagccctttaggtgtgactctcaacttattcaacatcaagagaacaacactgaggaaaagccttatcagtgttcggagtgtggcaaagctttcagcattaatgagaaattaatttggcatcagagacttcacagtggggagaaacccttcaaatgtgtggagtgtgggaaaagcttcagctacagttcccattatatcacacatcagacaatccacagtggggagaagccctatcagtgtaagatgtgtgggaaggccttcagtgttaatggaagcctaagtaggcatcagagaatccatacgggagagaagccctatcagtgcaaggaatgtggaaatggcttcagctgtagttctgcatatattacacatcagagagtccacactggagagaaaccttacgagtgtaatgactgtgggaaagcgttcaatgttaatgcaaaattaattcaacatcagagaatccatactggagagaaaccttatgaatgtaatgaatgtggaaaaggcttcaggtgcagctcccagcttaggcagcatcagagcatccacacaggagaaaagccctatcagtgtaaagagtgtggaaaaggcttcaataataatacaaaactcattcagcatcagagaatccacacaggtgagaaaccctatgaatgcactgaatgtggaaaagccttcagtgtcaaagggaagttaatccaacaccagagaattcacacaggcgagaaaccctatgagtgtaatgaatgcgggaaagccttcagatgtaactcccaatttcggcagcatctgagaattcacactggggagaagccctatgagtgtaatgagtgtggaaaggccttcagcgttaatgggaaactaatgcggcatcagagaattcacactggggagaaaccttttgaatgtaatgagtgtgggagatgctttacttctaaaagaaacctacttgatcatcaccgaatccatactggagaaaagccctatcaatgtaaggaatgtgggaaagccttcagtatcaatgccaaactaactaggcatcagaggatacatactggggagaaacctttcaaatgtatggaatgtgagaaagcattcagctgtagttctaactatattgtgcaccagagaatccatacaggagagaaaccctttcagtgtaaggagtgtggaaaagccttccatgttaatgcccatttaattcggcatcagagaagccacactggggagaaacccttcagatgtgtggaatgtggcaaaggcttcagctttagttctgactacattatacatcagacagtccacacttggaagaaaccctatatgtgtagtgtgtgtgggaaagcattcaggtttagcttccagctcagtcagcatcagagtgtccatagtgaaggaaaatcctagtaatgaactagtccgtaacttgaaagtatttcgatttcttggctttatatatcttgtggaaaggacgattcacaccatatggtaccgtgctc

SEQ ID NO: 1857 - DNA, 776 bp, Homo sapiens
  source 1..776: mol_type = genomic DNA
accgccaccatgaggttagcaaagcctaaagcgggtatttctcggagctcaagccaaggaaaggcctatgagaacaagcgcaaaacaggccggcagcggcagaagtggggcatgactattcgatttgactcaagcttcagtagactcagaagaagcttggatgacaaaccctataaatgtactgaatgtgaaaagagtttcagtcagagttcaactctttttcaacaccagaagatccatactggaaagaaatcccataaatgtgctgattgtgggaaaagtttctttcagagttctaatctcattcagcatcgacggatccatacgggggaaaagccctacaaatgtgatgagtgtggagaaagcttcaaacagagctcaaatctcattcagcaccagagaattcatactggagaaaaaccctatcagtgtgatgagtgtggccggtgtttcagccagagctcccaccttattcaacatcagagaacccacactggggagaaaccctaccagtgcagtgaatgtggcaaatgtttcagtcagagctctcatctgaggcagcacatgaaggtgcataaagaagagaagcctcgtaaaacccggggcaaaaatatcagggtgaagactcacttaccctcttggaaagctggtacaggaaggaagtctgtggctggtctccgttagtaatgaactagtccgtaacttgaaagtatttcgatttcttggctttatatatcttgtggaaaggacgataccagcgcgaggaagtaccaaag

SEQ ID NO: 1858 - DNA, 2258 bp, Homo sapiens
  source 1..2258: mol_type = genomic DNA
accgccaccatggctcttcctcagggtctattgacattcagggacgtggccatagaattctctcaggaggagtggaaatgcctggaccctgctcagaggactctttacagggatgtgatgctggagaattataggaacctggtctccctggatatctcttccaaatgcatgatgaagacattcttctcaacagggcaaggcaatacagaagcgttccacacagggacattgcaaagacaagcaagtcatcacattggagatttttgcttccagaaaattgagaaagacattcatggcttccagtttcagtggaaagaagatgaaacaaatgaccatgcagcacccatgacagaaatcaaagagttgactggtagtacaggccaacatgatcaaaggcatgctggaaacaagcatattaaagatcagcttggattaagctttcattcgcatctgcctgaactgcacatatttcagcctgaagggaaaattggtaatcaagttgagaagtctatcaacaatgcttcctcagtttcaacatcccaaagaatttgttgtaggcccaaaacccatatttctaataagtatggaaataattccctccattcttcattactcacacaaaaacggaatgtacacatgagagaaaaatctttccaatgtattgagagtggcaaatcctttaattgtagctcacttttaaaaaaacatcagataacccacttagaagagaaacaatgtaaatgtgatgtatatggcaaggtatttaatcagaagcgataccttgcatgccatcgtagatctcacattgatgagaaaccttacaagtgtaatgagtgtggcaagatctttggtcacaatacatccctcttccttcacaaggcgcttcatactgcagacaaaccttatgaatgtgaagaatgtgacaaagttttcagtcgcaaatcacaccttgaaacacataagataatttatactggagggaaaccatacaaatgtaaggtttgtgacaaagctttcacatgtaattcatacctagcaaaacatactataattcacactggagagaaaccttacaagtgtaatgaatgtggcaaggtttttaatcgactgtcaacccttgcacgccatcgtaggcttcatactggagagaaaccttatgaatgtgaagaatgtgaaaaagttttcagtcgcaaatcacatcttgaaagacataagaggattcatactggagagaaaccatacaaatgtaaggtttgtgacaaggcttttgcatataattcatacctggcaaaacatagtataattcacactggagagaagccttacaagtgtaatgaatgtggcaaggtttttaatcaacaatcaactcttgcacgccatcatagacttcatactgcagagaaaccatacaaatgtgaagaatgtgacaaagttttcaggtgcaaatcacaccttgaaagacataggaggattcatactggagagaaaccatacaaatgtaaggtttgtgacaaggctttccggagtgattcatgccttacagaacatcagagagttcatactggagagaaaccatacatgtgtaatgaatgtggcaaggtttttagtacaaaagcaaaccttgcatgtcatcataaacttcatactgcagagaaaccgtacaaatgtgaagaatgtgagaaagttttcagtcgcaaatcacacatggaaagacataggaggattcatactggagagaaaccgtacaaatgtaaggtttgtgacaaggctttccggagggattcacacctggcacaacatcagagagttcatactggagagaaaccttacaagtgtaatgagtgtggcaagaccttccgtcagacatcatcgcttataatccatcgtaggcttcatactggagagaaaccttacaagtgtaatgagtgtggcaagaccttcagtcagatgtcatccctcgtataccatcataggcttcatagtggagagaaaccttacaagtgtaatgaatgtggcaaggtttttaatcaacaagcacaccttgcacagcatcagagagttcatactggagagaaaccttacaagtgtaatgagtgtggcaagaccttcagtcagatgtcaaaccttgtataccatcatagacttcatagtggagagaaaccttagtaatgaactagtccgtaacttgaaagtatttcgatttcttggctttatatatcttgtggaaaggacgaccagccgggcacgccgtttgatat

SEQ ID NO: 1859 - DNA, 8672 bp, Homo sapiens
  source 1..8672: mol_type = genomic DNA
accgccaccatggaggagaaacagcagattatattggctaatcaagatggtggaacagtggcaggagcagcacctaccttctttgtcatcttaaagcagccaggaaatggcaaaactgatcaaggaattttggttactaatcaggatgcctgtgctttggctagtagtgtgtcatcaccagtaaaatctaaagggaagatttgccttccagctgattgtactgtgggtggaatcactgttaccctcgataacaatagtatgtggaatgagttctatcatcgaagcacagagatgattctgaccaagcaaggaagacgcatgtttccttactgtcgttattggataacaggtttagattcaaatttgaagtatattcttgtcatggatatatctcctgtggataaccatcgttataagtggaatggtcgttggtgggaacctagtgggaaggctgaacctcatgttttggggagggttttcattcatccagaatctccttccacaggtcattattggatgcatcaaccagtatctttctataaactcaaacttaccaacaatacactggaccaagaagggcatatcatcttgcactctatgcatcgttacctgccgaggcttcatttggtgcctgcagaaaaggctgtggaggtgatacaattaaatggccctggtgtccacacttttaccttcccacagactgaattctttgcagtaacagcttatcagaacattcagattactcagctgaaaatagattacaatccatttgccaaaggctttcgggatgatgggctgaataataagccccagagagatggaaaacaaaagaacagctctgaccaagaagggaataatatttccagttcttctggtcatcgggtccgtcttacagaaggtcaggggtcagagatacaaccaggtgatttggatcctttgtcaaggggtcatgaaacatcaggcaagggtttggagaagacttcccttaatataaaacgagactttcttggtttcatggatactgattcagcacttagtgaagttcctcaattgaagcaagagatttctgaatgtcttattgccagcagttttgaagatgactcccgtgtagcctcaccgttagaccagaacggaagcttcaatgttgttattaaagaggaacctctagatgattatgactacgaacttggtgagtgcccagaaggggtcactgtgaaacaggaagagacagatgaagagacggatgtatactcaaacagtgatgatgatcctatactagagaaacagctaaagaggcacaataaagttgacaacccagaagctgaccatctatcttctaaatggcttccaagcagcccatcaggtgttgctaaagctaaaatgttcaaattagacactggaaagatgccagtagtctatctggagccctgtgctgtcaccagaagcacagttaagatttctgaactccccgataacatgctttccacatctcgaaaggataaatcttctatgttggcagaattggaatatttgcctacatacattgaaaattccaatgagactgccttctgcttaggcaaggaatcagaaaatggtcttagaaaacattcaccagatctcagagtggtacaaaaatatcccttactgaaagagcctcagtggaaatatcctgatatatctgacagcattagcacagaaagaatactcgacgattcaaaggattcagttggagactcactttcaggaaaagaggacttgggcagaaagagaacaactatgcttaagattgcaacagccgcaaaggtagtgaatgctaatcagaatgcctctccaaatgtccctggaaaaagaggaaggccacgaaaattgaaactctgtaaggcaggacgaccacctaagaacacaggaaagtctttaatttctacaaagaatacacctgtaagccctgggagtacctttccagatgtgaagcctgatctggaagatgtggatggtgttctctttgtttcctttgaatcaaaggaagctctagacattcatgcagttgatgggacaacagaagaatcttctagtctccaggcatcaaccacaaatgactcaggttacagagcaagaatttcccagttggaaaaggaattgatagaagatttgaagactttgcggcacaagcaggtgatacatcctggtcttcaagaagtgggcttaaaattgaattcagtggatccaacaatgagcattgatcttaaatacttgggagtacagttacctttggctccagctactagctttcctttttggaaccttacaggaaccaaccctgcctctcctgatgcgggatttccctttgtttctaggacagggaaaaccaatgatttcactaagatcaagggatggaggggaaaatttcatagtgcttctgcatctaggaatgaaggtggaaattcagaaagttcactgaaaaatcgttctgctttctgtagtgataagctagatgaatacttggaaaatgaaggcaagctgatggaaacaagcatgggtttttcttctaatgctcccacatctcctgtggtgtaccagcttcccactaagagtaccagttatgtacgaacacttgatagtgtactaaagaagcaatctactatttccccttctacctcttattctttgaaacctcattctgtaccccctgtctctcgaaaggcaaagtctcaaaacagacaggcaactttcagtggccgaactaaatcatcttataaatccattttaccataccctgtttcaccaaagcagaaatactctcatgtgattctaggagataaggttaccaagaattcttcaggcatcatctcagaaaatcaggcgaataactttgttgtgccaactttggatgaaaatatatttccaaagcagattagtttgcggcaggcacagcagcagcagcaacagcaacagggaagtcgccctccaggcttgtctaaatctcaggtgaagctaatggacctggaagactgtgcactttgggaaggaaaaccaaggacatacatcacagaagagcgagcagatgtatccttaacaactctacttacagctcaagcatccctcaaaactaaacctatccacacaatcataaggaaacgagcccctccctgcaacaatgacttctgtcgactgggttgtgtatgttccagtctagctttggagaagcgccaacctgctcactgccgccgaccagactgcatgtttggttgtacttgtttgaaaagaaaagttgtacttgttaaaggaggatccaaaactaagcattttcagaggaaggctgctcatcgagatccagtattttatgatactctgggagaggaggcaagggaggaggaagaaggaatcagggaggaggaggaacaattgaaagagaaaaagaagagaaagaagctagaatacactatatgtgagacagagcctgaacagcctgttcgacattacccattatgggtaaaagtagaaggtgaagtagatccagaaccagtttatatccccacgccttctgtcattgagcctatgaaaccattgttattgcctcagccagaagttttatctcctactgtgaagggcaaactgctcactggaattaaatctccacggtcatatactcccaaacccaatcctgtgattcgggaagaggacaaagatccagtctacttgtactttgaaagtatgatgacttgtgctcgagttcgagtatatgagcgaaaaaaagaggaccagagacaaccatcttcctcctcctccccatctccatcatttcagcagcaaacttcatgtcattctagccctgagaaccataataatgcaaaggaacctgattctgaacagcagcccttaaaacaactcacctgtgacttggaggatgattctgataaattacaagaaaagagctggaagtcttcctgcaatgaaggagaatcctcttctacttcttatatgcatcagaggtcacctggtggtcccaccaaactgattgagatcatctcagactgcaactgggaggaagatcggaacaagattttgagcatcttatcccagcacatcaatagcaacatgccacaatcacttaaggtgggcagcttcatcattgagttggcttctcagcgaaagagccggggtgagaagaaccctcctgtttattcttctcgtgtgaaaatctctatgccatcatgtcaagaccaagatgatatggctgagaaatctggatcagagactcctgatggtccattgtcccctgggaaaatggaggatatctctcctgtgcagacagatgccctggattcagtgagggagagattacatggaggcaaaggtctgcctttttatgcagggctttctcctgcagggaagcttgtggcctataaacgtaaacccagttcaagtacatctgggcttatccaggtagcatccaatgccaaggtggctgcatccaggaaaccacgtaccctgttgccttcaacatccaattccaaaatggcatcctcctctggcactgcaacaaatcgccctgggaagaatctgaaggcgtttgtcccagcaaaacggccaattgaaaatgctgctcaaattccagtggctactccacaggtctctcctaacacagtgaaacgtgctggacctcgattgttgttgattccagtgcagcagggttctcctactcttagacctgtctcaaacacacaacttcagggacatcggatggtcttgcagcctgttaggagtccaagtggaatgaacttattcaggcaccctaatgggcagattgtccagcttctacctttgcatcagcttcgaggctctaatacccagcccaacttacagcctgtcatgtttcggaacccagggtctgtgatgggaatccggttacctgctccttccaaaccctctgagactccgccatcttccacttcgtcctctgctttctctgtcatgaatcctgtaattcaagctgttgggtcttcttcagcagtgaatgttatcactcaggcaccatcattgctttcctctggagctagttttgtgtctcaggctggtacattgaccctgaggatttctcctcctgaaccacaaagctttgcaagtaaaacaggctctgaaaccaaaataacttatagctcaggaggacagcctgttggtacagccagtcttattcctctccagtctggtagttttgccttgttacagctcccaggacaaaagcctgttcctagctccattcttcagcatgttgcttcccttcagatgaagagagaatctcagaatccagaccagaaagatgaaacaaactcaataaaaagagagcaagaaacgaagaaggttctacagtcagaaggagaggctgtagaccctgaggctaatgtaataaaacaaaactcaggagctgctacctcagaagaaactctgaatgattccttggaagataggggtgatcatttggatgaagaatgccttccagaagaaggttgtgcaactgtcaaaccatctgagcattcctgtatcactgggtcacatacagatcaagattataaagatgttaatgaagaatatggggctaggaatcgtaagagttccaaagaaaaagtggctgttctggaagttaggaccatttctgaaaaagccagtaataagacagtccaaaatttaagtaaagtacagcatcaaaaacttggtgatgtgaaggtggaacagcagaaaggatttgacaatccagaagaaaactcaagtgaatttccagtcacctttaaggaagaaagtaaatttgaattgtcaggaagcaaagttatggagcagcaatctaatctacagccagaggccaaagagaaggaatgtggagactctctggagaaagacagggaaagatggagaaaacatctgaagggccccttaaccaggaaatgtgttggagcttcacaggaatgtaagaaagaggcagacgagcagttaattaaagaaacaaagacatgtcaggaaaattcagatgtgtttcagcaagaacaaggcatctctgacttacttggaaaaagtggaattactgaagatgccagagttttgaaaactgaatgtgattcttggagtaggatttctaatccttcagccttctccattgttcctaggagagctgcaaaaagcagcagagggaatggacattttcagggtcacttactgctacctggagaacagatacaaccaaagcaagagaagaagggtgggagaagcagtgctgacttcactgttttggatttggaagaagatgatgaagatgataatgagaaaactgatgattctattgatgaaattgtggatgttgtttctgactaccagagtgaggaggttgatgatgtagaaaagaataactgtgtagaatacattgaggatgatgaggagcacgtggacattgagactgtagaagagctctcagaggaaattaatgttgctcacctgaagaccacagcggcccacacacagtcattcaaacagccgtcctgtactcacatctctgcagatgaaaaagcagctgaaaggagtcgaaaggctccaccaattcctctaaaactgaagcctgattactggagtgacaaactacagaaagaagcagaagcgtttgcttattatcgccggacacacactgccaatgagcggcggcggcgtggtgaaatgagggatctctttgagaaattaaagatcacattgggattacttcattcttccaaggtttccaaaagtctcattcttactcgagccttcagtgaaattcagggactaacagatcaggcagacaaattgataggacagaaaaatctcctgactcgaaaacggaatattctgatacggaaagtatcgtctctttcaggtaagacagaagaagtggtcctgaagaagctagagtatatttatgcaaaacagcaagcactagaggcacaaaaaagaaaaaagaagatgggatcagatgagtttgacatatctcccagaattagcaaacagcaggaaggatcttctgcatcatctgtagatcttggacagatgtttataaataacaggagggggaaacctttgattctttccagaaaaaaagaccaggccacagaaaatacctcacccttgaacactccacacacctctgccaaccttgtgatgactccgcaagggcaattgctcaccctaaaaggtcccctattctcaggaccagtggtagctgtttctcctgatctcttagaatctgatcttaagcctcaagttgccggtagtgctgtggctctaccagaaaatgacgacttatttatgatgccacgaattgttaatgtgacatcattggccacagagggaggtttggtagatatgggtggcagcaaatatcctcatgaagttcctgatagcaagccatctgaccatctgaaagacaccgtcaggaatgaagataattccttagaggataagggtagaatctcttccagaggaaacagagatggcagagtgacgttgggtccaacgcaggtttttctggcaaacaaagattctggttatccacaaatagttgacgtttccaatatgcagaaagcacaagagttcttacctaaaaagatttctggtgatatgagagggattcagtataaatggaaagagagtgaatcaagaggggagagagtgaagtcaaaggattcttcatttcataaattaaagatgaaagatctcaaggactcaagcatagagatggaactgaggaaagtaacatcagctatagaggaagcagctcttgattccagtgaactgctgactaacatggaagatgaggatgatactgatgagacactgacttcactgctcaatgaaattgcctttcttaatcaacaactaaatgatgactctgttggcctggctgaactacccagctctatggatacagagttcccaggggatgctcggcgggcttttattagtaaggttcctcctggaagcagagcaactttccaggttgagcacttgggaactggtttgaaagagttgcctgatgttcaaggggagagtgactctatcagtcccctcctcttgcacttggaagacgatgacttttctgagaatgaaaaacaacttgcagaaccagcctctgagccagatgtccttaagattgttattgactctgaaataaaggattccctcctttccaacaagaaagctattgatggagggaagaatacttctggcctccctgcagagcccgaaagtgtgtcctcaccccccaccctacacatgaagactggcttggagaacagcaacagcacagacactttgtggaggcctatgccaaagttggcccctctaggtttaaaagtagctaatccttccagtgatgcagatggtcagagtctcaaggtgatgccttgtttggcacctatagctgccaaagttgggtcagttggacacaaaatgaacttaacagggaatgaccaggaaggccgggaaagcaaggtgatgcctacattggcacctgttgtggctaaattgggcaactcgggggcctcaccaagttctgcagggaaatagtaatgaactagtccgtaacttgaaagtatttcgatttcttggctttatatatcttgtggaaaggacgaacgccgttaatagcaggatttaca

SEQ ID NO: 1860 - DNA, 9299 bp, Homo sapiens
  source 1..9299: mol_type = genomic DNA
accgccaccatggaggagaaacagcagattatattggctaatcaagatggtggaacagtggcaggagcagcacctaccttctttgtcatcttaaagcagccaggaaatggcaaaactgatcaaggaattttggttactaatcaggatgcctgtgctttggctagtagtgtgtcatcaccagtaaaatctaaagggaagatttgccttccagctgattgtactgtgggtggaatcactgttaccctcgataacaatagtatgtggaatgagttctatcatcgaagcacagagatgattctgaccaagcaaggaagacgcatgtttccttactgtcgttattggataacaggtttagattcaaatttgaagtatattcttgtcatggatatatctcctgtggataaccatcgttataagtggaatggtcgttggtgggaacctagtgggaaggctgaacctcatgttttggggagggttttcattcatccagaatctccttccacaggtcattattggatgcatcaaccagtatctttctataaactcaaacttaccaacaatacactggaccaagaagggcatatcatcttgcactctatgcatcgttacctgccgaggcttcatttggtgcctgcagaaaaggctgtggaggtgatacaattaaatggccctggtgtccacacttttaccttcccacagactgaattctttgcagtaacagcttatcagaacattcagattactcagctgaaaatagattacaatccatttgccaaaggctttcgggatgatgggctgaataataagccccagagagatggaaaacaaaagaacagctctgaccaagaagggaataatatttccagttcttctggtcatcgggtccgtcttacagaaggtcaggggtcagagatacaaccaggtgatttggatcctttgtcaaggggtcatgaaacatcaggcaagggtttggagaagacttcccttaatataaaacgagactttcttggtttcatggatactgattcagcacttagtgaagttcctcaattgaagcaagagatttctgaatgtcttattgccagcagttttgaagatgactcccgtgtagcctcaccgttagaccagaacggaagcttcaatgttgttattaaagaggaacctctagatgattatgactacgaacttggtgagtgcccagaaggggtcactgtgaaacaggaagagacagatgaagagacggatgtatactcaaacagtgatgatgatcctatactagagaaacagctaaagaggcacaataaagttgacaacccagaagctgaccatctatcttctaaatggcttccaagcagcccatcaggtgttgctaaagctaaaatgttcaaattagacactggaaagatgccagtagtctatctggagccctgtgctgtcaccagaagcacagttaagatttctgaactccccgataacatgctttccacatctcgaaaggataaatcttctatgttggcagaattggaatatttgcctacatacattgaaaattccaatgagactgccttctgcttaggcaaggaatcagaaaatggtcttagaaaacattcaccagatctcagagtggtacaaaaatatcccttactgaaagagcctcagtggaaatatcctgatatatctgacagcattagcacagaaagaatactcgacgattcaaaggattcagttggagactcactttcaggaaaagaggacttgggcagaaagagaacaactatgcttaagattgcaacagccgcaaaggtagtgaatgctaatcagaatgcctctccaaatgtccctggaaaaagaggaaggccacgaaaattgaaactctgtaaggcaggacgaccacctaagaacacaggaaagtctttaatttctacaaagaatacacctgtaagccctgggagtacctttccagatgtgaagcctgatctggaagatgtggatggtgttctctttgtttcctttgaatcaaaggaagctctagacattcatgcagttgatgggacaacagaagaatcttctagtctccaggcatcaaccacaaatgactcaggttacagagcaagaatttcccagttggaaaaggaattgatagaagatttgaagactttgcggcacaagcaggtgatacatcctggtcttcaagaagtgggcttaaaattgaattcagtggatccaacaatgagcattgatcttaaatacttgggagtacagttacctttggctccagctactagctttcctttttggaaccttacaggaaccaaccctgcctctcctgatgcgggatttccctttgtttctaggacagggaaaaccaatgatttcactaagatcaagggatggaggggaaaatttcatagtgcttctgcatctaggaatgaaggtggaaattcagaaagttcactgaaaaatcgttctgctttctgtagtgataagctagatgaatacttggaaaatgaaggcaagctgatggaaacaagcatgggtttttcttctaatgctcccacatctcctgtggtgtaccagcttcccactaagagtaccagttatgtacgaacacttgatagtgtactaaagaagcaatctactatttccccttctacctcttattctttgaaacctcattctgtaccccctgtctctcgaaaggcaaagtctcaaaacagacaggcaactttcagtggccgaactaaatcatcttataaatccattttaccataccctgtttcaccaaagcagaaatactctcatgtgattctaggagataaggttaccaagaattcttcaggcatcatctcagaaaatcaggcgaataactttgttgtgccaactttggatgaaaatatatttccaaagcagattagtttgcggcaggcacagcagcagcagcaacagcaacagggaagtcgccctccaggcttgtctaaatctcaggtgaagctaatggacctggaagactgtgcactttgggaaggaaaaccaaggacatacatcacagaagagcgagcagatgtatccttaacaactctacttacagctcaagcatccctcaaaactaaacctatccacacaatcataaggaaacgagcccctccctgcaacaatgacttctgtcgactgggttgtgtatgttccagtctagctttggagaagcgccaacctgctcactgccgccgaccagactgcatgtttggttgtacttgtttgaaaagaaaagttgtacttgttaaaggaggatccaaaactaagcattttcagaggaaggctgctcatcgagatccagtattttatgatactctgggagaggaggcaagggaggaggaagaaggaatcagggaggaggaggaacaattgaaagagaaaaagaagagaaagaagctagaatacactatatgtgagacagagcctgaacagcctgttcgacattacccattatgggtaaaagtagaaggtgaagtagatccagaaccagtttatatccccacgccttctgtcattgagcctatgaaaccattgttattgcctcagccagaagttttatctcctactgtgaagggcaaactgctcactggaattaaatctccacggtcatatactcccaaacccaatcctgtgattcgggaagaggacaaagatccagtctacttgtactttgaaagtatgatgacttgtgctcgagttcgagtatatgagcgaaaaaaagaggaccagagacaaccatcttcctcctcctccccatctccatcatttcagcagcaaacttcatgtcattctagccctgagaaccataataatgcaaaggaacctgattctgaacagcagcccttaaaacaactcacctgtgacttggaggatgattctgataaattacaagaaaagagctggaagtcttcctgcaatgaaggagaatcctcttctacttcttatatgcatcagaggtcacctggtggtcccaccaaactgattgagatcatctcagactgcaactgggaggaagatcggaacaagattttgagcatcttatcccagcacatcaatagcaacatgccacaatcacttaaggtgggcagcttcatcattgagttggcttctcagcgaaagagccggggtgagaagaaccctcctgtttattcttctcgtgtgaaaatctctatgccatcatgtcaagaccaagatgatatggctgagaaatctggatcagagactcctgatggtccattgtcccctgggaaaatggaggatatctctcctgtgcagacagatgccctggattcagtgagggagagattacatggaggcaaaggtctgcctttttatgcagggctttctcctgcagggaagcttgtggcctataaacgtaaacccagttcaagtacatctgggcttatccaggtagcatccaatgccaaggtggctgcatccaggaaaccacgtaccctgttgccttcaacatccaattccaaaatggcatcctcctctggcactgcaacaaatcgccctgggaagaatctgaaggcgtttgtcccagcaaaacggccaattgcggctcgaccctctcctggtggtgtgttcacacagtttgtgatgagtaaagttggagccttgcagcagaagatacctggagttagcacaccccaaaccctggcagggacacagaagttcagtatcagaccttctccagtaatggtcgtcacacctgtggtttcttctgagccagttcaggtgtgcagccctgtgactgctgctgtcactactaccacccctcaagtgtttttagaaaatactactgctgtgacacctatgactgctatttctgacgtggaaactaaagaaactacttattcttctggtgccaccactacaggggttgttgaggtctctgaaactaataccagcacctctgtaacatctacccagtctacagccactgtgaaccttaccaaaaccactgggataactacccctgtggcttcagttgcttttcctaagtctttggtagcatctccttcaaccataactcttcctgttgcttccactgcttccacctccttagtcgtggtgactgcagctgcatcttcctccatggtgaccacaccaacttcatctctgggctctgttcctattatactctcaggaattaatgggagtccaccagtgagccagagaccagaaaatgctgctcaaattccagtggctactccacaggtctctcctaacacagtgaaacgtgctggacctcgattgttgttgattccagtgcagcagggttctcctactcttagacctgtctcaaacacacaacttcagggacatcggatggtcttgcagcctgttaggagtccaagtggaatgaacttattcaggcaccctaatgggcagattgtccagcttctacctttgcatcagcttcgaggctctaatacccagcccaacttacagcctgtcatgtttcggaacccagggtctgtgatgggaatccggttacctgctccttccaaaccctctgagactccgccatcttccacttcgtcctctgctttctctgtcatgaatcctgtaattcaagctgttgggtcttcttcagcagtgaatgttatcactcaggcaccatcattgctttcctctggagctagttttgtgtctcaggctggtacattgaccctgaggatttctcctcctgaaccacaaagctttgcaagtaaaacaggctctgaaaccaaaataacttatagctcaggaggacagcctgttggtacagccagtcttattcctctccagtctggtagttttgccttgttacagctcccaggacaaaagcctgttcctagctccattcttcagcatgttgcttcccttcagatgaagagagaatctcagaatccagaccagaaagatgaaacaaactcaataaaaagagagcaagaaacgaagaaggttctacagtcagaaggagaggctgtagaccctgaggctaatgtaataaaacaaaactcaggagctgctacctcagaagaaactctgaatgattccttggaagataggggtgatcatttggatgaagaatgccttccagaagaaggttgtgcaactgtcaaaccatctgagcattcctgtatcactgggtcacatacagatcaagattataaagatgttaatgaagaatatggggctaggaatcgtaagagttccaaagaaaaagtggctgttctggaagttaggaccatttctgaaaaagccagtaataagacagtccaaaatttaagtaaagtacagcatcaaaaacttggtgatgtgaaggtggaacagcagaaaggatttgacaatccagaagaaaactcaagtgaatttccagtcacctttaaggaagaaagtaaatttgaattgtcaggaagcaaagttatggagcagcaatctaatctacagccagaggccaaagagaaggaatgtggagactctctggagaaagacagggaaagatggagaaaacatctgaagggccccttaaccaggaaatgtgttggagcttcacaggaatgtaagaaagaggcagacgagcagttaattaaagaaacaaagacatgtcaggaaaattcagatgtgtttcagcaagaacaaggcatctctgacttacttggaaaaagtggaattactgaagatgccagagttttgaaaactgaatgtgattcttggagtaggatttctaatccttcagccttctccattgttcctaggagagctgcaaaaagcagcagagggaatggacattttcagggtcacttactgctacctggagaacagatacaaccaaagcaagagaagaagggtgggagaagcagtgctgacttcactgttttggatttggaagaagatgatgaagatgataatgagaaaactgatgattctattgatgaaattgtggatgttgtttctgactaccagagtgaggaggttgatgatgtagaaaagaataactgtgtagaatacattgaggatgatgaggagcacgtggacattgagactgtagaagagctctcagaggaaattaatgttgctcacctgaagaccacagcggcccacacacagtcattcaaacagccgtcctgtactcacatctctgcagatgaaaaagcagctgaaaggagtcgaaaggctccaccaattcctctaaaactgaagcctgattactggagtgacaaactacagaaagaagcagaagcgtttgcttattatcgccggacacacactgccaatgagcggcggcggcgtggtgaaatgagggatctctttgagaaattaaagatcacattgggattacttcattcttccaaggtttccaaaagtctcattcttactcgagccttcagtgaaattcagggactaacagatcaggcagacaaattgataggacagaaaaatctcctgactcgaaaacggaatattctgatacggaaagtatcgtctctttcaggtaagacagaagaagtggtcctgaagaagctagagtatatttatgcaaaacagcaagcactagaggcacaaaaaagaaaaaagaagatgggatcagatgagtttgacatatctcccagaattagcaaacagcaggaaggatcttctgcatcatctgtagatcttggacagatgtttataaataacaggagggggaaacctttgattctttccagaaaaaaagaccaggccacagaaaatacctcacccttgaacactccacacacctctgccaaccttgtgatgactccgcaagggcaattgctcaccctaaaaggtcccctattctcaggaccagtggtagctgtttctcctgatctcttagaatctgatcttaagcctcaagttgccggtagtgctgtggctctaccagaaaatgacgacttatttatgatgccacgaattgttaatgtgacatcattggccacagagggaggtttggtagatatgggtggcagcaaatatcctcatgaagttcctgatagcaagccatctgaccatctgaaagacaccgtcaggaatgaagataattccttagaggataagggtagaatctcttccagaggaaacagagatggcagagtgacgttgggtccaacgcaggtttttctggcaaacaaagattctggttatccacaaatagttgacgtttccaatatgcagaaagcacaagagttcttacctaaaaagatttctggtgatatgagagggattcagtataaatggaaagagagtgaatcaagaggggagagagtgaagtcaaaggattcttcatttcataaattaaagatgaaagatctcaaggactcaagcatagagatggaactgaggaaagtaacatcagctatagaggaagcagctcttgattccagtgaactgctgactaacatggaagatgaggatgatactgatgagacactgacttcactgctcaatgaaattgcctttcttaatcaacaactaaatgatgactctgttggcctggctgaactacccagctctatggatacagagttcccaggggatgctcggcgggcttttattagtaaggttcctcctggaagcagagcaactttccaggttgagcacttgggaactggtttgaaagagttgcctgatgttcaaggggagagtgactctatcagtcccctcctcttgcacttggaagacgatgacttttctgagaatgaaaaacaacttgcagaaccagcctctgagccagatgtccttaagattgttattgactctgaaataaaggattccctcctttccaacaagaaagctattgatggagggaagaatacttctggcctccctgcagagcccgaaagtgtgtcctcaccccccaccctacacatgaagactggcttggagaacagcaacagcacagacactttgtggaggcctatgccaaagttggcccctctaggtttaaaagtagctaatccttccagtgatgcagatggtcagagtctcaaggtgatgccttgtttggcacctatagctgccaaagttgggtcagttggacacaaaatgaacttaacagggaatgaccaggaaggccgggaaagcaaggtgatgcctacattggcacctgttgtggctaaattgggcaactcgggggcctcaccaagttctgcagggaaatagtaatgaactagtccgtaacttgaaagtatttcgatttcttggctttatatatcttgtggaaaggacgatgttgcgtatggagttaagagtac

SEQ ID NO: 1861 - DNA, 1121 bp, Homo sapiens
  source 1..1121: mol_type = genomic DNA
accgccaccatggatcagaacaacagcctgccaccttacgctcagggcttggcctcccctcagggtgccatgactcccggaatccctatctttagtccaatgatgccttatggcactggactgaccccacagcctattcagaacaccaatagtctgtctattttggaagagcaacaaaggcagcagcagcaacaacaacagcagcagcagcagcagcagcagcaacagcaacagcagcagcagcagcagcagcagcagcagcagcagcagcagcagcagcagcagcagcaacaggcagtggcagctgcagccgttcagcagtcaacgtcccagcaggcaacacagggaacctcaggccaggcaccacagctcttccactcacagactctcacaactgcacccttgccgggcaccactccactgtatccctcccccatgactcccatgacccccatcactcctgccacgccagcttcggagagttctgggattgtaccgcagctgcaaaatattgtatccacagtgaatcttggttgtaaacttgacctaaagaccattgcacttcgtgcccgaaacgccgaatataatcccaagcggtttgctgcggtaatcatgaggataagagagccacgaaccacggcactgattttcagttctgggaaaatggtgtgcacaggagccaagagtgaagaacagtccagactggcagcaagaaaatatgctagagttgtacagaagttgggttttccagctaagttcttggacttcaagattcagaatatggtggggagctgtgatgtgaagtttcctataaggttagaaggccttgtgctcacccaccaacaatttagtagttatgagccagagttatttcctggtttaatctacagaatgatcaaacccagaattgttctccttatttttgtttctggaaaagttgtattaacaggtgctaaagtcagagcagaaatttatgaagcatttgaaaacatctaccctattctaaagggattcaggaagacgacgtagtaatgaactagtccgtaacttgaaagtatttcgatttcttggctttatatatcttgtggaaaggacgacgaacactactgagaggaatcaca

SEQ ID NO: 1862 - DNA, 1061 bp, Homo sapiens
  source 1..1061: mol_type = genomic DNA
accgccaccatgactcccggaatccctatctttagtccaatgatgccttatggcactggactgaccccacagcctattcagaacaccaatagtctgtctattttggaagagcaacaaaggcagcagcagcaacaacaacagcagcagcagcagcagcagcagcaacagcaacagcagcagcagcagcagcagcagcagcagcagcagcagcagcagcagcagcagcagcaacaggcagtggcagctgcagccgttcagcagtcaacgtcccagcaggcaacacagggaacctcaggccaggcaccacagctcttccactcacagactctcacaactgcacccttgccgggcaccactccactgtatccctcccccatgactcccatgacccccatcactcctgccacgccagcttcggagagttctgggattgtaccgcagctgcaaaatattgtatccacagtgaatcttggttgtaaacttgacctaaagaccattgcacttcgtgcccgaaacgccgaatataatcccaagcggtttgctgcggtaatcatgaggataagagagccacgaaccacggcactgattttcagttctgggaaaatggtgtgcacaggagccaagagtgaagaacagtccagactggcagcaagaaaatatgctagagttgtacagaagttgggttttccagctaagttcttggacttcaagattcagaatatggtggggagctgtgatgtgaagtttcctataaggttagaaggccttgtgctcacccaccaacaatttagtagttatgagccagagttatttcctggtttaatctacagaatgatcaaacccagaattgttctccttatttttgtttctggaaaagttgtattaacaggtgctaaagtcagagcagaaatttatgaagcatttgaaaacatctaccctattctaaagggattcaggaagacgacgtagtaatgaactagtccgtaacttgaaagtatttcgatttcttggctttatatatcttgtggaaaggacgagacgtccatcgcatctggcgaagt

SEQ ID NO: 1863 - DNA, 917 bp, Homo sapiens
  source 1..917: mol_type = genomic DNA
accgccaccatgaattccagccaaatatcactcagaatgaaacatgggagagttaacatgcagaagaaaccttcaaagtgtagtgaatgtgggaagttctttactcagagatcatctcttacccagcaccagaggattcacagaggagagaagccctatgtgtgcagtgaatgtggaagttgtttccgtaaacagtcaaatcttactcaacatctgagaattcataccggagagaaaccttataaatgtaatgaatgtgagaaagcctttcaaacaaaagcaattcttgttcagcatctgagaattcatactggagagaaaccctataaatgcaatgaatgtggaaaagccttttgtcagagcccatcccttattaaacaccagcgaattcatactggagagaaaccatataaatgtacagaatgtggcaaagccttcagtcagagcatatgccttactcgtcatcagagaagtcattctggagataaaccttttaagtgtaatgaatgtgggaaagcctttaatcagagtgcatgtctcatgcagcatcagagaattcattcaggagagaagccctacacatgcactgaatgtggtaaagccttcactcagaactcttcccttgttgaacatgaaaggactcacactggagagaaactttataagtgtagtgagtgtgaaaaaactttccgcaaacaagcacaccttagtgagcattacagaattcatactggagaaaaaccttatgagtgtgttggatgtgggaaatcctttaggcacagttcagcacttcttcgacatcagaggcttcatgctggagagtagtaatgaactagtccgtaacttgaaagtatttcgatttcttggctttatatatcttgtggaaaggacgagtggcctgtgcggacgggtctaac

SEQ ID NO: 1864 - DNA, 1544 bp, Homo sapiens
  source 1..1544: mol_type = genomic DNA
accgccaccatggccactgtccctggcctccagcccctgccaaccttggagcaggacctggaacaggaagagatcctgattgtgaaggtggaggaggacttctgcttggaagaggagccctccgtggagacggaggaccccagccctgagactttccgccagctcttccggctcttctgctaccaggaggtggctgggccccgggaggccctgagccgcctctgggagctgtgctgccgctggctgcggccggagctgcgcaccaaggagcagatcctggagctgctggtgctggagcagttcctgactgtgctgccgggggagatccaggctcgggtacgcgagcagcagccggagagcggtgaggaggccgtggtccttgtggaagggctgcagcggaagcccaggaaacacaggcagcggggctcagagctgctttctgatgacgaggtgcccctcgggatagggggacagttcttaaaacaccaggcagaggctcagccagaggatctgtccctggaggaagaggctcgattctccagccagcagcccccagcccagctgagccacaggccacagaggggcccgctgttgtggccagagagaggccctccagctccccggcatcaggagatggcgtcagcctcgcccttcctttcggcctggtcccaggtgcccgtgaacttggaggacgtggctgtatacctttctggggaggagccaagatgcatggacccagctcagcgggacgcgccgctggagaatgaaggacctgggatccagttggaggacggcggtgatggcagggaggatgccccgttgagaatggagtggtaccgagtgctctcggcacgatgccaggggcctggccacccgctcccaggtcagaggccagccccagtcaggggcttggtcaggcctgatcagccaagaggcggccccccaccaggaagacgggcttcccatggggctgacaagccgtacacctgccccgaatgtggcaaaggcttcagcaagacgtcccacttgaccaagcaccagcgcacacacacgggcgagcggccttacaagtgcctagtctgtgggaagggctttagcgaccgctccaacttcagcacgcaccagagggtgcacacaggcgagaagccctacccgtgccccgagtgtgggaagcgcttcagccagagctccagcctggtcatccaccgcaggacacacagcggggagcggccctatgcctgcacccagtgcgggaagcgcttcaacaacagctcgcacttcagcgcccaccgccggacgcacacaggtgagaagccctacacctgcccggcctgtggccggggcttccgccggggcaccgacctgcacaagcaccagcggacccacatgggggcaggctccttgccgacgctccagccggtggctcctggaggccccggtgccaaagcctagtaatgaactagtccgtaacttgaaagtatttcgatttcttggctttatatatcttgtggaaaggacgaaccgaggatcaaggagcgctcttt

SEQ ID NO: 1865 - DNA, 1427 bp, Homo sapiens
  source 1..1427: mol_type = genomic DNA
accgccaccatggccactgtccctggcctccagcccctgccaaccttggagcaggacctggaacaggaagagatcctgattgtgaaggtggaggaggacttctgcttggaagaggagccctccgtggagacggaggaccccagccctgagactttccgccagctcttccggctcttctgctaccaggaggtggctgggccccgggaggccctgagccgcctctgggagctgtgctgccgctggctgcggccggagctgcgcaccaaggagcagatcctggagctgctggtgctggagcagttcctgactgtgctgccgggggagatccaggctcgggtacgcgagcagcagccggagagcggtgaggaggccgtggtccttgtggaagggctgcagcggaagcccaggaaacacaggcagcggggctcagagctgctttctgatgacgaggtgcccctcgggatagggggacagttcttaaaacaccaggcagaggctcagccagaggatctgtccctggaggaagaggctcgattctccagccagcagcccccagcccagctgagccacaggccacagaggggcccgctgttgtggccagagagaggccctccagctccccggcatcaggagatggcgtcagcctcgcccttcctttcggcctggtcccaggtgcccgtgaacttggaggacgtggctgtatacctttctggggaggagccaagatgcatggacccagctcagcgggacgcgccgctggagaatgaaggacctgggatccagttggaggacggcggtgatggcagggaggatgccccgttgagaatggagtggtaccgagtgctctcggcacgatgccaggggcctggccacccgctcccaggtcagaggccagccccagtcaggggcttggtcaggcctgatcagccaagaggcggccccccaccaggaagacgggcttcccatggggctgacaagccgtacacctgccccgaatgtggcaaaggcttcagcaagacgtcccacttgaccaagcaccagcgcacacacacgggcgagcggccttacaagtgcctagtctgtgggaagggctttagcgaccgctccaacttcagcacgcaccagagggtgcacacaggcgagaagccctacccgtgccccgagtgtgggaagcgcttcagccagagctccagcctggtcatccaccgcaggacacacagcggggagcggccctatgcctgcacccagtgcgggaagcgcttcaacaacagctcgcacttcagcgcccaccgccggacgcacacaggtcacattctgaggtctgggtgcacatagtaatgaactagtccgtaacttgaaagtatttcgatttcttggctttatatatcttgtggaaaggacgagctcttgtgactaacaagtccagt

SEQ ID NO: 1866 - DNA, 1991 bp, Homo sapiens
  source 1..1991: mol_type = genomic DNA
accgccaccatggaatttagcatcaagcagagtcccctttctgttcagagtgttgtaaagtgcataaagatgaagcaggcaccagaaatcctcggcagtgccaacgggaagactccgagctgcgaggtgaaccgcgagtgttctgtgttcctcagcaaagcccagctctccagtagcctgcaggagggggtcatgcagaagtttaacggccacgacgccctgccctttattccagccgacaagctgaaagatcttacttcccgggtgtttaatggagaacccggcgcacacgatgccaaactgcgttttgagtcccaggaaatgaaagggattgggacaccccctaacactacccctatcaaaaatggctctccagaaattaagctgaaaatcaccaaaacatacatgaatgggaagcctctctttgaatcttccatttgtggtgacagtgctgctgatgtgtctcagtcagaagaaaatggacaaaaaccagaaaacaaggcgagaaggaacaggaagaggagcataaaatatgactccttgctggagcagggccttgtcgaagcagctcttgtgtctaagatctcaagtccttcagataaaaagattccagctaagaaagagtcttgtccaaacactggaagagacaaagaccacctgttgaaatacaacgttggtgatttggtgtggtccaaagtgtcgggttacccttggtggccttgcatggtttctgcagatccactccttcacagctataccaaacttaaaggtcagaaaaagagtgcacgccagtatcacgtacagttctttggtgacgccccagaaagagcttggatatttgagaagagcctcgtagcttttgaaggagaaggacagtttgaaaaattatgccaggaaagtgccaagcaggcacccacgaaagctgagaaaattaagctattgaaaccaatttcagggaaattgagggcccagtgggaaatgggcattgttcaagcagaagaagctgcaagcatgtcagtggaggagcggaaagccaagttcacctttctctatgtgggggaccagcttcatctcaaccctcaagtagccaaggaggctggcattgctgcagagtctttgggagaaatggcagaatcctcaggagtcagtgaagaagctgctgaaaaccccaagtctgtgagagaagagtgcattcccatgaagagaaggcggagggccaaactgtgtagctctgcagagaccctggagagtcaccccgacatagggaagagtactcctcaaaagacggcagaggctgaccccagaagaggagtagggtctcctcctgggaggaagaagaccacagtctccatgccacgaagcaggaagggagatgcagcatcccagtttttggtcttctgtcaaaaacacagggatgaggtggtagctgagcacccagatgcttcaggtgaggagattgaagagctgctcaggtcacagtggagtctgctgagtgagaagcagagagcacgctacaacaccaagtttgccctggtggcccctgtccaggctgaagaagactctggtaatgtaaatgggaaaaaaagaaaccacacaaagaggatacaggaccctacagaagatgctgaagctgaggacacacccaggaaaagactcaggacggacaagcacagtcttcggaagagagacacaatcactgacaaaacggccagaacaagctcttacaaggccatggaggcagcctcctcgctcaagagccaggcagcaacgaaaaatctgtctgatgcatgtaaaccactgaagaagcgaaatcgggcttccacggcagcatcttcagctcttgggtttagcaaaagttcatctccttctgcatccttaactgagaatgaggtaaaatagtaatgaactagtccgtaacttgaaagtatttcgatttcttggctttatatatcttgtggaaaggacgacagtactccatctgcgaggatacc

SEQ ID NO: 1867 - DNA, 4199 bp, Homo sapiens
  source 1..4199: mol_type = genomic DNA
accgccaccatggaatttagcatcaagcagagtcccctttctgttcagagtgttgtaaagtgcataaagatgaagcaggcaccagaaatcctcggcagtgccaacgggaagactccgagctgcgaggtgaaccgcgagtgttctgtgttcctcagcaaagcccagctctccagtagcctgcaggagggggtcatgcagaagtttaacggccacgacgccctgccctttattccagccgacaagctgaaagatcttacttcccgggtgtttaatggagaacccggcgcacacgatgccaaactgcgttttgagtcccaggaaatgaaagggattgggacaccccctaacactacccctatcaaaaatggctctccagaaattaagctgaaaatcaccaaaacatacatgaatgggaagcctctctttgaatcttccatttgtggtgacagtgctgctgatgtgtctcagtcagaagaaaatggacaaaaaccagaaaacaaggcgagaaggaacaggaagaggagcataaaatatgactccttgctggagcagggccttgtcgaagcagctcttgtgtctaagatctcaagtccttcagataaaaagattccagctaagaaagagtcttgtccaaacactggaagagacaaagaccacctgttgaaatacaacgttggtgatttggtgtggtccaaagtgtcgggttacccttggtggccttgcatggtttctgcagatccactccttcacagctataccaaacttaaaggtcagaaaaagagtgcacgccagtatcacgtacagttctttggtgacgccccagaaagagcttggatatttgagaagagcctcgtagcttttgaaggagaaggacagtttgaaaaattatgccaggaaagtgccaagcaggcacccacgaaagctgagaaaattaagctattgaaaccaatttcagggaaattgagggcccagtgggaaatgggcattgttcaagcagaagaagctgcaagcatgtcagtggaggagcggaaagccaagttcacctttctctatgtgggggaccagcttcatctcaaccctcaagtagccaaggaggctggcattgctgcagagtctttgggagaaatggcagaatcctcaggagtcagtgaagaagctgctgaaaaccccaagtctgtgagagaagagtgcattcccatgaagagaaggcggagggccaaactgtgtagctctgcagagaccctggagagtcaccccgacatagggaagagtactcctcaaaagacggcagaggctgaccccagaagaggagtagggtctcctcctgggaggaagaagaccacagtctccatgccacgaagcaggaagggagatgcagcatcccagtttttggtcttctgtcaaaaacacagggatgaggtggtagctgagcacccagatgcttcaggtgaggagattgaagagctgctcaggtcacagtggagtctgctgagtgagaagcagagagcacgctacaacaccaagtttgccctggtggcccctgtccaggctgaagaagactctggtaatgtaaatgggaaaaaaagaaaccacacaaagaggatacaggaccctacagaagatgctgaagctgaggacacacccaggaaaagactcaggacggacaagcacagtcttcggaagagagacacaatcactgacaaaacggccagaacaagctcttacaaggccatggaggcagcctcctcgctcaagagccaggcagcaacgaaaaatctgtctgatgcatgtaaaccactgaagaagcgaaatcgggcttccacggcagcatcttcagctcttgggtttagcaaaagttcatctccttctgcatccttaactgagaatgaggtctcggacagcccgggagacgagccctcggagtccccatacgaaagtgcagacgaaacacaaactgaagtatctgtctcatccaaaaagtctgagcgaggagtgactgccaaaaaggagtatgtgtgccagctgtgtgagaagccgggcagcctcctgctctgtgaaggaccctgctgcggagctttccacctcgcctgccttgggctttcccggaggccagaagggaggttcacctgcagcgagtgtgcctcagggattcactcatgtttcgtgtgtaaagagagcaagacagatgttaagcgctgtgtggtaactcagtgtggaaaattttaccatgaggcttgtgtgaaaaaataccctctgactgtatttgagagccgaggtttccgctgccccctccacagctgtgtgagctgccatgcttccaacccttcaaacccaaggccgtcaaaaggtaaaatgatgcggtgtgtccgctgccccgttgcctatcacagcggggatgcttgtctggcagcaggatgctcagtgatcgcctccaacagcatcatctgcactgcccacttcactgctcggaaggggaagcgacaccacgcccacgtcaacgtgagctggtgcttcgtgtgctccaaaggggggagccttctgtgctgtgagtcctgcccagcggccttccaccctgactgcctgaacatcgagatgcctgacggcagctggttctgcaatgactgcagggctgggaagaagctgcacttccaggatatcatttgggtgaaacttgggaactacagatggtggccggcagaagtttgccatcccaaaaatgttcccccaaatattcagaaaatgaagcacgagattggagaattccctgtgtttttctttgggtctaaagattattactggacgcatcaggcgcgagtgttcccgtacatggagggggaccggggcagccgctaccagggggtcagagggatcggaagagtcttcaaaaacgcactgcaagaagctgaagctcgttttcgtgaaattaagcttcagagggaagcccgagaaacacaggagagcgagcgcaagcccccaccatacaagcacatcaaggtgaataagccttacgggaaagtccagatctacacagcggatatttcagaaatccctaagtgcaactgcaagcccacagatgagaatccttgtggctttgattcggagtgtctgaacaggatgctgatgtttgagtgccacccgcaggtgtgtcccgcgggcgagttctgccagaaccagtgcttcaccaagcgccagtacccagagaccaagatcatcaagacagatggcaaagggtggggcctggtcgccaagagggacatcagaaagggagaatttgttaacgagtacgttggggagctgatcgacgaggaggagtgcatggcgagaatcaagcacgcacacgagaacgacatcacccacttctacatgctcactatagacaaggaccgtataatagacgctggccccaaaggaaactactctcgatttatgaatcacagctgccagcccaactgtgagaccctcaagtggacagtgaatggggacactcgtgtgggcctgtttgccgtctgtgacattcctgcagggacggagctgacttttaactacaacctcgattgtctgggcaatgaaaaaacggtctgccggtgtggagcctccaattgcagtggattcctcggggatagaccaaagacctcgacgaccctttcatcagaggaaaagggcaaaaagaccaagaagaaaacgaggcggcgcagagcaaaaggggaagggaagaggcagtcagaggacgagtgcttccgctgcggtgatggcgggcagctggtgctgtgtgaccgcaagttctgcaccaaggcctaccacctgtcctgcctgggccttggcaagcggcccttcgggaagtgggaatgtccttggcatcattgtgacgtgtgtggcaaaccttcgacttcattttgccacctctgccccaattcgttctgtaaggagcaccaggacgggacagccttcagctgcaccccggacgggcggtcctactgctgtgagcatgacttaggggcggcatcggtcagaagcaccaagactgagaagccccccccagagccagggaagccgaaggggaagaggcggcggcggaggggctggcggagagtcacagagggcaaatagtaatgaactagtccgtaacttgaaagtatttcgatttcttggctttatatatcttgtggaaaggacgataatcttagcgtcacttcttggaa

SEQ ID NO: 1868 - DNA, 2045 bp, Homo sapiens
  source 1..2045: mol_type = genomic DNA
accgccaccatggaatttagcatcaagcagagtcccctttctgttcagagtgttgtaaagtgcataaagatgaagcaggcaccagaaatcctcggcagtgccaacgggaagactccgagctgcgaggtgaaccgcgagtgttctgtgttcctcagcaaagcccagctctccagtagcctgcaggagggggtcatgcagaagtttaacggccacgacgccctgccctttattccagccgacaagctgaaagatcttacttcccgggtgtttaatggagaacccggcgcacacgatgccaaactgcgttttgagtcccaggaaatgaaagggattgggacaccccctaacactacccctatcaaaaatggctctccagaaattaagctgaaaatcaccaaaacatacatgaatgggaagcctctctttgaatcttccatttgtggtgacagtgctgctgatgtgtctcagtcagaagaaaatggacaaaaaccagaaaacaaggcgagaaggaacaggaagaggagcataaaatatgactccttgctggagcagggccttgtcgaagcagctcttgtgtctaagatctcaagtccttcagataaaaagattccagctaagaaagagtcttgtccaaacactggaagagacaaagaccacctgttgaaatacaacgttggtgatttggtgtggtccaaagtgtcgggttacccttggtggccttgcatggtttctgcagatccactccttcacagctataccaaacttaaaggtcagaaaaagagtgcacgccagtatcacgtacagttctttggtgacgccccagaaagagcttggatatttgagaagagcctcgtagcttttgaaggagaaggacagtttgaaaaattatgccaggaaagtgccaagcaggcacccacgaaagctgagaaaattaagctattgaaaccaatttcagggaaattgagggcccagtgggaaatgggcattgttcaagcagaagaagctgcaagcatgtcagtggaggagcggaaagccaagttcacctttctctatgtgggggaccagcttcatctcaaccctcaagtagccaaggaggctggcattgctgcagagtctttgggagaaatggcagaatcctcaggagtcagtgaagaagctgctgaaaaccccaagtctgtgagagaagagtgcattcccatgaagagaaggcggagggccaaactgtgtagctctgcagagaccctggagagtcaccccgacatagggaagagtactcctcaaaagacggcagaggctgaccccagaagaggagtagggtctcctcctgggaggaagaagaccacagtctccatgccacgaagcaggaagggagatgcagcatcccagtttttggtcttctgtcaaaaacacagggatgaggtggtagctgagcacccagatgcttcaggtgaggagattgaagagctgctcaggtcacagtggagtctgctgagtgagaagcagagagcacgctacaacaccaagtttgccctggtggcccctgtccaggctgaagaagactctggtaatgtaaatgggaaaaaaagaaaccacacaaagaggatacaggaccctacagaagatgctgaagctgaggacacacccaggaaaagactcaggacggacaagcacagtcttcggaagagagacacaatcactgacaaaacggccagaacaagctcttacaaggccatggaggcagcctcctcgctcaagagccaggcagcaacgaaaaatctgtctgatgcatgtaaaccactgaagaagcgaaatcgggcttccacggcagcatcttcagctcttgggtttagcaaaagttcatctccttctgcatccttaactgagaatgagcttttgtgggagcccacaccagtcaagttggatttgaacccagctgctctgtactgcacttagtaatgaactagtccgtaacttgaaagtatttcgatttcttggctttatatatcttgtggaaaggacgactgcaaggttcagggcggatccct

SEQ ID NO: 1869 - DNA, 2963 bp, Homo sapiens
  source 1..2963: mol_type = genomic DNA
accgccaccatggaagaaagtagcagtgttgccatgttggtgccagatattggggaacaggaagctatactgactgctgaaagtatcatcagtccttcattggaaattgatgaacaaagaaaaactaaaccagatccattaatccatgttatccagaagttaagcaagatagtggaaaatgaaaagtcacaaaaatgtcttttaattgggaagaaacgcccacgttcaagtgctgcaacacactctcttgaaacccaagaactttgtgagattccggctaaagtaatccagtcacctgctgctgatactagaagggctgagatgtcacaaacaaattttacccctgacactcttgcccagaatgaagggaaggctatgtcttatcagtgtagcctttgtaagtttctatcatcatccttttccgtgttaaaagatcatattaagcaacatggtcagcaaaatgaagtgatactgatgtgctcagagtgccatattacatctagaagccaggaggaacttgaagcccacgtggtgaatgaccatgacaatgatgccaatatccacacccaatccaaagcccaacagtgcgtaagcccctccagctctttgtgtcggaaaaccacagaaagaaatgaaaccattccagatatcccagtaagtgtggacaatctacagactcatactgtccaaactgcatctgtggcagaaatgggtaggaggaaatggtatgcatacgaacagtacggcatgtatcgatgcttgttttgtagttatacttgtggccagcagagaatgttgaaaacacacgcttggaaacatgctggggaggttgattgctcctatccaatctttgaaaatgaaaatgaacccctaggcctgctggattcttcagcagctgctgcgcctggtggggtcgatgcagtcgtcattgctattggagagagtgaactgagtatccacaatgggccatcagtgcaagtgcagatttgcagctcagaacagttatcatcttcatctcctttagaacagagtgcagaaagaggagtacacctaagtcagtcagttaccctggaccccaatgaggaagaaatgctagaagtgatttctgatgcagaggagaatctgattcctgatagcctgcttacatcagcacagaaaatcatcagcagcagccccaataaaaaagggcatgttaacgtgatagtggagcgattgccaagtgctgaagaaaccctttcacagaagcgcttcctcatgaacactgaaatggaagaagggaaggacctgagcctgacagaagctcagattgggcgcgaaggaatggatgatgtttatcgtgctgataaatgtactgttgatattgggggattgatcataggctggagcagttcagagaaaaaagacgagttaatgaataaaggcctggctactgatgagaatgccccaccaggccggagaaggacaaattctgagtctcttcgattacactcattagctgcagaagcccttgtcacaatgcctataagagctgcagagttgacaagagccaacctggggcactatggagatataaaccttttagatccagatactagtcaaaggcaagtagatagtacattggcagcgtactcaaaaatgatgtcgccacttaaaaactcttcagatggattaactagtcttaaccaaagcaactccaccttggtagcactcccagagggtaggcaggaattgtcagatgggcaggttaagacaggcatcagcatgtccttactcaccgtcattgaaaaattgagagaaaggacagaccaaaacgcttcagacgatgacattttgaaagagttgcaggacaacgcccagtgccaacccaacagcgatacaagtttgtccggaaacaatgtggtggaatacatcccgaatgctgaacgaccctaccgttgccgcctgtgtcactacacaagtggcaacaagggctacatcaagcagcacttacgagtccatcgacagagacagccttatcagtgtcctatctgcgagcacatagcggacaacagcaaagatttggagagtcacatgatccaccactgtaagacaagaatataccagtgcaagcagtgtgaagaatccttccattataagagtcaattgaggaaccatgagagagaacagcacagtcttccagataccttgtcaatagcaacttctaatgagccaagaatttccagtgatacagctgatggaaaatgtgtccaggaagggaataagtcttcagtccagaaacaatatagatgtgatgtgtgtgattatacaagtacaacatatgttggtgtcagaaaccacaggcgaatccataactctgataagccgtacagatgctctctgtgtgggtatgtgtgtagccatcctccttctttgaagtctcatatgtggaaacatgcaagtgaccaaaattacaactacgaacaagtaaacaaggctattaacgacgcgatttcacaaagtggcagagttctggggaaatcccctggaaagactcaattaaagagcagtgaagagagtgcagatcccgtcactggaagttcagaaaatgcagtgtcatcttcagaactgatgtcccagactcccagtgaagttctgggtaccaacgagaatgagaaactgagccctacaagtaatacctcatatagtttagaaaaaatctccagtctggcccctcctagcatggagtactgcgttttactcttctgctgttgtatttgtggttttgaatcaaccagcaaagaaaacctcttggatcatatgaaagagcacgagggtgaaattgtaaacatcatcctgaataaggaccacaatacagctctaaacacaaattagtaatgaactagtccgtaacttgaaagtatttcgatttcttggctttatatatcttgtggaaaggacgaggtacctctgaagtcaaggacagg

SEQ ID NO: 1870 - DNA, 1436 bp, Homo sapiens
  source 1..1436: mol_type = genomic DNA
accgccaccatgggaccattgcaatttagagatgtggccatagaattctctctggaggagtggcattgcctggacgctgcacagcggaatctatatagggatgtgatgttagagaactacagaaacctgatcttccttggtattgttgtctctaaaccaaacctgatcacctgtctggagcaaggaaaaaaacctttaactatgaagaggcatgagatgattgccaaacccccagttatgtattctcattttgcccaagacctttggtcagagcagagcataaaagattctttccaaaaagtgatactaagaagatatgaaaaatgtagacatgacaatttacagttaaaaaaaggctgtgaaagtgtagatgagtgtccagtgcacaaaagaggttataatggacttaaacaatgtttggcaactacccagagaaaaatatttcaatgtgatgaatatgtgaaattcttgcataaattttcaaattcaaacaaacataagataagagatactggaaaaaaatcttttaaatgtatagaatatgggaaaacttttaaccagtcttcaacccgtactacatataagaaaattgatgctggagagaaacgctataaatgtgaagaatgtggtaaagcctataagcagtcctcacaccttactacacataagaaaattcatactggagagaaaccctacaaatgtgaagaatgtggcaaagcctataagcagtcctgtaaccttactacacataagataattcatactggagagaaaccctacagatgtagagaatgtggcaaagcttttaaccaccctgcaacccttttttcacataagaaaattcatactggagagaaaccatacaagtgtgataaatgtggcaaagcctttatttcatcctcaacccttactaaacatgagataattcatactggagagaaaccctacaaatgtgaggaatgtggcaaagcttttaaccgttcctcaaaccttactaaacataagagaattcatactggagatgtaccctacaaatgtgacgaatgtggcaaaacctttacctggtactcaagcctctctaaacataagagagctcatactggagagaaaccctacaagtgtgaagaatgtggcaaagcctttactgcattctcaactctaactgaacataagataattcatactggagagaaaccgtacaaatgtgaagaatgtggcaaagcttttaactggtcctcagcccttaataaacataagaaaattcatattagacagaaaccctgcatagtgaagaatgtggaaaatcttttaaatgttcctcaacccttaataagcataagatagtaatgaactagtccgtaacttgaaagtatttcgatttcttggctttatatatcttgtggaaaggacgactctgagtccttcgaccgaaatta

SEQ ID NO: 1871 - DNA, 1340 bp, Homo sapiens
  source 1..1340: mol_type = genomic DNA
accgccaccatgggaccattgcaatttagagatgtggccatagaattctctctggaggagtggcattgcctggacgctgcacagcggaatctatatagggatgtgatgttagagaactacagaaacctgatcttccttgttatgtattctcattttgcccaagacctttggtcagagcagagcataaaagattctttccaaaaagtgatactaagaagatatgaaaaatgtagacatgacaatttacagttaaaaaaaggctgtgaaagtgtagatgagtgtccagtgcacaaaagaggttataatggacttaaacaatgtttggcaactacccagagaaaaatatttcaatgtgatgaatatgtgaaattcttgcataaattttcaaattcaaacaaacataagataagagatactggaaaaaaatcttttaaatgtatagaatatgggaaaacttttaaccagtcttcaacccgtactacatataagaaaattgatgctggagagaaacgctataaatgtgaagaatgtggtaaagcctataagcagtcctcacaccttactacacataagaaaattcatactggagagaaaccctacaaatgtgaagaatgtggcaaagcctataagcagtcctgtaaccttactacacataagataattcatactggagagaaaccctacagatgtagagaatgtggcaaagcttttaaccaccctgcaacccttttttcacataagaaaattcatactggagagaaaccatacaagtgtgataaatgtggcaaagcctttatttcatcctcaacccttactaaacatgagataattcatactggagagaaaccctacaaatgtgaggaatgtggcaaagcttttaaccgttcctcaaaccttactaaacataagagaattcatactggagatgtaccctacaaatgtgacgaatgtggcaaaacctttacctggtactcaagcctctctaaacataagagagctcatactggagagaaaccctacaagtgtgaagaatgtggcaaagcctttactgcattctcaactctaactgaacataagataattcatactggagagaaaccgtacaaatgtgaagaatgtggcaaagcttttaactggtcctcagcccttaataaacataagaaaattcatattagacagaaaccctgcatagtgaagaatgtggaaaatcttttaaatgttcctcaacccttaataagcataagatagtaatgaactagtccgtaacttgaaagtatttcgatttcttggctttatatatcttgtggaaaggacgagtcggacgtaccgtcaggatgaac

SEQ ID NO: 1872 - DNA, 1478 bp, Homo sapiens
  source 1..1478: mol_type = genomic DNA
accgccaccatggccagtacaattactggaagtcaggattgtattgtgaatcatcgaggggaagtggatggggagcctgaactagatatttccccttgtcaacagtggggagaagcatcttctcctatttccagaaacagggacagtgtgatgactcttcaaagtggttgtttcgaaaacattgaaagtgaaacatatttgcctttgaaagtctcaagccaaatagacacacaagactcttcagtgaagttctgtaagaatgagcctcaggatcatcaggaaagcagacgtctctttgtaatggaagaaagcactgagagaaaagtgataaagggggaaagttgttcagagaaccttcaagttaaactggtgtctgatggacaagaactggcctcgccattgttaaatggtgaggcaacttgccagaatggccagttaaaagaatctttggatcccattgactgtaactgcaaagacattcatggatggaaatcacaggtggtcagttgtagtcagcagagagctcatacagaggagaaaccctgtgaccataataactgtgggaaaatacttaacaccagcccagatggtcatccatatgagaaaatccacactgcagagaaacaatacgaatgtagtcagtgtggtaagaacttcagtcaaagctcagagctactacttcatcagagagaccacacagaagaaaaaccctacaaatgtgagcaatgtgggaagggcttcacaaggagctcgagtctgcttatccatcaggcagtccacacagatgagaagccttataagtgtgacaagtgtgggaagggcttcaccaggagctcaagtctgctcatccatcatgccgtccatacaggcgaaaaaccttataaatgtgacaagtgtgggaagggctttagtcagagctccaaactgcacatccaccagcgagtccacactggagagaagccctatgagtgtgaggagtgtggtatgagcttcagtcagcgctcaaacctgcacatccaccagcgagtacacacaggagagaggccctacaagtgtggtgagtgtgggaagggcttcagtcagagctcgaaccttcacattcaccggtgcatccacacaggagagaagccttaccaatgctatgagtgtgggaagggtttcagccagagctcggatcttcgcatccatctcagagtccacactggagagaagccctatcactgtggcaagtgtgggaagggatttagccagagttccaaactcctcatccaccagagagtacatactggagagaagccctatgagtgcagcaagtgtgggaagggcttcagccagagctccaaccttcacatccaccagcgggttcacaagaaagatcctcgctagtaatgaactagtccgtaacttgaaagtatttcgatttcttggctttatatatcttgtggaaaggacgattggatctcgacggacacgactgt

SEQ ID NO: 1873 - DNA, 5645 bp, Homo sapiens
  source 1..5645: mol_type = genomic DNA
accgccaccatgccgcggggccgccccccgaagcccagggagagcaaggcgcgcggcgactccgatggagttttaacattgaatgcggagaacactaattatgcctatcaagttccaaacttccataaatgtgaaatctgtctactatcttttccaaaagaatcccagtttcaacgccacatgagggatcacgagcgaaatgacaagccacatcgatgtgaccagtgcccccaaacatttaatgttgaattcaacctgacacttcataaatgcacccacagcggggaagatcctacctgccctgtgtgtaacaagaaattctccagagtggctagtctcaaagcgcatattatgctacatgaaaaggaagagaatctcatctgttctgagtgtggggatgagtttactctgcagagtcagctggccgtgcacatggaggagcaccgccaggagctggctggaacccggcagcatgcctgcaaggcctgcaagaaagagttcgagacctcctcggagctgaaggaacacatgaagactcattacaaaattagggtatcaagtacaaggtcttataaccggaatatcgacagaagtggattcacgtattcgtgtccgcactgtggaaagacgtttcaaaagccaagccagttaacgcgacacattaggatacacacaggtgaaaggccgttcaaatgtagtgaatgtggaaaggcttttaaccagaagggggcactgcagacccacatgatcaagcacacaggtgaaaaaccccatgcctgtgccttctgtcctgccgccttctctcagaaagggaatcttcagtcgcacgtgcagcgagtccactcagaggtcaagaatggtcctacctataactgtacagaatgtagttgtgtatttaaaagtttaggcagcttaaacacgcatatcagcaagatgcatatgggtgggccacagaattcaacaagttctacagagactgctcatgttttaacggccacactttttcagacgttacctcttcaacagacggaagcccaagccacgtcggcctcaagccagccgagctcccaggcggtgagcgacgtcatccagcagctcctggagctctcagagccggcgccggtggagtcggggcagtccccgcagcctgggcagcagctgagcatcacagtgggcatcaaccaggacattttacagcaagccttagaaaacagtgggctgtcttcaattccagctgcagcacatcctaatgactcctgccatgccaagacctctgcaccacacgctcaaaacccagatgtttccagcgtttcaaatgagcagacggaccccacagacgcagagcaagaaaaagaacaggaaagcccggagaaactggataaaaaagaaaaaaaaatgataaagaagaagtcaccgtttctacctggctccatccgcgaggagaacggcgtgcgctggcatgtgtgtccctactgcgccaaggagttccgcaagcccagcgacctggtccgccacatccgcatccacacccacgagaagcccttcaagtgcccgcagtgcttccgcgccttcgccgtgaagagcacgctgacagcgcacatcaagacgcacaccggcatcaaggcgttcaagtgccagtactgcatgaagagcttctccacctctggcagcctcaaggtgcacattcgcctgcacacaggagttagaccttttgcttgtcctcactgtgacaaaaaatttcgaacctcaggccataggaagactcacattgcttcccactttaaacatacggaattaaggaaaatgaggcaccagcgtaaacctgcaaaggtccgtgttggcaagacgaatattccagtccctgatattcctttgcaggaaccaatcctcataactgacttaggtctcatccagcccattccaaaaaaccagtttttccaaagctatttcaataataattttgtcaatgaagcagatagaccatacaagtgtttttactgtcatcgtgcatataaaaaatcttgccaccttaaacaacacatcagatcccatacaggtgaaaaaccttttaaatgttctcagtgtggaagaggctttgtttctgcaggcgtgctcaaagcacacatcagaacacacacaggactgaaatctttcaagtgtctgatatgtaatggggctttcactactggtggcagcttacggcgacacatgggtatccacaacgaccttcgtccctatatgtgtccctattgccaaaaaacatttaagacttcactaaattgcaaaaagcacatgaaaacccacagatatgagcttgcccagcagctccaacagcatcagcaggcagcctcgatagatgacagcactgtagaccagcagagcatgcaggcctccactcaaatgcaggtggagatcgagagcgacgagctgccgcagacggcagaggtggtcgcagcgaaccccgaggccatgctggacctggagcctcagcatgtggtgggcacggaggaagcagggctgggccagcagttggcagatcagcccctggaagcagatgaagatgggtttgtggctccacaggaccctctgcgagggcacgtagaccagtttgaagagcagagccctgcgcaacagtccttcgaaccagcagggctaccccaaggttttacagtgactgatacgtaccatcagcagcctcagtttccacctgtccaacagctacaggattccagcacacttgagtctcaggccctctccacaagcttccaccagcagagcttgctgcaggctcccagctctgatgggatgaatgtaacaactcgcttgattcaggagtcatcccaagaggaactggacctgcaggcacaaggttcccagtttctggaggacaacgaggaccagagcaggcgctcttacaggtgtgactattgcaacaaaggctttaagaagtccagccacctgaagcagcatgtgcggtcgcacaccggggaaaagccctacaagtgcaagctctgtggacgcggctttgtttcctctggggtcctcaagtcccacgagaagacacacacaggagtgaaggcgttcagctgcagtgtgtgcaatgcttccttcaccaccaatggcagcctcacccggcacatggccacacatatgagcatgaagccttataagtgtccgttttgtgaggagggtttccgaactacagtgcattgtaaaaagcacatgaagagacaccaaacagtcccctctgctgtgtcagccactggagagacagaaggaggagacatttgtatggaggaagaggaagaacattctgacagaaatgcatcacggaagtctcgtcctgaggtcatcactttcacggaggaggagacagcccagttagccaagatccggccgcaggagagcgccacggtgtcagagaaggtcctggtgcagtccgcggcagaaaaggaccgcatcagtgagctgagggacaagcaggcggagctgcaggacgagcccaagcacgccaactgctgcacatactgccccaagagcttcaagaaacctagcgacctggtgaggcatgttcgaatccatactggagaaaagccatacaaatgtgatgaatgtggaaagagttttactgtgaaatccactctcgattgtcatgtgaagactcacacaggtcagaagctcttcagctgtcacgtctgcagcaacgccttctccacgaagggaagtctgaaggtccacatgcgcctgcacacgggagccaagcccttcaaatgcccgcattgcgagctgcgtttccgtacctcgggtagaagaaagacacacatgcagtttcattataaaccagacccaaagaaggccagaaagcctatgactcgaagctcatcggaaggactgcagcctgtaaacctcctcaactcctcctctactgacccaaacgtgtttatcatgaacaactctgttctaacaggacagtttgatcagaatctgctgcaaccaggactggtgggccaagctattctccctgcctctgtgtcagctgggggtgacctgaccgtgtctctgacagatgggagcctggctaccctagaaggcatccagttacagttggctgctaacttggttggaccaaatgtacagatttctggaatcgatgctgccagcattaataacattacgttgcagattgatccaagcattctgcagcagacgctacagcagggcaacctattggctcagcagctcacgggggagcctggcctggccccacagaacagctctctccagacatcggacagcacggtccctgccagtgttgtcatccagcccatctcaggcctgtccttacagcccacagtgacctctgcgaacctgaccataggcccgctgtctgagcaggattcagtgctgaccactaacagcagtgggacccaagacctcactcaagtgatgacttcgcaaggtctagtgtccccctccggcggtccccacgagatcaccctgaccattaacaactccagcctgagccaggtcctggcacaggccgctgggcccactgccacgtcttcctcggggtctccacaggaaattaccctgactatctccgaacttaacactacaagcggaagccttccttcaacaacaccgatgtctccatcggccatctcgactcagaacctggtcatgtcctcgtcgggcgtgggaggtgacgctagtgtcacgctgacgctggccgatactcagggtatgctatctggaggcctggacactgtcacactcaacatcacctctcagggtcagcagttcccagcgctcctcacggatccctctctctcgggccagggtggagcaggctcgccgcaagtcatactagtgagccacacgccacagtcagcgtctgctgcttgtgaagaaatagcctaccaggtagctggcgtctctgggaacctggccccgggcaaccagccagagaaggagggccgggcgcaccagtgcctggagtgtgaccgcgccttctcatcggcggcggtgctcatgcaccacagcaaggaggtgcatggccgggagcgcatccacggctgccccgtgtgcaggaaggccttcaagcgcgccacgcacctcaaggagcacatgcagacacaccaggccggcccctctttgagctcccagaagccaagagtgtttaaatgtgacacttgtgagaaggcatttgccaaaccaagccagctggagcgccacagccgcatacatacaggggagcggccgttccattgcacgctttgtgagaaagccttcaaccagaagagtgcgctgcaggtgcacatgaagaagcacacgggggagcggccctacaagtgtgcctactgcgtcatgggcttcacgcagaagagcaacatgaagctgcacatgaagcgggcgcacagctatgctggagctctgcaggagtctgcaggtcacccggagcaggacggggaggagctgagccggaccctccacctggaggaggtggtgcaggaggccgccggcgagtggcaggccctcacccacgtcttctagtaatgaactagtccgtaacttgaaagtatttcgatttcttggctttatatatcttgtggaaaggacgagtgcctacccactagaagaactac

SEQ ID NO: 1874 - DNA, 5639 bp, Homo sapiens
  source 1..5639: mol_type = genomic DNA
accgccaccatgggcctttgtgggctgctggagagatgttggctgcaccatgacccagatggagttttaacattgaatgcggagaacactaattatgcctatcaagttccaaacttccataaatgtgaaatctgtctactatcttttccaaaagaatcccagtttcaacgccacatgagggatcacgagcgaaatgacaagccacatcgatgtgaccagtgcccccaaacatttaatgttgaattcaacctgacacttcataaatgcacccacagcggggaagatcctacctgccctgtgtgtaacaagaaattctccagagtggctagtctcaaagcgcatattatgctacatgaaaaggaagagaatctcatctgttctgagtgtggggatgagtttactctgcagagtcagctggccgtgcacatggaggagcaccgccaggagctggctggaacccggcagcatgcctgcaaggcctgcaagaaagagttcgagacctcctcggagctgaaggaacacatgaagactcattacaaaattagggtatcaagtacaaggtcttataaccggaatatcgacagaagtggattcacgtattcgtgtccgcactgtggaaagacgtttcaaaagccaagccagttaacgcgacacattaggatacacacaggtgaaaggccgttcaaatgtagtgaatgtggaaaggcttttaaccagaagggggcactgcagacccacatgatcaagcacacaggtgaaaaaccccatgcctgtgccttctgtcctgccgccttctctcagaaagggaatcttcagtcgcacgtgcagcgagtccactcagaggtcaagaatggtcctacctataactgtacagaatgtagttgtgtatttaaaagtttaggcagcttaaacacgcatatcagcaagatgcatatgggtgggccacagaattcaacaagttctacagagactgctcatgttttaacggccacactttttcagacgttacctcttcaacagacggaagcccaagccacgtcggcctcaagccagccgagctcccaggcggtgagcgacgtcatccagcagctcctggagctctcagagccggcgccggtggagtcggggcagtccccgcagcctgggcagcagctgagcatcacagtgggcatcaaccaggacattttacagcaagccttagaaaacagtgggctgtcttcaattccagctgcagcacatcctaatgactcctgccatgccaagacctctgcaccacacgctcaaaacccagatgtttccagcgtttcaaatgagcagacggaccccacagacgcagagcaagaaaaagaacaggaaagcccggagaaactggataaaaaagaaaaaaaaatgataaagaagaagtcaccgtttctacctggctccatccgcgaggagaacggcgtgcgctggcatgtgtgtccctactgcgccaaggagttccgcaagcccagcgacctggtccgccacatccgcatccacacccacgagaagcccttcaagtgcccgcagtgcttccgcgccttcgccgtgaagagcacgctgacagcgcacatcaagacgcacaccggcatcaaggcgttcaagtgccagtactgcatgaagagcttctccacctctggcagcctcaaggtgcacattcgcctgcacacaggagttagaccttttgcttgtcctcactgtgacaaaaaatttcgaacctcaggccataggaagactcacattgcttcccactttaaacatacggaattaaggaaaatgaggcaccagcgtaaacctgcaaaggtccgtgttggcaagacgaatattccagtccctgatattcctttgcaggaaccaatcctcataactgacttaggtctcatccagcccattccaaaaaaccagtttttccaaagctatttcaataataattttgtcaatgaagcagatagaccatacaagtgtttttactgtcatcgtgcatataaaaaatcttgccaccttaaacaacacatcagatcccatacaggtgaaaaaccttttaaatgttctcagtgtggaagaggctttgtttctgcaggcgtgctcaaagcacacatcagaacacacacaggactgaaatctttcaagtgtctgatatgtaatggggctttcactactggtggcagcttacggcgacacatgggtatccacaacgaccttcgtccctatatgtgtccctattgccaaaaaacatttaagacttcactaaattgcaaaaagcacatgaaaacccacagatatgagcttgcccagcagctccaacagcatcagcaggcagcctcgatagatgacagcactgtagaccagcagagcatgcaggcctccactcaaatgcaggtggagatcgagagcgacgagctgccgcagacggcagaggtggtcgcagcgaaccccgaggccatgctggacctggagcctcagcatgtggtgggcacggaggaagcagggctgggccagcagttggcagatcagcccctggaagcagatgaagatgggtttgtggctccacaggaccctctgcgagggcacgtagaccagtttgaagagcagagccctgcgcaacagtccttcgaaccagcagggctaccccaaggttttacagtgactgatacgtaccatcagcagcctcagtttccacctgtccaacagctacaggattccagcacacttgagtctcaggccctctccacaagcttccaccagcagagcttgctgcaggctcccagctctgatgggatgaatgtaacaactcgcttgattcaggagtcatcccaagaggaactggacctgcaggcacaaggttcccagtttctggaggacaacgaggaccagagcaggcgctcttacaggtgtgactattgcaacaaaggctttaagaagtccagccacctgaagcagcatgtgcggtcgcacaccggggaaaagccctacaagtgcaagctctgtggacgcggctttgtttcctctggggtcctcaagtcccacgagaagacacacacaggagtgaaggcgttcagctgcagtgtgtgcaatgcttccttcaccaccaatggcagcctcacccggcacatggccacacatatgagcatgaagccttataagtgtccgttttgtgaggagggtttccgaactacagtgcattgtaaaaagcacatgaagagacaccaaacagtcccctctgctgtgtcagccactggagagacagaaggaggagacatttgtatggaggaagaggaagaacattctgacagaaatgcatcacggaagtctcgtcctgaggtcatcactttcacggaggaggagacagcccagttagccaagatccggccgcaggagagcgccacggtgtcagagaaggtcctggtgcagtccgcggcagaaaaggaccgcatcagtgagctgagggacaagcaggcggagctgcaggacgagcccaagcacgccaactgctgcacatactgccccaagagcttcaagaaacctagcgacctggtgaggcatgttcgaatccatactggagaaaagccatacaaatgtgatgaatgtggaaagagttttactgtgaaatccactctcgattgtcatgtgaagactcacacaggtcagaagctcttcagctgtcacgtctgcagcaacgccttctccacgaagggaagtctgaaggtccacatgcgcctgcacacgggagccaagcccttcaaatgcccgcattgcgagctgcgtttccgtacctcgggtagaagaaagacacacatgcagtttcattataaaccagacccaaagaaggccagaaagcctatgactcgaagctcatcggaaggactgcagcctgtaaacctcctcaactcctcctctactgacccaaacgtgtttatcatgaacaactctgttctaacaggacagtttgatcagaatctgctgcaaccaggactggtgggccaagctattctccctgcctctgtgtcagctgggggtgacctgaccgtgtctctgacagatgggagcctggctaccctagaaggcatccagttacagttggctgctaacttggttggaccaaatgtacagatttctggaatcgatgctgccagcattaataacattacgttgcagattgatccaagcattctgcagcagacgctacagcagggcaacctattggctcagcagctcacgggggagcctggcctggccccacagaacagctctctccagacatcggacagcacggtccctgccagtgttgtcatccagcccatctcaggcctgtccttacagcccacagtgacctctgcgaacctgaccataggcccgctgtctgagcaggattcagtgctgaccactaacagcagtgggacccaagacctcactcaagtgatgacttcgcaaggtctagtgtccccctccggcggtccccacgagatcaccctgaccattaacaactccagcctgagccaggtcctggcacaggccgctgggcccactgccacgtcttcctcggggtctccacaggaaattaccctgactatctccgaacttaacactacaagcggaagccttccttcaacaacaccgatgtctccatcggccatctcgactcagaacctggtcatgtcctcgtcgggcgtgggaggtgacgctagtgtcacgctgacgctggccgatactcagggtatgctatctggaggcctggacactgtcacactcaacatcacctctcagggtcagcagttcccagcgctcctcacggatccctctctctcgggccagggtggagcaggctcgccgcaagtcatactagtgagccacacgccacagtcagcgtctgctgcttgtgaagaaatagcctaccaggtagctggcgtctctgggaacctggccccgggcaaccagccagagaaggagggccgggcgcaccagtgcctggagtgtgaccgcgccttctcatcggcggcggtgctcatgcaccacagcaaggaggtgcatggccgggagcgcatccacggctgccccgtgtgcaggaaggccttcaagcgcgccacgcacctcaaggagcacatgcagacacaccaggccggcccctctttgagctcccagaagccaagagtgtttaaatgtgacacttgtgagaaggcatttgccaaaccaagccagctggagcgccacagccgcatacatacaggggagcggccgttccattgcacgctttgtgagaaagccttcaaccagaagagtgcgctgcaggtgcacatgaagaagcacacgggggagcggccctacaagtgtgcctactgcgtcatgggcttcacgcagaagagcaacatgaagctgcacatgaagcgggcgcacagctatgctggagctctgcaggagtctgcaggtcacccggagcaggacggggaggagctgagccggaccctccacctggaggaggtggtgcaggaggccgccggcgagtggcaggccctcacccacgtcttctagtaatgaactagtccgtaacttgaaagtatttcgatttcttggctttatatatcttgtggaaaggacgacatgtggccatgaggatttgcgat

SEQ ID NO: 1875 - DNA, 2318 bp, Homo sapiens
  source 1..2318: mol_type = genomic DNA
accgccaccatgaccaagttccaggaggcagtgacattcaaggatgtggctgtggccttcactgaggaggagctggggctgctggactctgcccagaggaagctgtaccgagatgtgatgctggagaactttaggaacctggtttcagtgggacatcagtccttcaaaccagatatgatatcccagttggagagggaagaaaagctttggatgaaggagcttcaaacccaaagaggtaagcattcaggagacaggaatcaaaatgagatggcaactcttcacaaagcaggattaaggtgcttttcactgggagagctttcatgctggcaaatcaagagacacattgcgagcaaattagccagaagtcaagactccatgataaatattgaaggaaagagctctcagttccccaagcaccatgattccccctgtcaagtgggagcaggagaatctattcaagcttctgtggatgacaactgtctagtgaatcacataggggatcattccagtatcattgaaaatcaagaatttccaactgggaaagttccgaattcttggagtaaaatatatctgaatgagacacagaattatcagagaagttgtaagcagactcagatgaaaaacaaactatgtatatttgctccatatgttgacattttcagttgtatttcacaccaccatgatgataatatagtgcacaaaagagataaagttcatagcaatagtgattgtggtaaagataccctaaaggtatcacctcttacccagcgtagtattcacacaggacagaaaacctaccagggtaatgaatgtgaagaagccttcaatgatagctccagtcttgaacttcataaacaggtacacttgggaaagaagtctccagcgtgtagtacacatgagaaggacaccagttatagctcaggtattcctgttcaacaaagtgttcgtactgggaaaaaacgctattggtgtcatgaatgtggtaaaggtttcagtcagagctcaaatctgcaaactcatcagagagtccacacaggggagaaaccctatacatgccacgagtgtggtaagagctttaatcagagctcacatctttatgctcatttgcctattcacacaggagagaagccctatagatgtgacagttgtgggaagggcttcagtcgtagcacagatcttaacattcattgcagagttcacactggagagaaaccttataaatgtgaggtgtgtgggaagggcttcactcagagatcacatcttcaggcccatgaaagaattcacactggagagaaaccatataaatgtggggattgtggtaaacgctttagttgtagctcaaatcttcatacccatcagagagtccacactgaagaaaaaccatacaaatgtgatgagtgtggtaagtgctttagtttgagctttaatcttcatagtcatcaacgagtccacacaggagaaaaaccatataaatgtgaagagtgtggtaagggttttagttcagcctcaagtttccagagccatcagagggtccatacaggagagaaaccatttcgatgcaacgtgtgtgggaaaggcttcagtcagagttcatactttcaagcacatcagagagtccacactggagaaaaaccatacaaatgtgaagtgtgtgggaagcgcttcaattggagcttgaatcttcacaatcatcagagagtccacaccggagagaaaccctacaaatgtgaagagtgtggtaagggtttcagtcaggcttcaaatcttcaagcccatcagagcgtccacactggggaaaaaccattcaagtgtgatgcatgtcagaagcgattcagtcaggcctcacaccttcaagcccatcagagagtccacaccggagagaaaccatataaatgtgacacttgtggtaaggccttcagccagaggtcaaatcttcaagtccatcagataattcacactggagagaaaccatttaaatgtgaggaatgtgggaaagaattcagttggagtgctggtctcagtgcccatcagagggtccacacaggagagaaaccctatacgtgtcagcagtgtgggaagggcttcagtcaggcctcacattttcacacacaccagagagtccacactggagagaggccttacatatgtgatgtctgttgtaagggcttcagtcagaggtcacatctcatctaccatcagagagtccacactggagggaatctgtagtaatgaactagtccgtaacttgaaagtatttcgatttcttggctttatatatcttgtggaaaggacgataactaacccgatcattggagtcc

SEQ ID NO: 1876 - DNA, 2204 bp, Homo sapiens
  source 1..2204: mol_type = genomic DNA
accgccaccatgaccacattcaaggagggactgaccttcaaggatgtggctgtggtcttcactgaggaggagctggggctgctggaccctgtccagaggaatctgtaccaagatgtgatgctggagaacttcaggaacctgctgtcagtggggcatcaccccttcaaacatgatgtattccttttagaaaaggaaaaaaagcttgatataatgaagacagcaactcaaagaaaagggaaatcagcagacaagatccaaagtgaggtggagactgttccagaagcaggacgacatgaagagctttactgggggcaaatctggaaacagattgcaagtgatttaatcaagtatgaagactctatgataagtatttctcggttccccagacaaggtgatttgtcctgccaggttagggcaggactatatacaactcacacaggacagaaattttaccaatgtgatgagtacaaaaaatccttcactgatgtcttcaactttgatcttcatcaacagttacactcaggagagaagtctcatacatgtgatgagtgtggaaaaagcttctgttacatctcagcccttcatattcatcaaagagtccacatgggagagaaatgctataagtgtgacgtgtgtggtaaggaatttagtcagagctcacatcttcaaactcatcagagagtccacactgtagagaaaccattcaaatgtgtggaatgtgggaaaggcttcagtcgtagatcaacacttactgtacattgcaaattacactcaggagagaaaccttacaattgtgaggaatgtggaagggccttcatacatgcttcccatcttcaggaacatcagagaattcatactggggagaaaccattcaaatgtgatacatgtggtaagaacttccgtcgtagatcagcacttaataatcattgcatggtccacacaggagagaaaccatacaaatgtgaggactgtggtaagtgtttcacttgtagctcaaaccttcgtatccatcaaagggtccacacaggagagaaaccttacaagtgtgaagaatgtggtaagtgctttattcagccttcacaatttcaggcccatcggagaatccacactggagagaaaccatacgtatgtaaagtgtgtggtaagggtttcatttacagttcaagttttcaggcccatcagggagtccacactggagagaagccatacaaatgcaatgagtgtgggaagagcttcagaatgaaaattcattatcaagtgcatctggtagtccacacaggggaaaaaccctataaatgtgaagtatgtggtaaagccttccgtcagagttcatatcttaaaatccatctgaaagcacatagtgtacagaaaccttttaagtgtgaagagtgtgggcagggcttcaatcagagctcacgacttcagattcaccagctgatccataccggtgagaaaccatacaaatgtgaagagtgcggaaagggatttagtcgtagagcagatcttaaaattcattgtaggatccacacaggggagaaaccatataattgtgaggagtgtgggaaggtcttcagtcaggcctcgcatcttctaacccatcagagagttcacagtggggaaaaaccatttaaatgtgaagagtgtgggaagagcttcagtcggagtgcacaccttcaagcccatcaaaaagtccacactggagaaaagccatacaaatgtggggagtgtggaaagggcttcaagtggagcttgaaccttgacatgcatcagagggtgcacacaggagaaaaaccctatacatgtggggagtgtgggaagcacttcagtcaggcctcaagtctccaacttcatcagagtgtccacacaggagagaaaccatacaaatgtgatgtatgtggtaaagtcttcagtcggtcttcacaattacagtatcataggcgagttcacactggggaaaaaccttacaaatgtgagatatgtggtaagaggttcagctggcgatcaaatcttgtaagtcatcacaaaattcatgctgctggtacattttatgaaaatgatgagaatagtaagaacatcagagagttgtcagagggaggaagttctacaaggtagtaatgaactagtccgtaacttgaaagtatttcgatttcttggctttatatatcttgtggaaaggacgagagcgcacggccctaatctgaaga

SEQ ID NO: 1877 - DNA, 3398 bp, Homo sapiens
  source 1..3398: mol_type = genomic DNA
accgccaccatggcggagcgtggcggggacgggggcgagagtgaacgattcaacccgggggagctcaggatggcccaacagcaggccttgaggttccgaggtccggctcccccaccaaatgcagtgatgcgaggcccaccacctctgatgcgacctcctccaccttttggtatgatgcgaggccctcctccaccaccacggccgccctttggacgtcctccttttgatcctaatatgccgccaatgcctcctccaggagggatacctccacctatgggccctccacacctccagagaccacctttcatgcctcctcccatgagttccatgcctcctcctccgggtatgatgtttccaccaggaatgcctcctgtgactgctcctggtactccagcactacctcctacggaggagatatgggttgaaaataaaactccagatgggaaggtttattattataatgctcggacacgtgaatctgcatggaccaagccagatggagttaaggttattcagcaatcagaactgacacctatgcttgcagcccaggcacaggttcaggctcaggcccaggcgcaggctcaggcccaggcgcaggctcaggcccaggcacaagctcaggcccaggctcaggctcaggcccaggcccaggcccaggcccaggcccaggcccaagcccaagcccaggcccaggctcaggctcaggcacaagctcaggcccaggcccaggctcaggtccaggcccaggtccaggcacaagtgcaagcacaagcagttggagcttccacccctacgaccagtagcccagcacctgcagtatccacttcaacatcatcatccaccccttcctctaccacttctaccacaacaactgctacttcagttgcgcagacagtatcaacacccacaacacaagatcagaccccaagttctgctgtttcagttgccacgcctacagttagtgtttcaactcctgctcctacagccacacctgtgcaaaccgttccccagccgcaccctcagacgttacctcctgctgttcctcattcagtacctcagccaacaacagcaatacctgcttttccaccagtaatggtacctccgtttcgtgttccccttcctggcatgccaattccacttccaggtgtagcaatgatgcaaatagtcagctgcccgtatgtaaagacagtcgctaccaccaagaccggtgtattgccaggaatggcccctcctatcgtacccatgatacatccccaggttgctattgcagcttcacctgctaccttagctggagcaacagcagtttctgaatggactgaatataaaacagcagatgggaagacatattattataataatagaacattagaatcaacctgggaaaaaccccaagaactaaaggaaaaagaaaagttagaagagaagattaaagagccaattaaagaaccctctgaagagcctctgccaatggagacggaggaggaggatcctaaagaagagcctataaaggagataaaggaggagcccaaagaagaggagatgactgaagaagaaaaggctgcccagaaggcaaagccagttgctactgctcctattcctggtactccatggtgtgtcgtttggactggtgatgagcgggtcttcttttataatcccaccactcgtctttctatgtgggaccgacctgatgatctgattggcagggcagatgttgacaaaattattcaggagccccctcataaaaaaggaatggaggaattgaagaaactaaggcacccaactccgacaatgctgtcgatccaaaagtggcaattctctatgagtgcaattaaagaggaacaagaattaatggaagaaattaatgaagatgagcctgttaaagcaaaaaaacggaagagagacgataataaagacattgactcagagaaagaagctgccatggaagctgaaattaaagctgcccgagaaagggccattgtccctctggaggctcgaatgaagcagttcaaggacatgctgctagagagaggggtgtctgctttttcaacgtgggagaaggagttgcacaagatagtttttgatccccggtacttacttctcaatcctaaagagagaaaacaggtgtttgatcagtatgtaaagaccagggcagaggaagaacgcagggaaaagaaaaataaaataatgcaagccaaggaagatttcaaaaaaatgatggaagaagcaaaatttaatccaagagcaacttttagtgaatttgcagccaagcatgctaaagattcaagattcaaagcaattgaaaagatgaaagaccgagaagccttgtttaatgagtttgtggccgctgctaggaagaaagagaaagaagattcgaagaccagaggtgagaagattaaatcggatttctttgaactattatctaatcatcacttggacagtcagtctcgatggagcaaagtaaaagacaaagtagaaagtgatccacgttacaaagcagtagatagttcatcaatgagagaagaccttttcaaacagtacattgaaaaaatagccaagaatttagactcagaaaaagaaaaggagcttgaaaggcaagcccgcattgaggcaagccttcgagaacgagaaagggaggttcaaaaggcccgttcagaacaaacaaaagaaatagatcgagagagagagcagcacaaacgagaagaagctatccagaatttcaaagctcttctgtctgacatggtacgttcttcagatgtgtcatggtctgatactcgtaggaccctccgaaaagatcaccgctgggaatctggatccttattggaaagagaggagaaagagaagctttttaatgaacacattgaagcacttaccaaaaaaaagagagagcactttaggcaacttctggatgaaacttctgcaattaccttaacatccacgtggaaagaagtaaaaaaaatcattaaggaagatcctcgatgtattaagttctcctccagtgacaggaaaaaacaaagagaatttgaagaatatatcagagacaaatatatcacagccaaagctgacttcaggacgcttttgaaagagaccaaatttataacatatagatccaaaaaattaatccaagaatcagatcagcacctgaaagatgtagaaaaaattttacagaatgacaaacggtatctagtactggactgtgtgccagaggagaggcgtaaactgattgtggcatatgttgatgacctggatcgccggggtccacccccacctcccacagcatcggagcccacgagacgatcaacaaaatagtaatgaactagtccgtaacttgaaagtatttcgatttcttggctttatatatcttgtggaaaggacgactctaattaagccacagaccaaga

SEQ ID NO: 1878 - DNA, 3335 bp, Homo sapiens
  source 1..3335: mol_type = genomic DNA
accgccaccatggcggagcgtggcggggacgggggcgagagtgaacgattcaacccgggggagctcaggatggcccaacagcaggccttgaggttccgaggtccggctcccccaccaaatgcagtgatgcgaggcccaccacctctgatgcgacctcctccaccttttggtatgatgcgaggccctcctccaccaccacggccgccctttggacgtcctccttttgatcctaatatgccgccaatgcctcctccaggagggatacctccacctatgggccctccacacctccagagaccacctttcatgcctcctcccatgagttccatgcctcctcctccgggtatgatgtttccaccaggaatgcctcctgtgactgctcctggtactccagcactacctcctacggaggagatatgggttgaaaataaaactccagatgggaaggtttattattataatgctcggacacgtgaatctgcatggaccaagccagatggagttaaggttattcagcaatcagaactgacacctatgcttgcagcccaggcacaggttcaggctcaggcccaggcgcaggctcaggcccaggcgcaggctcaggcccaggcacaagctcaggcccaggctcaggctcaggcccaggcccaggcccaggcccaggcccaggcccaagcccaagcccaggcccaggctcaggctcaggcacaagctcaggcccaggcccaggctcaggtccaggcccaggtccaggcacaagtgcaagcacaagcagttggagcttccacccctacgaccagtagcccagcacctgcagtatccacttcaacatcatcatccaccccttcctctaccacttctaccacaacaactgctacttcagttgcgcagacagtatcaacacccacaacacaagatcagaccccaagttctgctgtttcagttgccacgcctacagttagtgtttcaactcctgctcctacagccacacctgtgcaaaccgttccccagccgcaccctcagacgttacctcctgctgttcctcattcagtacctcagccaacaacagcaatacctgcttttccaccagtaatggtacctccgtttcgtgttccccttcctggcatgccaattccacttccaggtgtattgccaggaatggcccctcctatcgtacccatgatacatccccaggttgctattgcagcttcacctgctaccttagctggagcaacagcagtttctgaatggactgaatataaaacagcagatgggaagacatattattataataatagaacattagaatcaacctgggaaaaaccccaagaactaaaggaaaaagaaaagttagaagagaagattaaagagccaattaaagaaccctctgaagagcctctgccaatggagacggaggaggaggatcctaaagaagagcctataaaggagataaaggaggagcccaaagaagaggagatgactgaagaagaaaaggctgcccagaaggcaaagccagttgctactgctcctattcctggtactccatggtgtgtcgtttggactggtgatgagcgggtcttcttttataatcccaccactcgtctttctatgtgggaccgacctgatgatctgattggcagggcagatgttgacaaaattattcaggagccccctcataaaaaaggaatggaggaattgaagaaactaaggcacccaactccgacaatgctgtcgatccaaaagtggcaattctctatgagtgcaattaaagaggaacaagaattaatggaagaaattaatgaagatgagcctgttaaagcaaaaaaacggaagagagacgataataaagacattgactcagagaaagaagctgccatggaagctgaaattaaagctgcccgagaaagggccattgtccctctggaggctcgaatgaagcagttcaaggacatgctgctagagagaggggtgtctgctttttcaacgtgggagaaggagttgcacaagatagtttttgatccccggtacttacttctcaatcctaaagagagaaaacaggtgtttgatcagtatgtaaagaccagggcagaggaagaacgcagggaaaagaaaaataaaataatgcaagccaaggaagatttcaaaaaaatgatggaagaagcaaaatttaatccaagagcaacttttagtgaatttgcagccaagcatgctaaagattcaagattcaaagcaattgaaaagatgaaagaccgagaagccttgtttaatgagtttgtggccgctgctaggaagaaagagaaagaagattcgaagaccagaggtgagaagattaaatcggatttctttgaactattatctaatcatcacttggacagtcagtctcgatggagcaaagtaaaagacaaagtagaaagtgatccacgttacaaagcagtagatagttcatcaatgagagaagaccttttcaaacagtacattgaaaaaatagccaagaatttagactcagaaaaagaaaaggagcttgaaaggcaagcccgcattgaggcaagccttcgagaacgagaaagggaggttcaaaaggcccgttcagaacaaacaaaagaaatagatcgagagagagagcagcacaaacgagaagaagctatccagaatttcaaagctcttctgtctgacatggtacgttcttcagatgtgtcatggtctgatactcgtaggaccctccgaaaagatcaccgctgggaatctggatccttattggaaagagaggagaaagagaagctttttaatgaacacattgaagcacttaccaaaaaaaagagagagcactttaggcaacttctggatgaaacttctgcaattaccttaacatccacgtggaaagaagtaaaaaaaatcattaaggaagatcctcgatgtattaagttctcctccagtgacaggaaaaaacaaagagaatttgaagaatatatcagagacaaatatatcacagccaaagctgacttcaggacgcttttgaaagagaccaaatttataacatatagatccaaaaaattaatccaagaatcagatcagcacctgaaagatgtagaaaaaattttacagaatgacaaacggtatctagtactggactgtgtgccagaggagaggcgtaaactgattgtggcatatgttgatgacctggatcgccggggtccacccccacctcccacagcatcggagcccacgagacgatcaacaaaatagtaatgaactagtccgtaacttgaaagtatttcgatttcttggctttatatatcttgtggaaaggacgaaaacttacttcgggaatcaggtgt

SEQ ID NO: 1879 - DNA, 1436 bp, Homo sapiens
  source 1..1436: mol_type = genomic DNA
accgccaccatggaacctcctggtcctgtgagggggcccttgcaagattccagctggtatgagccttctgcagagctagtgcagactaggatggctgtatcactaacagcagctgaaactctggcccttcagggtacacagggacaagagaagatgatgatgatgggaccaaaggaagaggaacagtcttgtgagtatgagaccaggctacctgggaaccactctaccagtcaagagatcttccgccaacgcttcaggcatctccgctaccaggagactcctggtccccgggaggccttgagccaactacgagtactctgctgtgagtggctgaggccagagaaacacacgaaggagcagatcctggagttcctggtgctggaacaattcttgaccatcctgcctgaggagctccaatcctgggtgcggggacatcaccctaagagtggagaggaggctgtgactgtgctggaggatttagagaaaggacttgaaccagagccgcaggtcccaggccctgcacatggacctgcacaggaagagccatgggagaagaaggaatctctgggagcagcccaggaagcactgagcatccagctccagcctaaggagacccagcctttcccaaagagtgaacaggtatatttacattttctgtcagttgttacagaagatggcccagagcccaaggacaaaggatcattgccacaaccacccattactgaagtggaatcacaggtgttctcagaaaaacttgctactgacacctctacatttgaagctacctctgagggtaccttagaactgcagcagagaaatcccaaagcggagagactgaggtggtcccctgcccaggaggaaagtttcaggcagatggttgtcatccataaggaaattcccacagggaagaaagaccatgaatgtagtgaatgtggtaaaaccttcatttataactcacatcttgttgtccaccagagagttcattctggagagaaaccctataagtgtagtgactgtgggaaaactttcaaacagagctcaaacctcggtcagcatcagagaattcatacaggagagaaacccttcgaatgtaatgaatgtgggaaggccttcagatggggtgctcatcttgttcagcatcagaggattcactcaggagagaagccctatgagtgtaatgagtgtgggaaggcctttagtcaaagctcatatctaagtcagcatcggagaattcacagtggagagaaaccttttatatgtaaagaatgtgggaaagcttatggatggtgctcagagctcattagacatcggagagttcatgccagaaaagagccttcccattagtaatgaactagtccgtaacttgaaagtatttcgatttcttggctttatatatcttgtggaaaggacgacctaacctacaccaacattaatga

SEQ ID NO: 1880 - DNA, 1409 bp, Homo sapiens
  source 1..1409: mol_type = genomic DNA
accgccaccatggaacctcctggtcctgtgagggggcccttgcaagattccagctggtatgagccttctgcagagctagtgcagactaggatggctgtatcactaacagcagctgaaactctggcccttcagggtacacagggacaagagaagatgatgatgatgggaccaaaggaagaggaacagtcttgtgagtatgagaccaggctacctgggaaccactctaccagtcaagagatcttccgccaacgcttcaggcatctccgctaccaggagactcctggtccccgggaggccttgagccaactacgagtactctgctgtgagtggctgaggccagagaaacacacgaaggagcagatcctggagttcctggtgctggaacaattcttgaccatcctgcctgaggagctccaatcctgggtgcggggacatcaccctaagagtggagaggaggctgtgactgtgctggaggatttagagaaaggacttgaaccagagccgcaggtcccaggccctgcacatggacctgcacaggaagagccatgggagaagaaggaatctctgggagcagcccaggaagcactgagcatccagctccagcctaaggagacccagcctttcccaaagagtgttgttacagaagatggcccagagcccaaggacaaaggatcattgccacaaccacccattactgaagtggaatcacaggtgttctcagaaaaacttgctactgacacctctacatttgaagctacctctgagggtaccttagaactgcagcagagaaatcccaaagcggagagactgaggtggtcccctgcccaggaggaaagtttcaggcagatggttgtcatccataaggaaattcccacagggaagaaagaccatgaatgtagtgaatgtggtaaaaccttcatttataactcacatcttgttgtccaccagagagttcattctggagagaaaccctataagtgtagtgactgtgggaaaactttcaaacagagctcaaacctcggtcagcatcagagaattcatacaggagagaaacccttcgaatgtaatgaatgtgggaaggccttcagatggggtgctcatcttgttcagcatcagaggattcactcaggagagaagccctatgagtgtaatgagtgtgggaaggcctttagtcaaagctcatatctaagtcagcatcggagaattcacagtggagagaaaccttttatatgtaaagaatgtgggaaagcttatggatggtgctcagagctcattagacatcggagagttcatgccagaaaagagccttcccattagtaatgaactagtccgtaacttgaaagtatttcgatttcttggctttatatatcttgtggaaaggacgacggattcgcctacacccacagagg

SEQ ID NO: 1881 - DNA, 1061 bp, Homo sapiens
  source 1..1061: mol_type = genomic DNA
accgccaccatggcggggcgcagcgacatggatccgcccgccgcgttctctggcttccctgccctgccagcggtcgcgccgtcggggccgccgccgtcgccgctcgcaggagccgagccagggcgggagccagaggaggcggcggctggccgcggagaggcggcccccacgcccgcgcccggcccggggcggcggcggcggcggcccctgcagcgcgggaagccgccctactcgtacatcgcgctcatcgccatggctctggcgcacgccccgggccgccgcctcacgctggccgccatctaccgcttcatcaccgaacgctttgccttctaccgcgacagcccgcgcaagtggcagaacagcatccgccacaatctcacgctcaacgactgcttcgtcaaggtgccccgcgagccgggcaacccgggcaagggcaactactggacgctggaccccgcggccgcagacatgttcgacaacggcagcttcctgcggcgccgcaagcgcttcaagcgcgccgagctgcccgcgcacgcggccgcggcgccagggccgccgctccccttcccctacgcgccctacgcgcccgcgcccggccccgcgctgctggtgccgccgccttctgccggaccgggcccctcgccgcccgcgcgtctgttcagcgtcgacagcctggtgaacctgcagccggagctagcggggctgggcgcccccgagccgccctgctgcgccgcgcccgacgccgcagccgcagccttcccgccctgcgctgccgccgcctccccgccactctactcgcaggtccccgaccgcctggtactgcccgcgacgcgccccggccccggcccgctgcccgctgagcccctcctggccttggccgggccggcagccgctctcggcccgctcagccctggggaggcctacctgaggcagccgggcttcgcgtcggggctggagcgctacctgtagtaatgaactagtccgtaacttgaaagtatttcgatttcttggctttatatatcttgtggaaaggacgaggcgcgtggcactgatgacccaag

SEQ ID NO: 1882 - DNA, 620 bp, Homo sapiens
  source 1..620: mol_type = genomic DNA
accgccaccatgagcagcaatgagtgcttcaagtgtggacgatctggccactgggcccgggaatgtcctactggtggaggccgtggtcgtggaatgagaagccgtggcagaggtttccagtttgtttcctcgtctcttccagacatttgttatcgctgtggtgagtctggtcatcttgccaaggattgtgatcttcaggaggatgttgaagcctgctataactgcggtagaggtggccacattgccaaggactgcaaggagcccaagagagagcgagagcaatgctgctacaactgtggcaaaccaggccatctggctcgtgactgcgaccatgcagatgagcagaaatgctattcttgtggagaattcggacacattcaaaaagactgcaccaaagtgaagtgctataggtgtggtgaaactggtcatgtagccatcaactgcagcaagacaagtgaagtcaactgttaccgctgtggcgagtcagggcaccttgcacgggaatgcacaattgaggctacagcctagtaatgaactagtccgtaacttgaaagtatttcgatttcttggctttatatatcttgtggaaaggacgacctacaaggcgtagccttgtaggg

SEQ ID NO: 1883 - DNA, 638 bp, Homo sapiens
  source 1..638: mol_type = genomic DNA
accgccaccatgagcagcaatgagtgcttcaagtgtggacgatctggccactgggcccgggaatgtcctactggtggaggccgtggtcgtggaatgagaagccgtggcagaggtggttttacctcggatagaggtttccagtttgtttcctcgtctcttccagacatttgttatcgctgtggtgagtctggtcatcttgccaaggattgtgatcttcaggaggatgaagcctgctataactgcggtagaggtggccacattgccaaggactgcaaggagcccaagagagagcgagagcaatgctgctacaactgtggcaaaccaggccatctggctcgtgactgcgaccatgcagatgagcagaaatgctattcttgtggagaattcggacacattcaaaaagactgcaccaaagtgaagtgctataggtgtggtgaaactggtcatgtagccatcaactgcagcaagacaagtgaagtcaactgttaccgctgtggcgagtcagggcaccttgcacgggaatgcacaattgaggctacagcctagtaatgaactagtccgtaacttgaaagtatttcgatttcttggctttatatatcttgtggaaaggacgagacttgagggtttggccctcgtct

SEQ ID NO: 1884 - DNA, 641 bp, Homo sapiens
  source 1..641: mol_type = genomic DNA
accgccaccatgagcagcaatgagtgcttcaagtgtggacgatctggccactgggcccgggaatgtcctactggtggaggccgtggtcgtggaatgagaagccgtggcagaggtggttttacctcggatagaggtttccagtttgtttcctcgtctcttccagacatttgttatcgctgtggtgagtctggtcatcttgccaaggattgtgatcttcaggaggatgttgaagcctgctataactgcggtagaggtggccacattgccaaggactgcaaggagcccaagagagagcgagagcaatgctgctacaactgtggcaaaccaggccatctggctcgtgactgcgaccatgcagatgagcagaaatgctattcttgtggagaattcggacacattcaaaaagactgcaccaaagtgaagtgctataggtgtggtgaaactggtcatgtagccatcaactgcagcaagacaagtgaagtcaactgttaccgctgtggcgagtcagggcaccttgcacgggaatgcacaattgaggctacagcctagtaatgaactagtccgtaacttgaaagtatttcgatttcttggctttatatatcttgtggaaaggacgaggcttacacgtcttaccaagccct

SEQ ID NO: 1885 - DNA, 635 bp, Homo sapiens
  source 1..635: mol_type = genomic DNA
accgccaccatgagcagcaatgagtgcttcaagtgtggacgatctggccactgggcccgggaatgtcctactggtggaggccgtggtcgtggaatgagaagccgtggcagaggtggttttacctcggatagaggtttccagtttgtttcctcgtctcttccagacatttgttatcgctgtggtgagtctggtcatcttgccaaggattgtgatcttcaggaggatgcctgctataactgcggtagaggtggccacattgccaaggactgcaaggagcccaagagagagcgagagcaatgctgctacaactgtggcaaaccaggccatctggctcgtgactgcgaccatgcagatgagcagaaatgctattcttgtggagaattcggacacattcaaaaagactgcaccaaagtgaagtgctataggtgtggtgaaactggtcatgtagccatcaactgcagcaagacaagtgaagtcaactgttaccgctgtggcgagtcagggcaccttgcacgggaatgcacaattgaggctacagcctagtaatgaactagtccgtaacttgaaagtatttcgatttcttggctttatatatcttgtggaaaggacgaactcatgtcctgctagcctcctgc

SEQ ID NO: 1886 - DNA, 3122 bp, Homo sapiens
  source 1..3122: mol_type = genomic DNA
accgccaccatggatagcagccaacagaaaacatttcgaggacatgatgcccctgttttaagtctttcctttgatcctaaggacatctttctggcatcagctagttgtgatggatctgtcagagtgtggcaaatttcagatcagacatgtgctattagttggccactgctacaaaaatgcaacgatgtgataaatgcaaaatcaatctgcagacttgcttggcagccaaaaagtgggaagttactggcaattcctgtggaaaaatctgttaagctatatagaagagaatcttggagtcatcaatttgatctttcagataatttcatctctcagaccctcaatatagtaacctggtctccctgtgggcaatatttagctgcaggtagtattaatggtctaatcatagtttggaatgtggaaaccaaagactgcatggaaagggtgaaacatgagaaaggttatgcaatttgtggtctggcatggcatcctacttgtggtcgaatatcgtatactgatgcggaaggaaatctagggcttctagagaatgtttgtgaccccagtggaaagacatcaagcagtaaggtatctagcagagtggaaaaggattataatgatctttttgatggagatgatatgagtaatgctggtgattttctaaatgacaatgcagttgagatcccttctttttcaaaagggattataaatgatgatgaggatgatgaagacctcatgatggcttcaggtcgtcctagacagcgaagtcacatcctagaagatgatgaaaactcagttgatatttcaatgctaaaaactggttctagtcttctcaaagaggaggaggaagatggtcaagaaggcagcattcacaatctaccacttgtaacatcccaaaggccattttatgatggacccatgccaactccccggcaaaagccatttcagtcaggttctacaccgttgcatctcactcacagattcatggtgtggaactctattggaattattcgctgctataatgatgagcaagacaatgccatagatgtggagttccatgatacctccatacaccatgcaacacacttatcaaacactttgaattatacaatagcagatctttcccacgaagctattttgttggcatgtgaaagcactgatgaactagcaagcaagcttcactgcctgcactttagttcttgggattcaagcaaagagtggataatagacttgcctcagaatgaggatattgaagccatatgtctcggtcaaggatgggctgctgccgctactagtgccctgcttcttcgattgtttactattggaggggttcaaaaagaggtattcagccttgctggacctgtggtgtcaatggcaggacatggagaacagcttttcattgtttatcacagaggtacaggatttgatggggatcagtgccttggagttcaactgctagagctggggaaaaagaaaaaacaaattttgcatggtgaccctcttcctcttacaaggaaatcctaccttgcatggattgggttttcagctgaaggtaccccttgttacgtggattcagaaggaattgttcgaatgcttaacagaggacttggtaatacgtggactcctatatgtaatacaagagagcactgcaaaggaaaatctgatcactactgggtggttggtatccatgaaaatccccagcaactaaggtgcattccttgtaaaggttctcggtttcccccaacccttccacgccctgctgttgctatattatcctttaagcttccttactgtcagattgcaacagagaaaggacaaatggaggagcaattttggcgttcagttatatttcacaaccaccttgattatttagctaaaaatggttatgaatatgaagagagcactaaaaatcaagcaacaaaagagcaacaggaacttttaatgaaaatgcttgcgctttcttgtaaactggagcgagaattccgttgtgtggaacttgctgatctaatgactcaaaatgctgtgaatttagccattaaatatgcttctcgctctcggaaattaatactggctcaaaaactaagtgaactggctgtagagaaggcagccgaattgacagcaacccaggtggaagaggaagaagaagaagaagatttcagaaaaaagctgaatgctggttacagcaatactgctacagagtggagccaaccaaggttcagaaatcaagttgaagaagatgctgaggacagtggagaagctgatgatgaagaaaaaccagaaatacataagcctggacagaactcgttttccaaaagtacaaattcctctgatgtttcagctaagtcaggtgcagttacctttagcagccaaggacgagtaaatccctttaaggtatcagccagttccaaagaaccagccatgtcaatgaattcagcacgttcaactaatattttagacaatatgggcaaatcatccaagaaatccactgcacttagtcgaactacaaataatgaaaagtctcccattataaagcctctgattccaaagccgaagcctaagcaggcatctgcagcatcctatttccagaaaagaaattctcaaactaataaaactgaggaagtgaaagaagaaaatcttaaaaatgtattatctgaaaccccagctatatgtcctcctcaaaacactgaaaaccaaaggccaaagaccgggttccagatgtggttagaagaaaatagaagtaatattttgtctgacaatcctgacttttcagatgaagcagacataataaaagaaggaatgattcgatttagagtattgtcaactgaagaaagaaaggtgtgggctaacaaagccaaaggagaaacggcaagtgaaggaactgaagcaaagaagcgaaaacgtgtggttgatgaaagtgatgaaacagaaaaccaggaagaaaaagcaaaagagaacctgaatttgtctaaaaagcagaaacctttagatttttctacaaatcagaaactatcagcttttgcatttaagcaggagtagtaatgaactagtccgtaacttgaaagtatttcgatttcttggctttatatatcttgtggaaaggacgacgaagggccgaatgtatgtgagag

SEQ ID NO: 1887 - DNA, 3491 bp, Homo sapiens
  source 1..3491: mol_type = genomic DNA
accgccaccatgcctgccacacggaagccaatgagatatgggcatacagagggacacacggaggtctgttttgatgattctgggagttttattgtgacttgtggaagtgatggtgatgtgaggatttgggaagacttggatgatgatgatcctaagttcattaatgttggagaaaaggcatattcatgtgctttgaagagtggaaaactggtcactgcagtttctaataatactattcaagtccacacatttcctgaaggagttccagatggtatattgactcgcttcactacaaatgcaaaccatgtggtctttaatggggatggtactaaaattgctgctggatctagtgattttctagtcaaaattgtggatgtgatggatagcagccaacagaaaacatttcgaggacatgatgcccctgttttaagtctttcctttgatcctaaggacatctttctggcatcagctagttgtgatggatctgtcagagtgtggcaaatttcagatcagacatgtgctattagttggccactgctacaaaaatgcaacgatgtgataaatgcaaaatcaatctgcagacttgcttggcagccaaaaagtgggaagttactggcaattcctgtggaaaaatctgttaagctatatagaagagaatcttggagtcatcaatttgatctttcagataatttcatctctcagaccctcaatatagtaacctggtctccctgtgggcaatatttagctgcaggtagtattaatggtctaatcatagtttggaatgtggaaaccaaagactgcatggaaagggtgaaacatgagaaaggttatgcaatttgtggtctggcatggcatcctacttgtggtcgaatatcgtatactgatgcggaaggaaatctagggcttctagagaatgtttgtgaccccagtggaaagacatcaagcagtaaggtatctagcagagtggaaaaggattataatgatctttttgatggagatgatatgagtaatgctggtgattttctaaatgacaatgcagttgagatcccttctttttcaaaagggattataaatgatgatgaggatgatgaagacctcatgatggcttcaggtcgtcctagacagcgaagtcacatcctagaagatgatgaaaactcagttgatatttcaatgctaaaaactggttctagtcttctcaaagaggaggaggaagatggtcaagaaggcagcattcacaatctaccacttgtaacatcccaaaggccattttatgatggacccatgccaactccccggcaaaagccatttcagtcaggttctacaccgttgcatctcactcacagattcatggtgtggaactctattggaattattcgctgctataatgatgagcaagacaatgccatagatgtggagttccatgatacctccatacaccatgcaacacacttatcaaacactttgaattatacaatagcagatctttcccacgaagctattttgttggcatgtgaaagcactgatgaactagcaagcaagcttcactgcctgcactttagttcttgggattcaagcaaagagtggataatagacttgcctcagaatgaggatattgaagccatatgtctcggtcaaggatgggctgctgccgctactagtgccctgcttcttcgattgtttactattggaggggttcaaaaagaggtattcagccttgctggacctgtggtgtcaatggcaggacatggagaacagcttttcattgtttatcacagaggtacaggatttgatggggatcagtgccttggagttcaactgctagagctggggaaaaagaaaaaacaaattttgcatggtgaccctcttcctcttacaaggaaatcctaccttgcatggattgggttttcagctgaaggtaccccttgttacgtggattcagaaggaattgttcgaatgcttaacagaggacttggtaatacgtggactcctatatgtaatacaagagagcactgcaaaggaaaatctgatcactactgggtggttggtatccatgaaaatccccagcaactaaggtgcattccttgtaaaggttctcggtttcccccaacccttccacgccctgctgttgctatattatcctttaagcttccttactgtcagattgcaacagagaaaggacaaatggaggagcaattttggcgttcagttatatttcacaaccaccttgattatttagctaaaaatggttatgaatatgaagagagcactaaaaatcaagcaacaaaagagcaacaggaacttttaatgaaaatgcttgcgctttcttgtaaactggagcgagaattccgttgtgtggaacttgctgatctaatgactcaaaatgctgtgaatttagccattaaatatgcttctcgctctcggaaattaatactggctcaaaaactaagtgaactggctgtagagaaggcagccgaattgacagcaacccaggtggaagaggaagaagaagaagaagatttcagaaaaaagctgaatgctggttacagcaatactgctacagagtggagccaaccaaggttcagaaatcaagttgaagaagatgctgaggacagtggagaagctgatgatgaagaaaaaccagaaatacataagcctggacagaactcgttttccaaaagtacaaattcctctgatgtttcagctaagtcaggtgcagttacctttagcagccaaggacgagtaaatccctttaaggtatcagccagttccaaagaaccagccatgtcaatgaattcagcacgttcaactaatattttagacaatatgggcaaatcatccaagaaatccactgcacttagtcgaactacaaataatgaaaagtctcccattataaagcctctgattccaaagccgaagcctaagcaggcatctgcagcatcctatttccagaaaagaaattctcaaactaataaaactgaggaagtgaaagaagaaaatcttaaaaatgtattatctgaaaccccagctatatgtcctcctcaaaacactgaaaaccaaaggccaaagaccgggttccagatgtggttagaagaaaatagaagtaatattttgtctgacaatcctgacttttcagatgaagcagacataataaaagaaggaatgattcgatttagagtattgtcaactgaagaaagaaaggtgtgggctaacaaagccaaaggagaaacggcaagtgaaggaactgaagcaaagaagcgaaaacgtgtggttgatgaaagtgatgaaacagaaaaccaggaagaaaaagcaaaagagaacctgaatttgtctaaaaagcagaaacctttagatttttctacaaatcagaaactatcagcttttgcatttaagcaggagtagtaatgaactagtccgtaacttgaaagtatttcgatttcttggctttatatatcttgtggaaaggacgacttacacacgttcatgtgtcgttg

SEQ ID NO: 1888 - DNA, 1142 bp, Homo sapiens
  source 1..1142: mol_type = genomic DNA
accgccaccatggacatgctggacccgggtctggatcccgctgcctcggccaccgctgctgccgccgccagccacgacaagggacccgaggcggaggagggcgtcgagctgcaggaaggcggggacggcccaggagcggaggagcagacagcggtggccatcaccagcgtccagcaggcggcgttcggcgaccacaacatccagtaccagttccgcacagagacaaatggaggacaggtgacataccgcgtagtccaggtgactgatggtcagctggacggccagggcgacacagctggcgccgtcagcgtcgtgtccaccgctgccttcgcgggggggcagcaggctgtgacccaggtgggtgtggacggggcagcccagcgcccgggccccgccgctgcctctgtgcccccaggtcctgcagcgcccttcccgctggctgtgatccaaaatcccttcagcaatggtggcagtccggcggccgaggctgtcagcggggaggcacgatttgcctatttcccagcgtccagtgtgggagatactacggctgtgtccgtacagaccacagaccagagcttgcaggctggaggccagttctacgtcatgatgacgccccaggatgtgcttcagacaggaacacagaggacgatcgccccccggacacacccttactctccaaaaattgatggaaccagaacaccccgagatgagaggagaagagcccagcacaacgaagtggagcggaggcggagggacaagatcaacaactggatcgtccagctttcgaaaatcattccagactgtaacgcagacaacagcaagacgggagcgagtaaaggagggatcctgtccaaggcctgcgattacatccgggagttgcgccagaccaaccagcgcatgcaggagaccttcaaagaggccgagcggctgcagatggacaacgagctcctgaggcagcagatcgaggagctgaagaatgagaacgccctgcttcgagcccagctgcagcagcacaacctggagatggtgggcgagggcacccggcagtagtaatgaactagtccgtaacttgaaagtatttcgatttcttggctttatatatcttgtggaaaggacgatgagacatatagatgcgcttgcga

SEQ ID NO: 1889 - DNA, 941 bp, Homo sapiens
  source 1..941: mol_type = genomic DNA
accgccaccatggacatgctggacccgggtctggatcccgctgcctcggccaccgctgctgccgccgccagccacgacaagggacccgaggcggaggagggcgtcgagctgcaggaaggcggggacggcccaggagcggaggagcagacagcggtggccatcaccagcgtccagcaggcggcgttcggcgaccacaacatccagtaccagttccgcacagagacaaatggaggacaggctgtgatccaaaatcccttcagcaatggtggcagtccggcggccgaggctgtcagcggggaggcacgatttgcctatttcccagcgtccagtgtgggagatactacggctgtgtccgtacagaccacagaccagagcttgcaggctggaggccagttctacgtcatgatgacgccccaggatgtgcttcagacaggaacacagaggacgatcgccccccggacacacccttactctccaaaaattgatggaaccagaacaccccgagatgagaggagaagagcccagcacaacgaagtggagcggaggcggagggacaagatcaacaactggatcgtccagctttcgaaaatcattccagactgtaacgcagacaacagcaagacgggagcgagtaaaggagggatcctgtccaaggcctgcgattacatccgggagttgcgccagaccaaccagcgcatgcaggagaccttcaaagaggccgagcggctgcagatggacaacgagctcctgaggcagcagatcgaggagctgaagaatgagaacgccctgcttcgagcccagctgcagcagcacaacctggagatggtgggcgagggcacccggcagtagtaatgaactagtccgtaacttgaaagtatttcgatttcttggctttatatatcttgtggaaaggacgatacgtcgtccgcgcctcctcacac

SEQ ID NO: 1890 - DNA, 749 bp, Homo sapiens
  source 1..749: mol_type = genomic DNA
accgccaccatggacatgctggacccgggtctggatcccgctgcctcggccaccgctgctgccgccgccagccacgacaagggacccgaggcggaggagggcgtcgagctgcaggaaggcggggacggcccaggagcggaggagcagacagcggtggccatcaccagcgtccagcaggcggcgttcggcgaccacaacatccagtaccagttccgcacagagacaaatggaggacagacaggaacacagaggacgatcgccccccggacacacccttactctccaaaaattgatggaaccagaacaccccgagatgagaggagaagagcccagcacaacgaagtggagcggaggcggagggacaagatcaacaactggatcgtccagctttcgaaaatcattccagactgtaacgcagacaacagcaagacgggagcgagtaaaggagggatcctgtccaaggcctgcgattacatccgggagttgcgccagaccaaccagcgcatgcaggagaccttcaaagaggccgagcggctgcagatggacaacgagctcctgaggcagcagatcgaggagctgaagaatgagaacgccctgcttcgagcccagctgcagcagcacaacctggagatggtgggcgagggcacccggcagtagtaatgaactagtccgtaacttgaaagtatttcgatttcttggctttatatatcttgtggaaaggacgatctttggaagaattaaccggttgg

SEQ ID NO: 1891 - DNA, 1259 bp, Homo sapiens
  source 1..1259: mol_type = genomic DNA
accgccaccatggcagccttcctatctgctggcctcggcatacttgcaccctcagagacctaccccctacctacaaccagctctggctgggagccccggctggggtcaccattcccatcaggcccttgcaccagctctactggggcccaagctgtggccgagcccactgggcagggccccaagaacccacgtgtgtccagagtgacagttcagctggagatgaagcctctgtgggaggaattcaaccagctgggcactgagatgatcgtcaccaaggcaggcaggaggatgttcccccccttccaggtgaagatcctgggcatggactccctggccgactacgccctgctcatggacttcatccccctggacgacaagagatacaggtatgccttccacagctcggcctggctggtggcgggcaaggcagacccagccacacctggccgcgtgcacttccaccccgactcgccagccaagggtgcccagtggatgcgccagattgtgtcctttgacaagctcaagctgaccaacaacctgctggatgacaatggccacatcattctcaactctatgcaccgctaccagccccgtttccacgtggtcttcgtggacccacgcaaggacagtgagcgctatgcccaggagaacttcaagtccttcatcttcacagagacccagttcacagcagtgacagcctatcagaaccacaggatcacccagctgaaaatcgccagcaacccttttgccaaaggctttagagagagtgacctggactcctggcctgtggccccacggcccctgctcagtgtcccagcccggagtcacagcagcctcagtccctgtgtgctgaagggtgccacagacagggagaaagaccccaacaaagcttcagcttccacctccaagacccctgcttggctccatcatcagctgctgcccccacctgaggtcctgctggccccggccacctacaggcctgtcacgtatcagagcctgtactctggagccccgagccacctagggatcccaaggacccgaccagcaccataccccctccccaacatccgggctgatagggatcaaggaggcctgcctctcccagctgggctggggctcctgtcccccactgtggtgtgcctggggcctggccaggactcccagtagtaatgaactagtccgtaacttgaaagtatttcgatttcttggctttatatatcttgtggaaaggacgaaataagtgcggatcgccgcggagt

SEQ ID NO: 1892 - DNA, 6839 bp, Homo sapiens
  source 1..6839: mol_type = genomic DNA
accgccaccatgccagaaatgacagagaatgagacgcctacaaaaaagcagcacagaaagaaaaaccgggagacacacaatgcagtggagaggcatagaaagaagaaaattaatgctgggataaacagaataggagagctgatcccatgttctcctgccctgaagcagagcaagaatatgatcctggaccaagcctttaaatatataacagaattgaaaaggcaaaatgatgaactcctgcttaatggaggaaacaatgaacaagctgaagaaataaaaaagctacggaaacaactggaagaaatccaaaaagaaaatggccgatatattgaattactgaaagctaatgacatatgcttatatgatgacccgacaattcactggaaaggaaatcttaaaaactcaaaggtctctgttgttattcctagtgaccaggttcaaaaaaaaattattgtttattccaacgggaatcagcctggtggaaacagccagggaacagctgttcaggggataacttttaatgttagtcataatttacaaaagcagaccgccaatgtggtgccagtacagaggacttgcaatcttgtgactcctgtatctatttctggagtttacccttctgaaaacaagccatggcatcagaccacagttcctgcattggctaccaaccagcctgttcctctttgtcttcctgctgccatttctgctcagagtattctcgagcttcccacctctgaaagcgaatcaaatgtgcttggtgccactagtggctcactgattgctgtttcaattgaatctgagcctcaccaacatcattctttgcacacatgcctaaatgatcaaaattcttctgaaaataagaatggacaagagaaccccaaagtattgaagaaaatgaccccttgtgttacaaacatcccccacagctcctcagcaactgccactaaagtgcaccatggaaacaagtcctgcctgagcatacaggacttcagaggtgattttcaaaacacttttgttgtttcagttaccaccacagtctgctcgcagcctcccagaactgcaggtgattcttctccaatgagcattagtaagagtgcagacttgacaagtacagctacagtggtggcatcatctgcccctggagtagggaaggccaccattcctataagcactctttcgggaaaccctttggacaatggttggactctttcttgttctttgccttcttcaagtgttagtacttcagatttgaaaaacattaatagccttacacgaatctcttcagctggaaacacacagacaacgtggactactttgcaactggcaggaaacactattcagcccttaagccagacaccatcttctgctgtgactccagtattaaatgagtctggtactagccccaccacaagcaaccacagtagatatgtggctacagacatcaacttgaataattcctttccagcagatgggcagccagttgagcaagtagttgtaacattgccttcttgtccatctttacctatgcagccactaattgcccagccacaagttaaatctcagcctcccaaaaatatccttccactgaattcagcaatgcaagtgattcagatggctcagccagttgggtcagctgttaattcagctccaactaatcaaaatgttataattcttcagccacctagcaccaccccatgcccaacagtgatgagggcagaagtttccaaccaaacagtaggtcaacagatagtaatcatacaggctgctaatcagaatcctttgccactcctccctgctccacctcctggttctgttcgactccccatcaatggagccaatactgtaatagggtctaataattcagtgcaaaatgttccaacaccacagacttttggaggaaagcatcttgtccacatattaccaagaccttcatctttatcagcgtctaactcaacacaaactttttctgttaccatgtcaaaccaacagcctcaaaccatttctttaaatggacagctctttgctttgcagcctgtgatgtcttcatcaggaactacaaatcaaacccctatgcaaattattcaacccaccaccagcgaagatccaaataccaatgttgccctgaatacatttggtgctttggccagcctcaatcaaagcatatcacagatggctgggcaaagctgtgtacaattgtctattagccagcctgccaattctcaaactgctgcaaatagtcaaaccactacagctaactgtgtttcattaacaacaactgcagcacctcctgtgacaacagatagttcagccacactagctagtacttataatctagtgagtacttcctcaatgaacactgttgcttgtttgcctaacatgaaatctaaaaggttgaataagaagccaggtggcaggaaacacttagcagcaaacaagtcagcgtgtcccctgaattcagtcagagatgtgagcaagttagactgccccaacactgaaggctcagcagagccaccctgtaatgatggactgctagaaagcttccctgctgtgttaccatctgtctctgtgtctcaggcaaatagtgtgagtgtttctgcttcacattctttgggtgttctaagctctgaatcattaatacctgagtctgtatcgaaatctaagtcagcagaaaagtccagcccaccctcccaagaatctgtaacaagtgaacattttgcaatggccgcagcaaaatccaaagattctacccctaatctacaacaagagacatctcaggataaaccaccaagtagtttagcattatcagatgctgccaaaccctgcgcttcagccaatgtattgattccatctccaagtgatcctcacattttggtttctcaggttcctggtttgtcatctacaacaagcactacaagtactgactgtgtttctgaggtagaaatcattgctgaaccttgcagagttgagcaagattcatcagatacaatgcaaaccacaggtctcttaaaggggcaaggtttaactacattgctatctgatcttgctaaaaaaaaaaaccctcagaaatcatctctttctgatcagatggatcatcctgacttttcttcagaaaatcctaaaatagttgattcaagtgtgaatttacatcccaaacaggaactattactgatgaacaatgatgatagagatcctccacagcatcattcctgcctccctgatcaagaggttattaatggttctttgatcaacggtagacaggccgactctcccatgtcaaccagctctggcagtagtcgtagtttctcagttgcatccatgcttcctgaaacaacaagagaagatgtgaccagcaatgcaacaactaatacatgtgacagctgtacctttgtagagcaaactgatatagtagctcttgcagcaagagctatttttgaccaggagaaccttgagaaggggagagttggcctccaggctgatataagggaagttgcttcaaagccttctgaagcatcattgttagagggagacccacccttcaaatcacagatacctaaagagagtggcacaggacaggcagaagcaacaccaaatgaatttaattctcagggttcaattgaagcaactatggagaggccccttgagaaaccaagttgttctctaggaattaaaacatcaaatgcatctttacaggattcaacttctcagccaccaagcatcaccagtttaagtgtgaataatcttatccatcagagcagcatcagccatcctctggccagctgtgcgggtttatccccaacttcagagcaaacaactgtgcctgcaacggttaatctgaccgtttcatctagctcctatggcagtcaacctcctggaccatctctgatgactgaatattcccaagaacagctaaatactatgactagtaccataccaaattcacagattcaagagccactcttaaagccaagccatgaaagccgtaaggattctgctaagcgtgctgtccaagatgaccttttactgtcttcagctaaacgtcaaaagcactgtcagccagcccccctcaggcttgaaagtatgtccctgatgagcagaactccagacaccatttctgaccaaactcaaatgatggtcagtcagatccctcctaattcttcaaactcagttgtgcctgttagcaacccagctcatggagatggccttacacgattatttccacctagtaacaactttgtgactcctgcattgaggcaaactgaagttcagtgtggttctcagccttcagttgctgaacagcagcaaacccaggcaagtcagcatctacaggccctgcagcagcatgttccagctcaaggtgtatctcaccttcatagtaaccatctctacataaagcagcagcagcagcagcagcagcagcagcagcagcaacagcaacaacaacaagcagggcagttaagagagaggcatcacttatatcaaatgcagcatcatgtacctcatgcagagagctctgtccactctcagccccataatgtccaccaacagaggactctgcaacaggaagttcagatgcagaaaaagaggaatcttgttcagggcacccagacctctcagctttccttacaaccaaagcaccatggaactgaccaatcccgatccaagactggccagccacatccccaccatcagcagatgcagcaacaaatgcagcaacactttggaagctcccagacagagaagagctgtgaaaacccttcaactagtcggaaccatcataaccatccccagaaccatctcaatcaagatattatgcaccaacagcaggatgttggaagcagacagcaaggttcaggggtttcatctgaacatgtatctggccataatccaatgcagaggcttttgacatcaagaggcttagagcagcaaatggtgtcccaaccaagtattgtgactagatcttcagacatgacctgtactccacacaggccagagagaaatagagtttcaagttattctgctgaggcactcattggaaagacatcttctaattcagagcagagaatggggatatcaattcagggttccagagtttcagatcagcttgaaatgagaagctatcttgatgttcccagaaataagagtttggctattcataatatgcagggtcgtgtggaccatactgtggcctcagatatccgcctttctgattgtcagacgtttaaaccaagtggagctagtcaacagccccagagtaattttgaagtacaatcttcaagaaacaatgaaataggtaaccctgtatcatcattgcggagtatgcagtcccaggcttttcgaattagtcaaaacactggccccccaccaattgaccgtcaaaagagattatcttacccaccagttcagagcatcccaacaggaaatggtattccatcaagggacagtgaaaatacttgtcaccaaagtttcatgcagagcttacttgcccctcacctcagtgatcaggtcattgggagccagaggtcactctcagaacatcagaggaatacacagtgtggtccatcctctgcaattgaatataattgtcccccaactcatgaaaatgtccatattagaagagagagtgagagtcagaatagggaaagttgtgacatgtcgttaggtgcaattaacaccaggaacagcaccttgaatattcctttttcaagttcctcttcctcaggagatattcaaggtcgaaacacaagccccaatgtttctgtacagaaatccaatcccatgaggattactgagagtcatgccaccaagggccacatgaaccctccagtcacaaccaacatgcatggggttgcaaggccagcgttgccacatccatctgtgtctcatggaaatggcgatcaaggccctgctgtacgtcaagctaattcttcagttccccagagatcaaggcatcccctgcaagacagcagtggttccaaaattcgtcagcctgaaaggaatcgttctggaaaccaaaggcaaagtactgtctttgatccaagtcttccccatcttcctctctctactggtggcagtatgattcttggacgtcaacaacctgccacagagaagagaggaagtattgttcgtttcatgcctgatagcccacaagtacctaatgataattcaggtcctgaccagcatacactatcacaaaattttggtttttcttttattcctgagggtggcatgaatccaccaataaatgctaatgcttctttcattccacaggttactcagcctagtgccactcgaactccagccctcatcccggtagatccgcaaaatactctgccctccttctatcctccatactctcctgctcatcctacactgtccaatgatatttcaatcccctattttcctaatcagatgttctcaaatcctagcacagagaaggtaaacagtggaagtttaaataaccgatttggatcaattttatctcctcccagacctgttgggtttgctcaaccaagttttcctcttctcccagatatgccaccaatgcacatgaccaactctcacttatccaattttaatatgacatctttgtttccagaaatagccacagcgcttcctgatggctcagcaatgtcacctttgcttacaatagcaaattcctctgcctctgactcttccaagcagtcctcaaacagacctgcccataacataagccatattctaggtcatgattgcagttcagctgtttagtaatgaactagtccgtaacttgaaagtatttcgatttcttggctttatatatcttgtggaaaggacgacaaccttagacctaaggaacggaa

SEQ ID NO: 1893 - DNA, 1034 bp, Homo sapiens
  source 1..1034: mol_type = genomic DNA
accgccaccatgaaggggcagcagaaaacagctgaaacggaagaggggacagtgcagattcaggaaggtgcagtggctactggggaagacccaaccagtgtggctattgccagcatccagtcagctgccaccttccctgaccccaacgtcaagtacgtcttccgaactgagaatgggggccaggtgatgtacagggtgatccaggtgtctgaggggcagctggatggccaaactgagggaactggcgccatcagtggctaccctgccactcaatccatgacccaggcggtgatccagggtgctttcaccagtgatgatgcagttgacacggaggggacagctgctgagacgcactatacttacttccccagcacggcagtgggagatggggcagggggtaccacatcggggagtacagctgctgttgttactacccagggctcagaggcactgctggggcaggcgacccctcctggcactggtcaattctttgtgatgatgtcaccacaagaagtactgcagggaggaagccagcgctcaattgcccctaggactcacccttattccccgaagtcagaagctccccggacgactcgggatgagaaacgcagggctcagcataatgaagtggagcgtcgccgccgagacaagatcaacaactggatcgtgcagctctccaagataatcccagactgctctatggagagcaccaagtctggccagagtaaaggtgggattctatccaaagcttgtgattatatccaggagcttcggcagagtaaccaccgcttgtctgaagaactgcagggacttgaccaactgcagctggacaatgacgtgcttcgacaacaggtggaagatcttaaaaacaagaatctgctgcttcgagctcagttgcggcaccacggattagaggtcgtcatcaagaatgacagcaactagtaatgaactagtccgtaacttgaaagtatttcgatttcttggctttatatatcttgtggaaaggacgagagcggctgtgctggaccatgctt

SEQ ID NO: 1894 - DNA, 2621 bp, Homo sapiens
  source 1..2621: mol_type = genomic DNA
accgccaccatggctctcacccagggacaggtgacattcagggatgtggctatagaattctctcaggaggagtggacatgcctggaccccgctcagaggactttgtacagggacgtgatgttggagaattataggaacctggcctccctgggaatctcttgttttgacctcagtattatctctatgttggagcaagggaaggagcctttcactttggagagccaagtacaaatagcaggaaacccagatggatgggaatggatcaaagctgtgatcacagctctctcttccgaatttgtaatgaaagatttactacacaaagggaagagtaatacaggagaagtattccaaacagtgatgttggaaagacaggaaagccaagacattgaaggatgttccttcagggaagtccagaaaaatacacatggccttgagtatcaatgcagagatgctgaaggaaattacaaaggagtgcttttgacccaagaaggcaatctcactcatggaagagatgaacatgataaaagagatgcaagaaacaagcttattaaaaatcagcttggattaagccttcagtcacatctgcctgaactgcagctttttcaatatgaagggaaaatttatgaatgtaatcaggttgagaagtctttcaacaataattcctcagtttcaccacctcaacaaatgccttataatgtcaaaacccacatttctaagaaatatctcaaagattttatctcttctttattactcacacaggggcaaaaagcaaataattggggaagcccttacaaatctaatggatgtggcatggtctttcctcaaaattcacaccttgcaagtcatcagagaagtcatactaaagagaaaccttacaaatgttatgagtgtggcaaagcctttagaacacgttcaaacctaactacccatcaggtgatccatactggcgaaaaacgttacaaatgtaatgagtgtggtaaggtctttagtcgaaattcacaactctcacaacatcagaaaattcacactggagagaaaccttataaatgtaacgaatgtggcaaggtcttcactcagaattcacaccttgtaagacatcgaggaattcatactggagagaaaccttacaagtgtaatgagtgtgggaaagcctttagagctcgttcaagcttagctatccatcaggcaacccacagtggagaaaaaccttacaaatgtaatgaatgtggcaaggtcttcactcaaaattcacaccttacaaatcactggagaattcacactggagagaaaccttacaagtgtaatgagtgcggcaaagcctttggtgttcgttcaagcctagctattcatctggtaattcacaccggagaaaagccttacaaatgtcatgaatgcggcaaggtctttaggcgtaattcacaccttgcaaggcatcagctaattcatactggagagaaaccttataagtgtaatgagtgtggcaaagcctttagagcacattcaaacctaactacccatcaggtcatccatactggagaaaagccttacaaatgtaatgaatgtggcaaggtcttcactcaaaattcacaccttgcaaatcatcaaagaattcatactggagtgaagccttatatgtgtaatgagtgcggcaaagccttcagtgtgtattcaagcctaactacccatcaggtcatccatactggagaaaaaccttacaaatgtaatgagtgtggcaaggtcttcactcagaattcacaccttgcaagacatcggggaattcatactggagagaaaccttataaatgtaatgaatgtggcaaggtctttaggcataattcatacctttcaaggcatcagcgaattcatactggagagaaaccttacaagtataatgagtatggcaaagcctttagtgaacattcaaacctaactacccatcaggtcatccatactggtgaaaaaccttacaaatgtaatgagtgtggcaaggtcttcactcagaattcacaccttgcaagacatcggagagttcatactggaggtaaaccttaccagtgtaatgaatgtggcaaagcctttagtcaaacatcaaagcttgcaaggcatcagagagttcatactggagagaaaccatatgagtgtaatcagtgtgggaaagcctttagtgtccgttcaagcctaactacccatcaggcaatccatactggaaaaaaaccttacaaatgcaatgagtgtgggaaggtcttcactcagaattcacaccttgcaagacatcggggaattcatactggagagaaaccttacaagtgtaatgagtgtggcaaagcctttagtcaaacttcaaaacttgcaaggcatcagagaattcataccggagagaaaccatatgagtgtgggaaaccctttagtatctgttcaagcctaactacccatcagacaatccatactggtgggaaaccttacaaatgtaacgtgtggaaagttctaaagtcagagttcaaaccttgcaagccatcacagaattcatagtaatgaactagtccgtaacttgaaagtatttcgatttcttggctttatatatcttgtggaaaggacgaggccctaacaccgcccgttcgacc

SEQ ID NO: 1895 - DNA, 2624 bp, Homo sapiens
  source 1..2624: mol_type = genomic DNA
accgccaccatggctctcacccagggacaggtgacattcagggatgtggctatagaattctctcaggaggagtggacatgcctggaccccgctcagaggactttgtacagggacgtgatgttggagaattataggaacctggcctccctggcaggaatctcttgttttgacctcagtattatctctatgttggagcaagggaaggagcctttcactttggagagccaagtacaaatagcaggaaacccagatggatgggaatggatcaaagctgtgatcacagctctctcttccgaatttgtaatgaaagatttactacacaaagggaagagtaatacaggagaagtattccaaacagtgatgttggaaagacaggaaagccaagacattgaaggatgttccttcagggaagtccagaaaaatacacatggccttgagtatcaatgcagagatgctgaaggaaattacaaaggagtgcttttgacccaagaaggcaatctcactcatggaagagatgaacatgataaaagagatgcaagaaacaagcttattaaaaatcagcttggattaagccttcagtcacatctgcctgaactgcagctttttcaatatgaagggaaaatttatgaatgtaatcaggttgagaagtctttcaacaataattcctcagtttcaccacctcaacaaatgccttataatgtcaaaacccacatttctaagaaatatctcaaagattttatctcttctttattactcacacaggggcaaaaagcaaataattggggaagcccttacaaatctaatggatgtggcatggtctttcctcaaaattcacaccttgcaagtcatcagagaagtcatactaaagagaaaccttacaaatgttatgagtgtggcaaagcctttagaacacgttcaaacctaactacccatcaggtgatccatactggcgaaaaacgttacaaatgtaatgagtgtggtaaggtctttagtcgaaattcacaactctcacaacatcagaaaattcacactggagagaaaccttataaatgtaacgaatgtggcaaggtcttcactcagaattcacaccttgtaagacatcgaggaattcatactggagagaaaccttacaagtgtaatgagtgtgggaaagcctttagagctcgttcaagcttagctatccatcaggcaacccacagtggagaaaaaccttacaaatgtaatgaatgtggcaaggtcttcactcaaaattcacaccttacaaatcactggagaattcacactggagagaaaccttacaagtgtaatgagtgcggcaaagcctttggtgttcgttcaagcctagctattcatctggtaattcacaccggagaaaagccttacaaatgtcatgaatgcggcaaggtctttaggcgtaattcacaccttgcaaggcatcagctaattcatactggagagaaaccttataagtgtaatgagtgtggcaaagcctttagagcacattcaaacctaactacccatcaggtcatccatactggagaaaagccttacaaatgtaatgaatgtggcaaggtcttcactcaaaattcacaccttgcaaatcatcaaagaattcatactggagtgaagccttatatgtgtaatgagtgcggcaaagccttcagtgtgtattcaagcctaactacccatcaggtcatccatactggagaaaaaccttacaaatgtaatgagtgtggcaaggtcttcactcagaattcacaccttgcaagacatcggggaattcatactggagagaaaccttataaatgtaatgaatgtggcaaggtctttaggcataattcatacctttcaaggcatcagcgaattcatactggagagaaaccttacaagtataatgagtatggcaaagcctttagtgaacattcaaacctaactacccatcaggtcatccatactggtgaaaaaccttacaaatgtaatgagtgtggcaaggtcttcactcagaattcacaccttgcaagacatcggagagttcatactggaggtaaaccttaccagtgtaatgaatgtggcaaagcctttagtcaaacatcaaagcttgcaaggcatcagagagttcatactggagagaaaccatatgagtgtaatcagtgtgggaaagcctttagtgtccgttcaagcctaactacccatcaggcaatccatactggaaaaaaaccttacaaatgcaatgagtgtgggaaggtcttcactcagaattcacaccttgcaagacatcggggaattcatactggagagaaaccttacaagtgtaatgagtgtggcaaagcctttagtcaaacttcaaaacttgcaaggcatcagagaattcataccggagagaaaccatatgagtgtgggaaaccctttagtatctgttcaagcctaactacccatcagacaatccatactggtgggaaaccttacaaatgtaacgtgtggaaagttctaaagtcagagttcaaaccttgcaagccatcacagaattcatagtaatgaactagtccgtaacttgaaagtatttcgatttcttggctttatatatcttgtggaaaggacgattggcatcctagcggctgtaactg

SEQ ID NO: 1896 - DNA, 1910 bp, Homo sapiens
  source 1..1910: mol_type = genomic DNA
accgccaccatgagtgaaaggagaagatctgcagtcgccctgagctcgcgagcacatgccttctccgttgaagccttgatcggctcaaataaaaaacggaaactgcgagactgggaggagaaggggctggacctgtctatggaggcgctgagccccgcgggcccactcggagacacggaggacgcggcggcacacggcctggagcctcacccggattctgagcagagcactggttcagattctgaggtcctcactgagcggacttcctgctccttcagtactcacactgacctggcctctggtgctgcaggccctgtgcctgctgccatgtcttccatggaggagattcaggtggagctgcaatgtgctgacctctggaagcggttccatgatattggaactgaaatgatcatcaccaaagcaggcaggaggatgtttcctgccatgagagtgaaaatcactggcctagatccacatcagcagtactacatagcaatggacattgtgcctgtggacaataaaagatacagatatgtgtatcatagctccaagtggatggtggctggcaatgctgattcccctgtgcccccaagagtttatatacaccctgattctctagcttctggagacacctggatgagacaggtggtcagttttgacaaactcaagcttaccaacaatgagttggatgatcaaggacatatcattctgcactctatgcacaaataccagcctcgagttcatgtgattcgcaaagacttcagcagtgacctttcacccactaagcctgttcctgttggggatggggtgaaaacgttcaactttcctgagactgtgttcaccacagttacggcctatcagaatcagcagattaccagattaaaaattgaccgaaacccttttgctaaaggattcagagattctgggagaaacagaactggacttgaagccatcatggagacatatgcattctggagacctcctgtgcgcacactcaccttcgaagacttcaccaccatgcagaagcagcaaggaggcagcacaggcacttccccaaccacctccagcactgggacaccatccccttcggcttcttctcatcttttatctccatcctgttctcctccaacttttcatctggcccccaacactttcaatgtgggctgccgagaaagccagctgtgtaatctaaacctctctgattatccaccatgtgcccgaagcaacatggctgccttgcagagctacccagggctgagtgacagtggctacaacaggcttcagagtggcaccacttcagccactcagccctctgaaaccttcatgcctcagaggactccatccctgatctcaggaataccaactcctccctcgttgcctggcaacagcaagatggaagcctacggtggccagctggggtcctttcccacttcccagtttcagtatgtcatgcaggcaggcaatgctgcctccagctcctcatcaccacacatgttcgggggcagccacatgcagcagagctcctacaatgccttctcccttcacaacccttacaacctgtatggatacaatttccccacttcccctaggctagctgcaagcccggaaaaactgagcgcctctcaaagcactttactctgttcttctccttccaacggggcctttggagagaggcagtacctgccgtcagggatggagcacagcatgcacatgattagcccttcacccaataaccaacaggcaaccaacacttgtgatggccggcagtatggggcagttccaggctcctcctcccagatgtccgtgcacatggtttagtaatgaactagtccgtaacttgaaagtatttcgatttcttggctttatatatcttgtggaaaggacgaacggagacctacactgggtagact

SEQ ID NO: 1897 - DNA, 2060 bp, Homo sapiens
  source 1..2060: mol_type = genomic DNA
accgccaccatgatcaatgcccaggaattgctgacactggaggatgttactgtggagttcacctgggaggagtggcagctcctgggcccttttcagaaggatttgtaccgggatgtgatgttggagatctacagcaacctgctatcaatgggttatcaagtcagcaaaccagatgcactctccaagttggaacgaggagaagaaccatggacaatggaagatgaaaggcacagtcgaatctgtccagaaaacaacgaagttgatgatcatctgcaggatcacttggaaaatcaaaggatgctgaagagtgtggaacaataccatgaacataatgcatttggaaatactgcctctcaaaccaaaagcctttgtcttttcagggaaaatcatgatacatttgagttatatataaaaactttgaaatcaaatttaagtttagtcaaccagaacaaaagctgtgaaattaacaactctactaaatttagtggagatgggaaatcatttcttcatggtaactatgaagaactttattctgcagctaaattctctgtaagtacaaaagccaatagcactaaatcccaagtcagtaagcatcagagaactcatgaaatagaaaaaaaccacgtatgcagtgaatgtgggaaagcgtttgtcaagaagtctcagctcactgatcatgagagagttcatacaggagaaaaaccttatggatgtactttgtgtgcaaaagtgttctccagaaagtccaggctaaatgaacatcaaagaattcataaaagagagaaatcttttatatgcagtgaatgtggaaaagtcttcactatgaagagccgtctgattgaacatcagcgaactcatactggagagaaaccctacatatgcaatgaatgtggaaaaggcttcccaggcaagcgtaatctcattgtacatcagcgaaatcatactggagagaaatcctatatatgtagtgaatgtggaaaaggcttcactgggaagagcatgcttattatacatcagcgaactcatacaggagagaagccctacatctgtagtgaatgtgggaaaggcttcaccacaaaacactatgtcatcatacatcaacgaaatcatacaggagagaaaccatatatatgcaatgaatgtgggaaaggcttcaccatgaagagccgtatgatcgaacatcaacgaactcatacaggagagaaaccctacatatgcagtgaatgtggaaaaggctttcccaggaagagtaatcttattgtacatcagagaaatcatacagtagagaagtcatatctatgtagtgaatgtggaaaaggttttactgtgaaaagcatgctcatcatacatcagcgaactcatacaggagagaagccctacacatgcagtgaatgtgggaaaggcttccccttgaagagtcggctgattgtacatcagcgaactcatactggagagaaaccttacaggtgcagtgaatgtgggaaaggtttcattgtgaatagcggactgatgttacatcagcgaactcatactggagagaaaccgtacatatgcaatgaatgtggaaaaggttttgcctttaagagcaatcttgttgtacaccagcgaactcatactggagagaaaccctttatgtgcagtgaatgtggaaaaggcttcaccatgaaacgctatctcattgtacatcagcaaattcatacagaagagaaatcttgtatatgtagtgaatgtggaagaggctttgccaaggaaacagagcttgctttacataagcaagttcatactggagaaaaaccttatggatgtaatgaatgtggtaaaggcttcactatgaagagccgtctaattgttcatcaacgaactcatacaggagagaaaccctttgtatgcagtgaatgtagaaaagccttctcctcaaagagaaatctcattgtacatcagcgaactcataatggaaacaaaccctagtaatgaactagtccgtaacttgaaagtatttcgatttcttggctttatatatcttgtggaaaggacgattatgcagaagcgtgattaggaca

SEQ ID NO: 1898 - DNA, 1925 bp, Homo sapiens
  source 1..1925: mol_type = genomic DNA
accgccaccatggccgagaagcgaaggggctcgccgtgcagcatgctaagcctcaaggcgcacgctttctcggtggaggcgctgatcggcgccgagaagcagcaacagcttcagaagaagcggcgaaaactgggcgccgaagaggcggcgggggccgtggacgacggaggctgcagccgcggcggcggcgcgggcgaaaagggttcttctgagggagacgaaggcgctgcgctcccgccgccggctggggcgacgtctgggccggctcggagtggcgcagacctggagcgcggagccgcgggcggctgtgaggacggcttccagcagggagcttcccctctggcgtcaccgggaggctcccccaaggggtctccggcgcgctccctggcccggcccgggacccctctgccctcgccgcaggccccgcgggtggatctgcagggagccgagctctggaagcgctttcatgagataggcactgagatgatcatcaccaaggccggcaggcgcatgtttccagcaatgagagtgaagatctctggattagatcctcaccagcaatattacattgccatggatattgtaccagtggacaacaaaagatacaggtatgtttaccacagttcgaaatggatggtggcaggtaatgctgactcgcctgtgccaccccgtgtgtacattcatccagactcgcctgcctcgggggagacttggatgagacaagttatcagcttcgacaagctgaagctcaccaacaatgaactggatgaccaaggccatattattcttcattctatgcacaaataccaaccgcgagtgcacgtcatccgtaaagactgtggagacgatctttctcccatcaagcctgttccatccggggagggagtaaaggcattctcctttccagaaactgtcttcacaaccgtcactgcctatcagaatcagcagattactcgcctgaagatagataggaatccatttgctaaaggcttccgagactccgggcgcaacagaatgggtttggaagccttggtggaatcatatgcattctggcgaccatcactacggactctgacctttgaagatatccctggaattcccaagcaaggcaatgcaagttcctccaccttgctccaaggtactgggaatggcgttcctgccactcaccctcaccttttgtctggctcctcttgctcctctcctgccttccatctggggcccaacaccagccagctgtgtagtctggcccctgctgactattctgcctgtgcccgctcaggcctcaccctcaaccgatacagcacatctttggcagagacctacaacaggctcaccaaccaggctggtgagacctttgccccgcccaggactccctcctatgtgggcgtgagcagcagcacctccgtgaacatgtccatgggtggcactgatggggacaccttcagctgcccacagaccagcttatccatgcagatttcgggaatgtccccccagctccagtatatcatgccatcaccctccagcaatgccttcgccactaaccagacccatcagggttcctataatacttttagattacacagcccctgtgcactatatggatataacttctccacatcccccaaactggctgccagtcctgagaaaattgtttcttcccaaggaagtttcttggggtcctcaccgagtgggaccatgacggatcggcagatgttgccccctgtggaaggagtgcacctgcttagcagtgggggtcagcagagtttctttgactctaggaccctaggaagcttaactctgtcatcatctcaagtatctgcacatatggtctagtaatgaactagtccgtaacttgaaagtatttcgatttcttggctttatatatcttgtggaaaggacgatttgttatatattaacaacgatcc

SEQ ID NO: 1899 - DNA, 1448 bp, Homo sapiens
  source 1..1448: mol_type = genomic DNA
accgccaccatggccatgagtgagctgggcactcggaagcccagcgatggcactgtttctcatctgctcaatgtggtggagagtgagcttcaggcagggagggaaaaaggcgaccctacggagaagcaacttcagatcatcctggaggatgcacctctctggcagagattcaaggaagtcactaatgagatgattgtgaccaagaatggcagacggatgtttccagtcctaaagattagtgtcacagggttggaccccaatgccatgtactccctcctgctggactttgtccctacggacagtcaccgctggaagtacgtcaacggggaatgggtgcccgctggcaagccagaggtctccagccacagctgcgtctacattcacccggactcccccaactttggggcccactggatgaaagctcccatctccttcagcaaagtgaagctgaccaacaagctcaatggaggcgggcagataatgttgaattctctgcataaatatgaaccccaggttcacatagtgcgtgttggaagtgcccatcgaatggtaacaaactgctccttccctgaaacccagttcatagccgtgactgcctatcagaatgaggagataacggctctcaaaatcaagtacaatccttttgccaaagccttcttggatgccaaggaaagaaatcacctaagagacgtaccggaggctatctctgagagccagcatgtgacctattctcacttgggaggctggatcttttccaatccagatggagtgtgcacagcaggaaactccaattaccagtatgccgctcctctgcctctgcctgctccccacacccaccatggctgtgagcactattcgggtctccgaggacaccggcaggctccctacccttctgcgtacatgcacagaaaccattctccctcagtgaatttgatagaaagctcaagcaataatctgcaagttttctcgggacctgacagctggacttccttatcctccacaccccatgccagcatcctgtctgtaccccacaccaacggaccaatcaatccagggcccagcccctacccgtgcctgtggaccatcagcaatggtgccggaggccccagtgggccaggcccggaggtgcacgccagcaccccaggagcatttctcctcggaaacccagctgtgacttcacccccttctgtgctctccacccaagcacccacttcggctggtgtggaggttctgggggagccctcgctaaccagcattgctgtgtccacctggacagcagtggcctcgcatcccttcgcgggctggggtggcccaggagcgggtgggcaccattctccttcctcactggatggttagtaatgaactagtccgtaacttgaaagtatttcgatttcttggctttatatatcttgtggaaaggacgattcgtttctggataaagagaaact

SEQ ID NO: 1900 - DNA, 1601 bp, Homo sapiens
  source 1..1601: mol_type = genomic DNA
accgccaccatgctgtcactctcacccatcctcctctacacatgtgagatgtttcaggacccagtggcttttaaggatgtggctgtgaacttcacccaggaggagtgggctttgctggatatttcccagaagaatctctacagggaagtgatgctggaaactttctggaacctgacctctataggaaaaaagtggaaagaccagaacattgaatatgagtaccaaaaccccaggagaaacttcaggagtgtcacagaagagaaagtcaatgaaattaaagaagacagtcattgtggagaaacttttaccccagttccagatgacaggctgaacttccagaagaagaaagcttctcctgaagtaaaatcatgtgacagctttgtgtgtgaagttggcctaggtaactcatcttctaatatgaacatcagaggtgacactggacacaaggcatgtgaatgtcaggaatatggaccaaagccatggaagagtcaacaacctaaaaaagccttcagatatcacccctccttgagaacacaagaaagggatcacactggaaagaaaccctatgcttgtaaagaatgtggaaaaaacattatttaccattcaagcattcaaagacacatggtagtgcacagtggggatggaccttataaatgtaagttttgtgggaaagcattccattgtctcagtttatatcttatccatgaaagaactcacactggagagaaaccgtatgaatgtaaacaatgtggtaaatcttttagttattctgctacccatcgaatacatgaaagaactcacattggagaaaagccttatgaatgtcaggaatgtgggaaagcattccatagtcccagatcctgtcacagacatgaaaggagtcacatgggagagaaggcttatcaatgtaaggaatgtggaaaagcattcatgtgtccccgttatgttcgtagacatgaaaggacccactctaggaaaaaactttatgaatgtaagcagtgtgggaaagcattatcctctcttacaagttttcaaacacacataagaatgcactctggagaaagaccttatgaatgtaagacatgtgggaaaggcttttattctgccaagtcatttcaaagacatgaaaaaactcacagtggagagaaaccgtataaatgcaagcaatgtggtaaagccttcactcgttccggttcctttcgatatcatgaaaggactcacactggagagaaaccctatgagtgtaagcaatgtgggaaagccttcagatctgccccaaatcttcaattgcatggtaggactcacactggagagaaaccgtatcaatgtaaggaatgtgggaaagctttcagatctgcctcacaacttcgaatccatcgtaggattcacactggagagaaaccctatgaatgtaagaaatgtgggaaagccttcagatatgtccagaactttcgatttcatgaaaggacacaaacacataagaatgcactctggagaaagaccttatagtaatgaactagtccgtaacttgaaagtatttcgatttcttggctttatatatcttgtggaaaggacgaggcgccgtcggcgctggatgcagc

SEQ ID NO: 1901 - DNA, 1280 bp, Homo sapiens
  source 1..1280: mol_type = genomic DNA
accgccaccatgcccaaacctatcatggtcatacccactttggcctccctggcttctccaactacactacagtcccagatgcttgggggcctaggacaggatgttttgttaaataattcactcactcctaaatatcttggctgtaagcaagacaacagctcttcccctaagcccagctccgtgttcagaaatggattctctggcattaagaagccttggcacagatgtcacgtctgcaaccaccacttccagttcaaacagcaccttcgagaccacatgaatacacacaccaacagacgcccttacagttgtcggatttgtcgcaagtcctatgtacgtcctggcagcctgagcacacacatgaaacttcatcatggtgagaaccgtctgaagaaactcatgtgttgtgagttttgtgcaaaagtgtttggccacatccgagtctattttggccatctgaaagaagtgcatagggttgtgatcagcactgagcctgcgcccagtgaactgcagccaggagacataccaaagaacagagacatgagtgtgcgaggcatggagggatcattggagagggaaaacaagtccaacctggaagaagacttccttctaaaccaggcagacgaagtcaaattacaaatcaaatgtggtcgttgtcagattactgctcagtcttttgcggaaataaaatttcatttacttgatgttcatggagaggaaattgagggcaggctacaagaagggaccttcccaggaagcaaggggactcaggaagagttggtgcagcacgctagccccgactggaaaaggcatcctgagagagggaagccggagaaggttcattcctcctccgaggaatcacatgcatgtccaagactgaaaaggcagctccaccttcatcagaatggcgtggaaatgctcatggaaaatgaaggaccccagtcaggaaccaacaagccaagggaaacctgccagggccctgagtgtcctggcctccacacgtttctcttgtggtcccattcaggctttaactgcctgctttgtgcagagatgctgggacggaaagaggacctcctccaccactggaagcaccagcataactgtgaggacccttccaaactgtgggctattttaaatacggtctccaaccagggagtgatcgaactttccagtgaagctgagaaatagtaatgaactagtccgtaacttgaaagtatttcgatttcttggctttatatatcttgtggaaaggacgatctaacgcttgtaacagccttgga

SEQ ID NO: 1902 - DNA, 2558 bp, Homo sapiens
  source 1..2558: mol_type = genomic DNA
accgccaccatggatagtgaatcaaacatcccttctggaacaatacagagtaggaaaggtttgcagaataagagtcagtttaggaccattgcaccaaaaattgtgcccaaagtcctaacgtccagaatgctgccatgtcattcaccatcacgctctgatcaggtgaatctgggaccctccatcaactccaagctgctggggatgtccacccagaactatgccctgatgcaggttgctggccaggaggggacattttctcttgttgctctgccacatgttgcctcagctcagccaattcagaaacccagaatgtccctacctgaaaacctgaaacttcctattcctagatatcaaccccctagaaatagcaaagcatcaagaaagaaacccatcctgatctttcctaagagtggctgtagcaaagctcctgcccaaacccaaatgtgtcctcagatgtccccttccccacctcaccaccctgaactcctgtacaaacccagtccatttgaggaagtaccatcactagagcaagccccagccagcattagcacagctgcgctgaccaatggaagtgaccatggggacttgagaccaccagtgaccaacacccatggcagtctgaaccctcctgctaccccagcatcatccacaccagaggagcctgccaagcaggacctcacagctctttcagggaaagcacactttgtaagcaagataacatctagtaaaccttctgctgttgccagtgaaaaatttaaagaacaagttgatcttgcaaaaaccatgaccaatttatcaccaaccattcttggcaatgcagttcagttgatctcttcagtccccaaagggaaactgccaatcccaccctactcaagaatgaagacaatggaggtttacaaaatcaaatcagatgctaacattgcaggtttttctttaccaggacctaaggccgactgtgataagataccctccaccacagaaggctttaatgcagccaccaaggtggcaagcaggctacctgttccacaagtgtcacagcagagtgcctgtgaaagtgccttttgtccacccaccaaacttgatcttaaccacaaaacaaaactgaacagtggagcagcaaagagaaaaggaagaaaacggaaggtaccagatgaaattttggcatttcagggaaaaaggaggaaatatatcattaataagtgtagagatggtaaagaaagagtaaaaaatgatccccaagaattcagagaccaaaagctggggaccctgaaaaaataccgtagcattatgcccaaacctatcatggtcatacccactttggcctccctggcttctccaactacactacagtcccagatgcttgggggcctaggacaggatgttttgttaaataattcactcactcctaaatatcttggctgtaagcaagacaacagctcttcccctaagcccagctccgtgttcagaaatggattctctggcattaagaagccttggcacagatgtcacgtctgcaaccaccacttccagttcaaacagcaccttcgagaccacatgaatacacacaccaacagacgcccttacagttgtcggatttgtcgcaagtcctatgtacgtcctggcagcctgagcacacacatgaaacttcatcatggtgagaaccgtctgaagaaactcatgtgttgtgagttttgtgcaaaagtgtttggccacatccgagtctattttggccatctgaaagaagtgcatagggttgtgatcagcactgagcctgcgcccagtgaactgcagccaggagacataccaaagaacagagacatgagtgtgcgaggcatggagggatcattggagagggaaaacaagtccaacctggaagaagacttccttctaaaccaggcagacgaagtcaaattacaaatcaaatgtggtcgttgtcagattactgctcagtcttttgcggaaataaaatttcatttacttgatgttcatggagaggaaattgagggcaggctacaagaagggaccttcccaggaagcaaggggactcaggaagagttggtgcagcacgctagccccgactggaaaaggcatcctgagagagggaagccggagaaggttcattcctcctccgaggaatcacatgcatgtccaagactgaaaaggcagctccaccttcatcagaatggcgtggaaatgctcatggaaaatgaaggaccccagtcaggaaccaacaagccaagggaaacctgccagggccctgagtgtcctggcctccacacgtttctcttgtggtcccattcaggctttaactgcctgctttgtgcagagatgctgggacggaaagaggacctcctccaccactggaagcaccagcataactgtgaggacccttccaaactgtgggctattttaaatacggtctccaaccagggagtgatcgaactttccagtgaagctgagaaatagtaatgaactagtccgtaacttgaaagtatttcgatttcttggctttatatatcttgtggaaaggacgataatcactattagaccactgaggg

SEQ ID NO: 1903 - DNA, 2441 bp, Homo sapiens
  source 1..2441: mol_type = genomic DNA
accgccaccatgctgccatgtcattcaccatcacgctctgatcaggtgaatctgggaccctccatcaactccaagctgctggggatgtccacccagaactatgccctgatgcaggttgctggccaggaggggacattttctcttgttgctctgccacatgttgcctcagctcagccaattcagaaacccagaatgtccctacctgaaaacctgaaacttcctattcctagatatcaaccccctagaaatagcaaagcatcaagaaagaaacccatcctgatctttcctaagagtggctgtagcaaagctcctgcccaaacccaaatgtgtcctcagatgtccccttccccacctcaccaccctgaactcctgtacaaacccagtccatttgaggaagtaccatcactagagcaagccccagccagcattagcacagctgcgctgaccaatggaagtgaccatggggacttgagaccaccagtgaccaacacccatggcagtctgaaccctcctgctaccccagcatcatccacaccagaggagcctgccaagcaggacctcacagctctttcagggaaagcacactttgtaagcaagataacatctagtaaaccttctgctgttgccagtgaaaaatttaaagaacaagttgatcttgcaaaaaccatgaccaatttatcaccaaccattcttggcaatgcagttcagttgatctcttcagtccccaaagggaaactgccaatcccaccctactcaagaatgaagacaatggaggtttacaaaatcaaatcagatgctaacattgcaggtttttctttaccaggacctaaggccgactgtgataagataccctccaccacagaaggctttaatgcagccaccaaggtggcaagcaggctacctgttccacaagtgtcacagcagagtgcctgtgaaagtgccttttgtccacccaccaaacttgatcttaaccacaaaacaaaactgaacagtggagcagcaaagagaaaaggaagaaaacggaaggtaccagatgaaattttggcatttcagggaaaaaggaggaaatatatcattaataagtgtagagatggtaaagaaagagtaaaaaatgatccccaagaattcagagaccaaaagctggggaccctgaaaaaataccgtagcattatgcccaaacctatcatggtcatacccactttggcctccctggcttctccaactacactacagtcccagatgcttgggggcctaggacaggatgttttgttaaataattcactcactcctaaatatcttggctgtaagcaagacaacagctcttcccctaagcccagctccgtgttcagaaatggattctctggcattaagaagccttggcacagatgtcacgtctgcaaccaccacttccagttcaaacagcaccttcgagaccacatgaatacacacaccaacagacgcccttacagttgtcggatttgtcgcaagtcctatgtacgtcctggcagcctgagcacacacatgaaacttcatcatggtgagaaccgtctgaagaaactcatgtgttgtgagttttgtgcaaaagtgtttggccacatccgagtctattttggccatctgaaagaagtgcatagggttgtgatcagcactgagcctgcgcccagtgaactgcagccaggagacataccaaagaacagagacatgagtgtgcgaggcatggagggatcattggagagggaaaacaagtccaacctggaagaagacttccttctaaaccaggcagacgaagtcaaattacaaatcaaatgtggtcgttgtcagattactgctcagtcttttgcggaaataaaatttcatttacttgatgttcatggagaggaaattgagggcaggctacaagaagggaccttcccaggaagcaaggggactcaggaagagttggtgcagcacgctagccccgactggaaaaggcatcctgagagagggaagccggagaaggttcattcctcctccgaggaatcacatgcatgtccaagactgaaaaggcagctccaccttcatcagaatggcgtggaaatgctcatggaaaatgaaggaccccagtcaggaaccaacaagccaagggaaacctgccagggccctgagtgtcctggcctccacacgtttctcttgtggtcccattcaggctttaactgcctgctttgtgcagagatgctgggacggaaagaggacctcctccaccactggaagcaccagcataactgtgaggacccttccaaactgtgggctattttaaatacggtctccaaccagggagtgatcgaactttccagtgaagctgagaaatagtaatgaactagtccgtaacttgaaagtatttcgatttcttggctttatatatcttgtggaaaggacgatctcctgaacagtcctatcccacc

SEQ ID NO: 1904 - DNA, 1814 bp, Homo sapiens
  source 1..1814: mol_type = genomic DNA
accgccaccatggagaacctgaagtctggagtgtatcctctcaaggaagcaagtggatgccctggggctgacaggaatcttctggtgtactctttttatgaaaaggggccattgacatttagggatgtggccatagaattttctctggaggagtggcaatgcctggacactgctcagcaggatttgtatagaaaagtgatgttagagaactacagaaacctggtcttcttggcaggtattgctgtttctaagccagacctgatcacctgtctagagcaaggaaaagagccctggaatatgaagagacatgcgatggtagatcaacccccagttacatattctcattttgcccaagacctttggccagagcagggcataaaagattctttccaagaagtcatattgagaagatatggaaaatgtggacatgaagatttacagttaagaacaggctgtaaaagtgtggatgagtgtaatctgcacaaagaatgttatgatgaactaaaccagtgtttgacaactacccagagtgaaatatttcaatatgataaatatgtgaatgtcttttataaattttcaaatccaaatatacaaaagataagacatactggaaagaagcctttcaaatgtaaaaaatgtgacaaatcgttttgcatgcttttacacctaactcaacataaaagaattcatattagggaaaattcttaccaatgtgaagaatgtggtaaagtctttaactggttctcaacccttactagacacagaagaattcatactggagagaaaccctacaaatgtgaacaatgtggcaaagcttttaagcagtcctcaacccttactacacataagataattcatactggagagaaaccctacagatgtgaagaatgtggcaaaacctttaaccggtcctcacaccttactacacataaaagaattcatactggagagaaaccctacagatgtgaagaatgtggcagagcttttaaccggtcctcacaccttactacacataagattattcatactggagagaaaccctacaaatgtgaagaatgtggcaaagcttttaaccaatcctcaacccttactacacataagataattcatgctggagagaaaccttacaaatgtgaagaatgtggcaaagctttttaccgattctcataccttactaaacataagataattcatactggagagaaattctacaaatgtgaagaatgtggcaaaggctttaattggtcctcgacccttactaaacataaaagaattcatactggagagaaaccctacaaatgtgaacaatgtggcaaagcttttaatgagtcctcaaaccttactgcacataagataattcatactggagagaaaccctacaaatgtgaagaatgtggcaaagcctttaaccggtccccaaaacttactgcacataaggtaattcattctggagagaaaccctacaaatgtgaagaatgtggcaaagcttttaaccaattctcaaaccttactaaacataagataactcatattggagatacatcttacaaatacctagaatgtgataaagcctttagccagtcttcaactcttactaaacataaggtaattcatactggagagaaaccctacaactgtgaagaatacggcaaagctttcaaccagtcctcaaaccttattgaacaaagtaattcatactggagagaaaccctacaaatgtagtaatgaactagtccgtaacttgaaagtatttcgatttcttggctttatatatcttgtggaaaggacgatcgatgttgcgtccgggctcatag

SEQ ID NO: 1905 - DNA, 2123 bp, Homo sapiens
  source 1..2123: mol_type = genomic DNA
accgccaccatgatgtttcaggattcagtggcctttgaggatgtggctgtgaccttcacccaagaggagtgggctttgctggatccttcccagaaaaatctctgtagagatgtgatgcaagaaaccttcaggaacctggcctctatagggaaaaaatggaaaccccagaacatatatgtagagtacgaaaatctaaggagaaacctaagaattgtgggagagagactctttgaaagtaaagaaggtcatcagcatggagaaattttgacccaggttccagatgacatgctgaagaaaacaactactggagtaaaatcatgcgaaagcagtgtgtatggagaagtaggcagtgctcattcatctcttaataggcacatcagagatgacactggacacaaggcatatgagtatcaagaatatggacagaaaccatataaatgtaaatactgtaaaaaacctttcaactgtctctcctctgttcagacacatgaaagggctcatagtggaaggaaactctatgtttgtgaggaatgcggaaaaacatttatttcccattcaaaccttcaaagacacaggataatgcaccgtggagatggaccttataagtgtaaattttgtgggaaagccttgatgtttctcagtttgtatcttatccacaaacgaactcacactggagagaaaccatatcaatgtaaacagtgtggtaaagcctttagtcattctagtagccttcgaatacatgaaagaactcacactggggagaagccttataaatgtaatgaatgtgggaaagcattccatagttccacatgccttcatgctcataaaagaactcacactggggagaagccatatgaatgtaaacagtgtgggaaagccttcagctcttcccattcctttcaaatacatgaaagaactcacacgggggagaagccatatgaatgtaaggaatgtggaaaagcattcaagtgtcccagttctgttcgcagacatgaaagaacccactctaggaaaaaaccctatgaatgtaaacattgtgggaaagtattatcttatcttaccagctttcaaaaccacttgggaatgcacactggagagatatctcataaatgtaagatatgtgggaaagccttttattctcccagttcacttcaaacacatgaaaaaactcacactggagagaaaccctataaatgcaaccaatgtggtaaagcctttaattcttccagttccttccgatatcatgaaagaactcacactggagagaaaccttacgagtgtaagcaatgtgggaaagccttcagatctgcctcactccttcaaacacatggtaggactcacacgggagagaaaccctatgcatgtaaggaatgtggaaaaccatttagtaatttctctttctttcaaatacatgaaaggatgcacagagaagagaagccgtatgaatgtaagggttatgggaaaacattcagtttgcccagtttatttcatagacatgaaaggactcacactggaggaaaaacctatgaatgcaagcagtgtggcagatccttcaactgttcgagctcctttcgatatcatggaaggactcacactggagagaaaccctatgaatgcaagcaatgtggaaaagccttcagatctgcctcacagcttcaaattcatggaaggactcacactggagagaaaccttatgaatgtaagcagtgtgggaaagcctttggatctgcctcacaccttcaaatgcatggaaggactcacactggagagaaaccctatgaatgtaagcagtgtgggaagtcttttggatgtgcctcgcgacttcaaatgcatggaaggactcacactggagagaaaccgtataaatgtaagcaatgtgggaaagcttttggatgtccctcaaaccttcgaaggcatggaaggactcacactggagagaaaccctataaatgtaaccaatgtggtaaagtctttagatgttcttcacaacttcaagtgcatggaagggctcactgcatagacaccccatagtaatgaactagtccgtaacttgaaagtatttcgatttcttggctttatatatcttgtggaaaggacgaccactttcataactgcggaagacc

SEQ ID NO: 1906 - DNA, 2489 bp, Homo sapiens
  source 1..2489: mol_type = genomic DNA
accgccaccatggatcatttgaacgaggcaactcaggggaaagaacattcagaaatgtctaacaatgtgagtgatccgaagggtccaccagccaagattgcccgcctggagcagaacgggagcccgctaggaagaggaaggcttgggagtacaggtgcaaaaatgcagggagtgcctttaaaacactcgggccatctgatgaaaaccaaccttaggaaaggaaccatgctgccagttttctgtgtggtggaacattatgaaaacgccattgaatatgattgcaaggaggagcatgcagaatttgtgctggtgagaaaggatatgcttttcaaccagctgatcgaaatggcattgctgtctctaggttattcacatagctctgctgcccaggccaaagggctaatccaggttggaaagtggaatccagttccactgtcttacgtgacagatgcccctgatgctacagtagcagatatgcttcaagatgtgtatcatgtggtcacattgaaaattcagttacacagttgccccaaactagaagacttgcctcccgaacaatggtcgcacaccacagtgaggaatgctctgaaggacttactgaaagatatgaatcagagttcattggccaaggagtgccccctttcacagagtatgatttcttccattgtgaacagtacttactatgcaaatgtctcagcagcaaaatgtcaagaatttggaaggtggtacaaacatttcaagaagacaaaagatatgatggttgaaatggatagtctttctgagctatcccagcaaggcgccaatcatgtcaattttggccagcaaccagttccagggaacacagccgagcagcctccatcccctgcgcagctctcccatggcagccagccctctgtccggacacctcttccaaacctgcaccctgggctcgtatcaacacctatcagtcctcaattggtcaaccagcagctggtgatggctcagctgctgaaccagcagtatgcagtgaatagacttttagcccagcagtccttaaaccaacaatacttgaaccaccctccccctgtcagtagatctatgaataagcctttggagcaacaggtttcgaccaacacagaggtgtcttccgaaatctaccagtgggtacgcgatgaactgaaacgagcaggaatctcccaggcggtatttgcacgtgtggcttttaacagaactcagggcttgctttcagaaatcctccgaaaggaagaggaccccaagactgcatcccagtctttgctggtaaaccttcgggctatgcagaatttcttgcagttaccggaagctgaaagagaccgaatataccaggacgaaagggaaaggagcttgaatgctgcctcggccatgggtcctgcccccctcatcagcacaccacccagccgtcctccccaggtgaaaacagctactattgccactgaaaggaatgggaaaccagagaacaataccatgaacattaatgcttccatttatgatgagattcagcaggaaatgaagcgtgctaaagtgtctcaagcactgtttgcaaaggttgcagcaaccaaaagccagggatggttgtgcgagctgttacgctggaaagaagatccttctccagaaaacagaaccctgtgggagaacctctccatgatccgaaggttcctcagtcttcctcagccagaacgtgatgccatttatgaacaggagagcaacgcggtgcatcaccatggcgacaggccgccccacattatccatgttccagcagagcagattcagagcccctctcccaccacccttgggaaaggagagtctagaggcgttttcttaccaggcctgccgacccctgcaccatggctcggtgctgctcctcagcaacagcagcagcaacagcaacagcagcagcagcagcagcaggcaccgccgcctccacagccacagcagcagccacagacaggccctcggctccccccacggcaacccacggtggcctctccagcagagtcagatgaggaaaaccgacagaagacccggccacgaacaaaaatttcagtggaagccttgggaatcctccagagtttcatacaagacgtgggcctgtaccctgacgaagaggccatccagactctgtctgcccagctcgaccttcccaagtacaccatcatcaagttctttcagaaccagcggtactatctcaagcaccacggcaaactgaaggacaattccggtttagaggtcgatgtggcagaatataaagaagaggagctgctgaaggatttggaagagagtgtccaagataaaaatactaacacccttttttcagtgaaactagaagaagagctgtcagtggaaggaaacacagacattaatactgatttgaaagactagtaatgaactagtccgtaacttgaaagtatttcgatttcttggctttatatatcttgtggaaaggacgatcagggtgggtaggcagtcctccg

SEQ ID NO: 1907 - DNA, 2522 bp, Homo sapiens
  source 1..2522: mol_type = genomic DNA
accgccaccatgggggtttttgctgtccctcccctcagcgccgacaccatgtggatccaggttcggaccatggacgggaggcagacccacacggtggactcgctgtccaggctgaccaaggtggaggagctgaggcggaagatccaggagctgttccacgtggagccaggcctgcagaggctgttctacaggggcaaacagatggaggacggccataccctcttcgactacgaggtccgcctgaatgacaccatccagctcctggtccgccagagcctcgtgctcccccacagcaccaaggagcgggactccgagctctccgacaccgactccggctgctgcctgggccagagtgagtcagacaagtcctccacccacggtgaggcggccgccgagactgacagcaggccagccgatgaggacatgtgggatgagacggaattggggctgtacaaggtcaatgagtacgtcgatgctcgggacacgaacatgggggcgtggtttgaggcgcaggtggtcagggtgacgcggaaggccccctcccgggacgagccctgcagctccacgtccaggccggcgctggaggaggacgtcatttaccacgtgaaatacgacgactacccggagaacggcgtggtccagatgaactccagggacgtccgagcgcgcgcccgcaccatcatcaagtggcaggacctggaggtgggccaggtggtcatgctcaactacaaccccgacaaccccaaggagcggggcttctggtacgacgcggagatctccaggaagcgcgagaccaggacggcgcgggaactctacgccaacgtggtgctgggggatgattctctgaacgactgtcggatcatcttcgtggacgaagtcttcaagattgagcggccgggtgaagggagccccatggttgacaaccccatgagacggaagagcgggccgtcctgcaagcactgcaaggacgacgtgaacagactctgccgggtctgcgcctgccacctgtgcgggggccggcaggaccccgacaagcagctcatgtgcgatgagtgcgacatggccttccacatctactgcctggacccgcccctcagcagtgttcccagcgaggacgagtggtactgccctgagtgccggaatgatgccagcgaggtggtactggcgggagagcggctgagagagagcaagaagaaggcgaagatggcctcggccacatcgtcctcacagcgggactggggcaagggcatggcctgtgtgggccgcaccaaggaatgtaccatcgtcccgtccaaccactacggacccatcccggggatccccgtgggcaccatgtggcggttccgagtccaggtcagcgagtcgggtgtccatcggccccacgtggctggcatacacggccggagcaacgacggagcgtactccctagtcctggcggggggctatgaggatgatgtggaccatgggaattttttcacatacacgggtagtggtggtcgagatctttccggcaacaagaggaccgcggaacagtcttgtgatcagaaactcaccaacaccaacagggcgctggctctcaactgctttgctcccatcaatgaccaagaaggggccgaggccaaggactggcggtcggggaagccggtcagggtggtgcgcaatgtcaagggtggcaagaatagcaagtacgcccccgctgagggcaaccgctacgatggcatctacaaggttgtgaaatactggcccgagaaggggaagtccgggtttctcgtgtggcgctaccttctgcggagggacgatgatgagcctggcccttggacgaaggaggggaaggaccggatcaagaagctggggctgaccatgcagtatccagaaggctacctggaagccctggccaaccgagagcgagagaaggagaacagcaagagggaggaggaggagcagcaggaggggggcttcgcgtcccccaggacgggcaagggcaagtggaagcggaagtcggcaggaggtggcccgagcagggccgggtccccgcgccggacatccaagaaaaccaaggtggagccctacagtctcacggcccagcagagcagcctcatcagagaggacaagagcaacgccaagctgtggaatgaggtcctggcgtcactcaaggaccggccggcgagcggcagcccgttccagttgttcctgagtaaagtggaggagacgttccagtgtatctgctgtcaggagctggtgttccggcccatcacgaccgtgtgccagcacaacgtgtgcaaggactgcctggacagatcctttcgggcacaggtgttcagctgccctgcctgccgctacgacctgggccgcagctatgccatgcaggtgaaccagcctctgcagaccgtcctcaaccagctcttccccggctacggcaatggccggtagtaatgaactagtccgtaacttgaaagtatttcgatttcttggctttatatatcttgtggaaaggacgagatagctcagcactctgagtttac

SEQ ID NO: 1908 - DNA, 2483 bp, Homo sapiens
  source 1..2483: mol_type = genomic DNA
accgccaccatgtggatccaggttcggaccatggacgggaggcagacccacacggtggactcgctgtccaggctgaccaaggtggaggagctgaggcggaagatccaggagctgttccacgtggagccaggcctgcagaggctgttctacaggggcaaacagatggaggacggccataccctcttcgactacgaggtccgcctgaatgacaccatccagctcctggtccgccagagcctcgtgctcccccacagcaccaaggagcgggactccgagctctccgacaccgactccggctgctgcctgggccagagtgagtcagacaagtcctccacccacggtgaggcggccgccgagactgacagcaggccagccgatgaggacatgtgggatgagacggaattggggctgtacaaggtcaatgagtacgtcgatgctcgggacacgaacatgggggcgtggtttgaggcgcaggtggtcagggtgacgcggaaggccccctcccgggacgagccctgcagctccacgtccaggccggcgctggaggaggacgtcatttaccacgtgaaatacgacgactacccggagaacggcgtggtccagatgaactccagggacgtccgagcgcgcgcccgcaccatcatcaagtggcaggacctggaggtgggccaggtggtcatgctcaactacaaccccgacaaccccaaggagcggggcttctggtacgacgcggagatctccaggaagcgcgagaccaggacggcgcgggaactctacgccaacgtggtgctgggggatgattctctgaacgactgtcggatcatcttcgtggacgaagtcttcaagattgagcggccgggtgaagggagccccatggttgacaaccccatgagacggaagagcgggccgtcctgcaagcactgcaaggacgacgtgaacagactctgccgggtctgcgcctgccacctgtgcgggggccggcaggaccccgacaagcagctcatgtgcgatgagtgcgacatggccttccacatctactgcctggacccgcccctcagcagtgttcccagcgaggacgagtggtactgccctgagtgccggaatgatgccagcgaggtggtactggcgggagagcggctgagagagagcaagaagaaggcgaagatggcctcggccacatcgtcctcacagcgggactggggcaagggcatggcctgtgtgggccgcaccaaggaatgtaccatcgtcccgtccaaccactacggacccatcccggggatccccgtgggcaccatgtggcggttccgagtccaggtcagcgagtcgggtgtccatcggccccacgtggctggcatacacggccggagcaacgacggagcgtactccctagtcctggcggggggctatgaggatgatgtggaccatgggaattttttcacatacacgggtagtggtggtcgagatctttccggcaacaagaggaccgcggaacagtcttgtgatcagaaactcaccaacaccaacagggcgctggctctcaactgctttgctcccatcaatgaccaagaaggggccgaggccaaggactggcggtcggggaagccggtcagggtggtgcgcaatgtcaagggtggcaagaatagcaagtacgcccccgctgagggcaaccgctacgatggcatctacaaggttgtgaaatactggcccgagaaggggaagtccgggtttctcgtgtggcgctaccttctgcggagggacgatgatgagcctggcccttggacgaaggaggggaaggaccggatcaagaagctggggctgaccatgcagtatccagaaggctacctggaagccctggccaaccgagagcgagagaaggagaacagcaagagggaggaggaggagcagcaggaggggggcttcgcgtcccccaggacgggcaagggcaagtggaagcggaagtcggcaggaggtggcccgagcagggccgggtccccgcgccggacatccaagaaaaccaaggtggagccctacagtctcacggcccagcagagcagcctcatcagagaggacaagagcaacgccaagctgtggaatgaggtcctggcgtcactcaaggaccggccggcgagcggcagcccgttccagttgttcctgagtaaagtggaggagacgttccagtgtatctgctgtcaggagctggtgttccggcccatcacgaccgtgtgccagcacaacgtgtgcaaggactgcctggacagatcctttcgggcacaggtgttcagctgccctgcctgccgctacgacctgggccgcagctatgccatgcaggtgaaccagcctctgcagaccgtcctcaaccagctcttccccggctacggcaatggccggtagtaatgaactagtccgtaacttgaaagtatttcgatttcttggctttatatatcttgtggaaaggacgatatggtggttcggtccttggatag

SEQ ID NO: 1909 - DNA, 983 bp, Homo sapiens
  source 1..983: mol_type = genomic DNA
accgccaccatgggaccactgacatttatggatgtggccatagagttctctttggaggagtggcagtgcctggacactgcacagcggaatgtatataggcatgtgatgttagagaactacagaaacctggttttcttggctctgtgttctcgttttgcccaagacctttggctagagcagaacataaaagattctttccaaaaagtgacactgagcagatatggaaaatatggacataagaatttacagttaagaaaaggctgtaaaagtgtggatgagtgtaagggacaccaaggaggttttaatggacttaaccaatgtttgaaaattaccacaagcaaaatatttcaatgtaataaatatgtaaaagtcatgcataaattttcaaattcaaatagacacaagataagacatactgaaaataaacatttcagatgtaaagaatgtgacaaatcactttgcatgctttcacgcctaactcaacataaaaaaattcatactagagagaatttctacaaatgtgaagagtgtggaaaaacctttaactggtccacaaacctttctaaacctaagaaaattcatactggagaaaaaccctacaaatgtgaagtatgtggaaaagcctttcaccaatcctcaatccttactaaacataagataattcgtactggagaaaaaccctataaatgtgcacactgtggcaaagcctttaaacagtcctcacaccttactagacataagataattcatactgaagagaaaccctacaaatgtgaacaatgtggcaaggtctttaagcagtccccaacccttactaaacatcagataatttatactggagaggaaccatacaaatgtgaggaatgtggcaaagcttttaacctatcttagtaatgaactagtccgtaacttgaaagtatttcgatttcttggctttatatatcttgtggaaaggacgagttgttgtggagacttaacgcgtt

SEQ ID NO: 1910 - DNA, 290 bp, Homo sapiens
  source 1..290: mol_type = genomic DNA
accgccaccatgggaccactgacatttatggatgtggccatagagttctctttggaggagtggcagtgcctggacactgcacagcggaatgtatataggcatgtgatgttagagaactacagaaacctggttttcttggccagacctgattacctgtctggaacaaggaaaagagccctggaatatgaagagacatagtaatgaactagtccgtaacttgaaagtatttcgatttcttggctttatatatcttgtggaaaggacgaaggaagcaatcgacggtctggtgc

SEQ ID NO: 1911 - DNA, 404 bp, Homo sapiens
  source 1..404: mol_type = genomic DNA
accgccaccatgggaccactgacatttatggatgtggccatagagttctctttggaggagtggcagtgcctggacactgcacagcggaatgtatataggcatgtgatgttagagaactacagaaacctggttttcttggctgtagcatttacctttgatctcagtggactcaacattttgtcattccaaagtatcctgccatttgtttcagcactttatgtcatgggaaacagaaaccagtgtctgcaaaagcacctagaagccagaaataaagatctctgtgttctcgttttgcccaagacctttggctagtaatgaactagtccgtaacttgaaagtatttcgatttcttggctttatatatcttgtggaaaggacgaaggcacatatcggcgtttagatat

SEQ ID NO: 1912 - DNA, 482 bp, Homo sapiens
  source 1..482: mol_type = genomic DNA
accgccaccatgggaccactgacatttatggatgtggccatagagttctctttggaggagtggcagtgcctggacactgcacagcggaatgtatataggcatgtgatgttagagaactacagaaacctggttttcttggacctgattacctgtctggaacaaggaaaagagccctggaatatgaagagacatgagatggtggtagccaaacattcagctgtagcatttacctttgatctcagtggactcaacattttgtcattccaaagtatcctgccatttgtttcagcactttatgtcatgggaaacagaaaccagtgtctgcaaaagcacctagaagccagaaataaagatctctgtgttctcgttttgcccaagacctttggctagtaatgaactagtccgtaacttgaaagtatttcgatttcttggctttatatatcttgtggaaaggacgatgcgagacattcacagggagcaca

SEQ ID NO: 1913 - DNA, 965 bp, Homo sapiens
  source 1..965: mol_type = genomic DNA
accgccaccatggatgtggccatagagttctctttggaggagtggcagtgcctggacactgcacagcggaatgtatataggcatgtgatgttagagaactacagaaacctggttttcttggctctgtgttctcgttttgcccaagacctttggctagagcagaacataaaagattctttccaaaaagtgacactgagcagatatggaaaatatggacataagaatttacagttaagaaaaggctgtaaaagtgtggatgagtgtaagggacaccaaggaggttttaatggacttaaccaatgtttgaaaattaccacaagcaaaatatttcaatgtaataaatatgtaaaagtcatgcataaattttcaaattcaaatagacacaagataagacatactgaaaataaacatttcagatgtaaagaatgtgacaaatcactttgcatgctttcacgcctaactcaacataaaaaaattcatactagagagaatttctacaaatgtgaagagtgtggaaaaacctttaactggtccacaaacctttctaaacctaagaaaattcatactggagaaaaaccctacaaatgtgaagtatgtggaaaagcctttcaccaatcctcaatccttactaaacataagataattcgtactggagaaaaaccctataaatgtgcacactgtggcaaagcctttaaacagtcctcacaccttactagacataagataattcatactgaagagaaaccctacaaatgtgaacaatgtggcaaggtctttaagcagtccccaacccttactaaacatcagataatttatactggagaggaaccatacaaatgtgaggaatgtggcaaagcttttaacctatcttagtaatgaactagtccgtaacttgaaagtatttcgatttcttggctttatatatcttgtggaaaggacgaacgtgctttcatagttacactttg

SEQ ID NO: 1914 - DNA, 1061 bp, Homo sapiens
  source 1..1061: mol_type = genomic DNA
accgccaccatgggaccactgacatttatggatgtggccatagagttctctttggaggagtggcagtgcctggacactgcacagcggaatgtatataggcatgtgatgttagagaactacagaaacctggttttcttggacctgattacctgtctggaacaaggaaaagagccctggaatatgaagagacatgagatggtggtagccaaacattcagctctgtgttctcgttttgcccaagacctttggctagagcagaacataaaagattctttccaaaaagtgacactgagcagatatggaaaatatggacataagaatttacagttaagaaaaggctgtaaaagtgtggatgagtgtaagggacaccaaggaggttttaatggacttaaccaatgtttgaaaattaccacaagcaaaatatttcaatgtaataaatatgtaaaagtcatgcataaattttcaaattcaaatagacacaagataagacatactgaaaataaacatttcagatgtaaagaatgtgacaaatcactttgcatgctttcacgcctaactcaacataaaaaaattcatactagagagaatttctacaaatgtgaagagtgtggaaaaacctttaactggtccacaaacctttctaaacctaagaaaattcatactggagaaaaaccctacaaatgtgaagtatgtggaaaagcctttcaccaatcctcaatccttactaaacataagataattcgtactggagaaaaaccctataaatgtgcacactgtggcaaagcctttaaacagtcctcacaccttactagacataagataattcatactgaagagaaaccctacaaatgtgaacaatgtggcaaggtctttaagcagtccccaacccttactaaacatcagataatttatactggagaggaaccatacaaatgtgaggaatgtggcaaagcttttaacctatcttagtaatgaactagtccgtaacttgaaagtatttcgatttcttggctttatatatcttgtggaaaggacgagcctttggaaccgggcctgaaaca

SEQ ID NO: 1915 - DNA, 2426 bp, Homo sapiens
  source 1..2426: mol_type = genomic DNA
accgccaccatggcggcgactactgccaaccccgaaatgacatcagatgtaccatcactgggtccagccattgcctctggaaactctggacctggaattcaaggtggaggagccattgtccagagggctattaagcggcgaccagggctggattttgatgatgatggagaagggaacagtaaatttttgaggtgtgatgatgatcagatgtctaacgataaggagcggtttgccagggaaaatcacagtgaaattgaacggcggcgacggaacaagatgacagcctacatcacagaactgtcagatatggtacccacctgtagtgccctggctcgaaaaccagacaagctaaccatcttacgcatggcagtttctcacatgaagtccttgcggggaactggcaacacatccactgatggctcctataagccgtctttcctcactgatcaggaactgaaacatttgatcttggaggcagcagatggctttctgtttattgtctcatgtgagacaggcagggtggtgtatgtgtctgactccgtgactcctgttttgaaccagccacagtctgaatggtttggcagcacactctatgatcaggtgcacccagatgatgtggataaacttcgtgagcagctttccacttcagaaaatgccctgacagggcgtatcctggatctaaagactggaacagtgaaaaaggaaggtcagcagtcttccatgagaatgtgtatgggctcaaggagatcgtttatttgccgaatgaggtgtggcagtagctctgtggacccagtttctgtgaataggctgagctttgtgaggaacagatgcaggaatggacttggctctgtaaaggatggggaacctcacttcgtggtggtccactgcacaggctacatcaaggcctggcccccagcaggtgtttccctcccagatgatgacccagaggctggccagggaagcaagttttgcctagtggccattggcagattgcaggtaactagttctcccaactgtacagacatgagtaatgtttgtcaaccaacagagttcatctcccgacacaacattgagggtatcttcacttttgtggatcaccgctgtgtggctactgttggctaccagccacaggaactcttaggaaagaatattgtagaattctgtcatcctgaagaccagcagcttctaagagacagcttccaacaggtagtgaaattaaaaggccaagtgctgtctgtcatgttccggttccggtctaagaaccaagaatggctctggatgagaaccagctcctttactttccagaacccttactcagatgaaattgagtacatcatctgtaccaacaccaatgtgaagaactctagccaagaaccacggcctacactctccaacacaatccagaggccacaactaggtcccacagctaatttacccctggagatgggctcaggacagctggcacccaggcagcagcaacagcaaacagaattggacatggtaccaggaagagatggactggccagctacaatcattcccaggtggttcagcctgtgacaaccacaggaccagaacacagcaagccccttgagaagtcagatggtttatttgcccaggatagagatccaagattttcagaaatctatcacaacatcaatgcggatcagagtaaaggcatctcctccagcactgtccctgccacccaacagctattctcccagggcaacacattccctcctaccccccggccggcagagaatttcaggaatagtggcctagcccctcctgtaaccattgtccagccatcagcttctgcaggacagatgttggcccagatttcccgccactccaaccccacccaaggagcaaccccaacttggacccctactacccgctcaggcttttctgcccagcaggtggctacccaggctactgctaagactcgtacttcccagtttggtgtgggcagctttcagactccatcctccttcagctccatgtccctccctggtgccccaactgcatcgcctggtgctgctgcctaccctagtctcaccaatcgtggatctaactttgctcctgagactggacagactgcaggacaattccagacacggacagcagagggtgtgggtgtctggccacagtggcagggccagcagcctcatcatcgttcaagttctagtgagcaacatgttcaacaaccgccagcacagcaacctggccagcctgaggtcttccaggagatgctgtccatgctgggagatcagagcaacagctacaacaatgaagaattccctgatctaactatgtttccccccttttcagaatagtaatgaactagtccgtaacttgaaagtatttcgatttcttggctttatatatcttgtggaaaggacgaaagtcacccgttcgcgtatcgttg

SEQ ID NO: 1916 - DNA, 2465 bp, Homo sapiens
  source 1..2465: mol_type = genomic DNA
accgccaccatggcggcgactactgccaaccccgaaatgacatcagatgtaccatcactgggtccagccattgcctctggaaactctggacctggaattcaaggtggaggagccattgtccagagggctattaagcggcgaccagggctggattttgatgatgatggagaagggaacagtaaatttttgaggtgtgatgatgatcagatgtctaacgataaggagcggtttgccaggtcggatgatgagcagagctctgcggataaagagagacttgccagggaaaatcacagtgaaattgaacggcggcgacggaacaagatgacagcctacatcacagaactgtcagatatggtacccacctgtagtgccctggctcgaaaaccagacaagctaaccatcttacgcatggcagtttctcacatgaagtccttgcggggaactggcaacacatccactgatggctcctataagccgtctttcctcactgatcaggaactgaaacatttgatcttggaggcagcagatggctttctgtttattgtctcatgtgagacaggcagggtggtgtatgtgtctgactccgtgactcctgttttgaaccagccacagtctgaatggtttggcagcacactctatgatcaggtgcacccagatgatgtggataaacttcgtgagcagctttccacttcagaaaatgccctgacagggcgtatcctggatctaaagactggaacagtgaaaaaggaaggtcagcagtcttccatgagaatgtgtatgggctcaaggagatcgtttatttgccgaatgaggtgtggcagtagctctgtggacccagtttctgtgaataggctgagctttgtgaggaacagatgcaggaatggacttggctctgtaaaggatggggaacctcacttcgtggtggtccactgcacaggctacatcaaggcctggcccccagcaggtgtttccctcccagatgatgacccagaggctggccagggaagcaagttttgcctagtggccattggcagattgcaggtaactagttctcccaactgtacagacatgagtaatgtttgtcaaccaacagagttcatctcccgacacaacattgagggtatcttcacttttgtggatcaccgctgtgtggctactgttggctaccagccacaggaactcttaggaaagaatattgtagaattctgtcatcctgaagaccagcagcttctaagagacagcttccaacaggtagtgaaattaaaaggccaagtgctgtctgtcatgttccggttccggtctaagaaccaagaatggctctggatgagaaccagctcctttactttccagaacccttactcagatgaaattgagtacatcatctgtaccaacaccaatgtgaagaactctagccaagaaccacggcctacactctccaacacaatccagaggccacaactaggtcccacagctaatttacccctggagatgggctcaggacagctggcacccaggcagcagcaacagcaaacagaattggacatggtaccaggaagagatggactggccagctacaatcattcccaggtggttcagcctgtgacaaccacaggaccagaacacagcaagccccttgagaagtcagatggtttatttgcccaggatagagatccaagattttcagaaatctatcacaacatcaatgcggatcagagtaaaggcatctcctccagcactgtccctgccacccaacagctattctcccagggcaacacattccctcctaccccccggccggcagagaatttcagtggcctagcccctcctgtaaccattgtccagccatcagcttctgcaggacagatgttggcccagatttcccgccactccaaccccacccaaggagcaaccccaacttggacccctactacccgctcaggcttttctgcccagcaggtggctacccaggctactgctaagactcgtacttcccagtttggtgtgggcagctttcagactccatcctccttcagctccatgtccctccctggtgccccaactgcatcgcctggtgctgctgcctaccctagtctcaccaatcgtggatctaactttgctcctgagactggacagactgcaggacaattccagacacggacagcagagggtgtgggtgtctggccacagtggcagggccagcagcctcatcatcgttcaagttctagtgagcaacatgttcaacaaccgccagcacagcaacctggccagcctgaggtcttccaggagatgctgtccatgctgggagatcagagcaacagctacaacaatgaagaattccctgatctaactatgtttccccccttttcagaatagtaatgaactagtccgtaacttgaaagtatttcgatttcttggctttatatatcttgtggaaaggacgaagcgtggcgaggcgatccgcgagg

SEQ ID NO: 1917 - DNA, 2471 bp, Homo sapiens
  source 1..2471: mol_type = genomic DNA
accgccaccatggcggcgactactgccaaccccgaaatgacatcagatgtaccatcactgggtccagccattgcctctggaaactctggacctggaattcaaggtggaggagccattgtccagagggctattaagcggcgaccagggctggattttgatgatgatggagaagggaacagtaaatttttgaggtgtgatgatgatcagatgtctaacgataaggagcggtttgccaggtcggatgatgagcagagctctgcggataaagagagacttgccagggaaaatcacagtgaaattgaacggcggcgacggaacaagatgacagcctacatcacagaactgtcagatatggtacccacctgtagtgccctggctcgaaaaccagacaagctaaccatcttacgcatggcagtttctcacatgaagtccttgcggggaactggcaacacatccactgatggctcctataagccgtctttcctcactgatcaggaactgaaacatttgatcttggaggcagcagatggctttctgtttattgtctcatgtgagacaggcagggtggtgtatgtgtctgactccgtgactcctgttttgaaccagccacagtctgaatggtttggcagcacactctatgatcaggtgcacccagatgatgtggataaacttcgtgagcagctttccacttcagaaaatgccctgacagggcgtatcctggatctaaagactggaacagtgaaaaaggaaggtcagcagtcttccatgagaatgtgtatgggctcaaggagatcgtttatttgccgaatgaggtgtggcagtagctctgtggacccagtttctgtgaataggctgagctttgtgaggaacagatgcaggaatggacttggctctgtaaaggatggggaacctcacttcgtggtggtccactgcacaggctacatcaaggcctggcccccagcaggtgtttccctcccagatgatgacccagaggctggccagggaagcaagttttgcctagtggccattggcagattgcaggtaactagttctcccaactgtacagacatgagtaatgtttgtcaaccaacagagttcatctcccgacacaacattgagggtatcttcacttttgtggatcaccgctgtgtggctactgttggctaccagccacaggaactcttaggaaagaatattgtagaattctgtcatcctgaagaccagcagcttctaagagacagcttccaacaggtagtgaaattaaaaggccaagtgctgtctgtcatgttccggttccggtctaagaaccaagaatggctctggatgagaaccagctcctttactttccagaacccttactcagatgaaattgagtacatcatctgtaccaacaccaatgtgaagaactctagccaagaaccacggcctacactctccaacacaatccagaggccacaactaggtcccacagctaatttacccctggagatgggctcaggacagctggcacccaggcagcagcaacagcaaacagaattggacatggtaccaggaagagatggactggccagctacaatcattcccaggtggttcagcctgtgacaaccacaggaccagaacacagcaagccccttgagaagtcagatggtttatttgcccaggatagagatccaagattttcagaaatctatcacaacatcaatgcggatcagagtaaaggcatctcctccagcactgtccctgccacccaacagctattctcccagggcaacacattccctcctaccccccggccggcagagaatttcaggaatagtggcctagcccctcctgtaaccattgtccagccatcagcttctgcaggacagatgttggcccagatttcccgccactccaaccccacccaaggagcaaccccaacttggacccctactacccgctcaggcttttctgcccagcaggtggctacccaggctactgctaagactcgtacttcccagtttggtgtgggcagctttcagactccatcctccttcagctccatgtccctccctggtgccccaactgcatcgcctggtgctgctgcctaccctagtctcaccaatcgtggatctaactttgctcctgagactggacagactgcaggacaattccagacacggacagcagagggtgtgggtgtctggccacagtggcagggccagcagcctcatcatcgttcaagttctagtgagcaacatgttcaacaaccgccagcacagcaacctggccagcctgaggtcttccaggagatgctgtccatgctgggagatcagagcaacagctacaacaatgaagaattccctgatctaactatgtttccccccttttcagaatagtaatgaactagtccgtaacttgaaagtatttcgatttcttggctttatatatcttgtggaaaggacgaaggttcgttcaagaggcagtttcg

SEQ ID NO: 1918 - DNA, 2429 bp, Homo sapiens
  source 1..2429: mol_type = genomic DNA
accgccaccatgacatcagatgtaccatcactgggtccagccattgcctctggaaactctggacctggaattcaaggtggaggagccattgtccagagggctattaagcggcgaccagggctggattttgatgatgatggagaagggaacagtaaatttttgaggtgtgatgatgatcagatgtctaacgataaggagcggtttgccaggtcggatgatgagcagagctctgcggataaagagagacttgccagggaaaatcacagtgaaattgaacggcggcgacggaacaagatgacagcctacatcacagaactgtcagatatggtacccacctgtagtgccctggctcgaaaaccagacaagctaaccatcttacgcatggcagtttctcacatgaagtccttgcggggaactggcaacacatccactgatggctcctataagccgtctttcctcactgatcaggaactgaaacatttgatcttggaggcagcagatggctttctgtttattgtctcatgtgagacaggcagggtggtgtatgtgtctgactccgtgactcctgttttgaaccagccacagtctgaatggtttggcagcacactctatgatcaggtgcacccagatgatgtggataaacttcgtgagcagctttccacttcagaaaatgccctgacagggcgtatcctggatctaaagactggaacagtgaaaaaggaaggtcagcagtcttccatgagaatgtgtatgggctcaaggagatcgtttatttgccgaatgaggtgtggcagtagctctgtggacccagtttctgtgaataggctgagctttgtgaggaacagatgcaggaatggacttggctctgtaaaggatggggaacctcacttcgtggtggtccactgcacaggctacatcaaggcctggcccccagcagatgatgacccagaggctggccagggaagcaagttttgcctagtggccattggcagattgcaggtaactagttctcccaactgtacagacatgagtaatgtttgtcaaccaacagagttcatctcccgacacaacattgagggtatcttcacttttgtggatcaccgctgtgtggctactgttggctaccagccacaggaactcttaggaaagaatattgtagaattctgtcatcctgaagaccagcagcttctaagagacagcttccaacaggtagtgaaattaaaaggccaagtgctgtctgtcatgttccggttccggtctaagaaccaagaatggctctggatgagaaccagctcctttactttccagaacccttactcagatgaaattgagtacatcatctgtaccaacaccaatgtgaagaactctagccaagaaccacggcctacactctccaacacaatccagaggccacaactaggtcccacagctaatttacccctggagatgggctcaggacagctggcacccaggcagcagcaacagcaaacagaattggacatggtaccaggaagagatggactggccagctacaatcattcccaggtggttcagcctgtgacaaccacaggaccagaacacagcaagccccttgagaagtcagatggtttatttgcccaggatagagatccaagattttcagaaatctatcacaacatcaatgcggatcagagtaaaggcatctcctccagcactgtccctgccacccaacagctattctcccagggcaacacattccctcctaccccccggccggcagagaatttcaggaatagtggcctagcccctcctgtaaccattgtccagccatcagcttctgcaggacagatgttggcccagatttcccgccactccaaccccacccaaggagcaaccccaacttggacccctactacccgctcaggcttttctgcccagcaggtggctacccaggctactgctaagactcgtacttcccagtttggtgtgggcagctttcagactccatcctccttcagctccatgtccctccctggtgccccaactgcatcgcctggtgctgctgcctaccctagtctcaccaatcgtggatctaactttgctcctgagactggacagactgcaggacaattccagacacggacagcagagggtgtgggtgtctggccacagtggcagggccagcagcctcatcatcgttcaagttctagtgagcaacatgttcaacaaccgccagcacagcaacctggccagcctgaggtcttccaggagatgctgtccatgctgggagatcagagcaacagctacaacaatgaagaattccctgatctaactatgtttccccccttttcagaatagtaatgaactagtccgtaacttgaaagtatttcgatttcttggctttatatatcttgtggaaaggacgataagtactgtcgacctactgccca

SEQ ID NO: 1919 - DNA, 1730 bp, Homo sapiens
  source 1..1730: mol_type = genomic DNA
accgccaccatggagctgcgctcggagctgcccagcgtgcccggcgcggcgacggcggcggcggcaacagcgacggggccgcctgtggcgtcggtggcgtcggtggcggcagccgcggcggccgctgcatcgctaccggtgagcgtggcaggcggcttgctgcgggggccgccactgttgctgcgggcagccgagaagtacccgcggacccccaagtgcgcgcgctgtcgcaaccatggcgtggtgtcggccctcaagggccacaaacgctactgtcgctggaaggactgcctgtgcgccaagtgcacgctcatcgcggagcgccagcgtgtcatggcggcgcaggtggcgctgcgcaggcagcaggcgcaggaggagaacgaggcgcgcgagctgcagctgctctacggcactgccgaggggctggcgctggccgccgccaacggcatcatccccccgaggcccgcctacgaggtcttcggttcagtgtgcgccgccgacggcgggggacctggagcgggagcgcccgcggggaccggaggcggagcagctggcgcagggggctcagaggccaagttgcagaagtttgacctgtttcctaagacgctgctgcaggcaggccgcccgggcagcccgctgccgccgccggtgaagcccttatcacccgacggcgcagactcggggcccgggacgtcgtccccagaggtgcggcccggctcaggctcggagaacggcgatggcgagtccttttctggttcgcccctagctcgggcctccaaagaggcaggtggcagctgcccaggcagcgctggccctggcggcggcggcgaggaggacagcccgggctccgctagccctctgggctctgaatccggttcagaggctgacaaagaagagggtgaggccgcgccggcgccagggctgggcggaggctcgggtccacggcagcggacgccgctggatatcttgacacgcgtgttcccaggccaccggcgaggcgtcctggagctggtgttgcagggctgcggcggcgacgtggtgcaggccatcgagcaggtgctgaaccaccaccgtgggggcctggcggccggcctgggccctgcggcgcccccagataaggccgccgtgggtgctgcagcagctgcagacgacgcgtggcccagccgcgtcgacgccgccgccgccgccgccgccgccgccggggggcctgggctgcctgcgccgctgcaggcggggcccgccgcacctccgcaccacagacccttgctggccggcgccatggcgcctggggcgctgggctcgctgagcagccgctcggccttctcgccgctgcagcccaacgccagtcacttcggtgccgacgcgggcgcctacccgctgggcgcgccgctcggcctcagccccctgcgcctggcctactccgcggcggcggcgcacagccgcggtctggccttcatggcgccctactccactgccggcttggtgcccacgctcggcttccgcccacccatggactacgcctttagcgatctcatgcgtgaccgctcggccgccgctgctgcggcggtgcacaaggagccgacctacggcggcggcctgtacgggcctatggtcaacggcgctccggagaagcagtagtaatgaactagtccgtaacttgaaagtatttcgatttcttggctttatatatcttgtggaaaggacgacgagaatggaatgcaaaggcggca

SEQ ID NO: 1920 - DNA, 446 bp, Homo sapiens
  source 1..446: mol_type = genomic DNA
accgccaccatgtttccagtgttctctggctgtttccaagagctacaagaaaagaataaatctctggagttggtgtcctttgaggaggtagctgtgcacttcacctgggaggagtggcaggacctggatgatgctcagaggaccctgtacagggacgtgatgctggagacctacagcagcctggtatcattggggcattacattaccaaacctgagatgatcttcaagctagagcaaggagcagagccatggatagtagaagaaaccccaaacctgagactttcaggtggaagcaagaagcaagttttctcaggtatttgccacaggagcctggtggagctccaggaggtttagtaatgaactagtccgtaacttgaaagtatttcgatttcttggctttatatatcttgtggaaaggacgatcgaggattgagcgcaccctgagg

SEQ ID NO: 1921 - DNA, 2696 bp, Homo sapiens
  source 1..2696: mol_type = genomic DNA
accgccaccatgctggagacctacagcagcctggtatcattggggcattacattaccaaacctgagatgatcttcaagctagagcaaggagcagagccatggatagtagaagaaaccccaaacctgagactttcagctgtccagatcattgatgaccttattgaaaggagccatgaaagtcatgatagatttttctggcaaattgtaatcaccaacagcaacacatcaactcaggagagagttgaattaggaaaaacatttaatttgaactcaaaccatgttttaaatctgattataaataatggaaacagttcaggaatgaagcctgggcagtttaatgattgccagaacatgcttttccctattaagcctggggagacacagtctggagagaaacctcatgtctgtgatataaccaggagatcccacagacatcatgaacatcttactcagcatcacaagattcaaactctgctgcagacttttcaatgtaatgaacaagggaaaaccttcaacacggaggcaatgttctttatacataagagggttcatatagtacagacctttggtaaatataatgaatatgagaaagcctgtaataactcagctgttattgtccaagtgataactcaggtaggacagccaacttgctgtagaaagtctgacttcactaaacatcagcagacacacacaggagagaaaccctatgaatgtgttgaatgtgagaaaccctccattagcaaatcagaccttatgctacagtgcaagatgcctactgaggaaaaaccttatgcctgtaactggtgtgaaaaattgttcagctataagtccagcctcattatccatcagagaattcacacaggggaaaagccctatggatgcaatgaatgtggtaaaacctttcgccgtaagtcattcctcactttacatgagagaactcacacaggggataaaccctacaaatgtattgaatgtggaaaaacttttcactgtaagtcacttctcactttacatcacagaactcactcaggggaaaagccctatcagtgtagtgaatgtggaaaaacctttagccagaagtcatacctcacaatacatcatagaactcacacaggggaaaagccctatgcatgtgaccattgtgaagaagcatttagccataagtcaaggcttactgtccatcagagaacacacacaggggaaaaaccgtatgaatgtaatgagtgtggaaaaccctttatcaataagtcaaacctcaggttacatcagagaactcacacaggggaaaaaccctatgaatgcaatgaatgtgggaaaacgtttcaccgtaagtcattcctcactatccatcaatggactcacacaggggaaaaaccctacgaatgcaatgaatgtgggaaaacctttcgctgtaagtcattcctcactgtccatcagagaactcatgctggggaaaaaccatacgcatgtaacgaatgtggaaaaacatatagccacaagtcataccttacagtacatcacagaactcacacaggggaaaaaccctatgaatgtaatgaatgtggaaaatcctttcactgtaagtcattcctaactatacatcagagaactcatgctggcaaaaaaccctatgaatgtaatgaatgtgagaaaacctttatcaataagttaaaccttgggatacacaagagaactcacacaggggaaagaccctatgaatgtaatgaatgtggaaaaacctttcgtcagaagtcaaatctcagcacccatcagggaactcacacaggagagaaaccttacgtatgtaatgaatgtggaaaaacctttcatcgcaagtcattcctcaccatacaccagagaactcacacggggaaaaaccgtatggatgtaatgaatgtggaaaaactttttgtcagaaatcataccttattatacatcagagaactcacaccggggaaaagccctatgaatgtaatgaatgtggaaaatcctttcatcagaaggcaaatcttcagaagcatcaaggtattcacacgggggagaaaccctatgaatgtagcaaatgtggaaaaaccttgtcagaagtcagtcctcactgtacatcatagaacccataccggagaaaaaccttatgaatgtaatgagtgtgggaaaaccttttgtcacaagtcaaacctcagtacgcatcaggggactcactcaggagagaaaccctatgaatgtgatgaatgtaggaaaactttttacgataagacagttctcaccatacatcagagaactcacacaggtgagaagccatttgaatgtaaagaatgtaggaaaaccttctcccagaagtcaaaactctttgtacatcacagaactcacacaggggaaaaaccctttagatgtaatgaatgtaggaaaactttctcccagaagtcaggcctcagtatacatcagagaacacacacaggagaaaaaccttatgaatgtaaggaatgtgggaaaaccttttgccagaagtcacacctcagcaggcatcaacaaacccatataggagagaaatctgacgtagctgaggcaggctatgtgttccctcaaaatcactcttttttcccttagtaatgaactagtccgtaacttgaaagtatttcgatttcttggctttatatatcttgtggaaaggacgacgaagagctcagtgtctgacgagc

SEQ ID NO: 1922 - DNA, 1301 bp, Homo sapiens
  source 1..1301: mol_type = genomic DNA
accgccaccatgcagagcctttccttaggacaaacaagcatttcaaaaggtttgaactacctaaccattatggcaccaggaaacctctggcatatgagaaataactttctctttggttcaagatgttggatgactcgattttcagcagaaaacatcttcaaatcagtttcatttaggctttttggtgtgaagtgtcataatacagacagtgagcctttgaaaaatgaggacctactgaaaaacttacttactatgggagtagatattgacatggcaaggaaacgacagcctggagtttttcataggatgattaccaatgagcaggacctgaagatgttccttctttccaaaggagctagcaaagaagtgatcgctagcatcatatcaagatatccacgagcaataacacgtactcccgagaatctttcaaaacggtgggatctgtggagaaagattgtgacatcagaccttgaaattgtaaatattttggaacgttctcctgaatccttttttcggtccaataacaacctaaacttagagaataatataaagttcctctactcagttggattgacccgtaaatgcctttgtcgattgttgaccaatgcccctcgtaccttctccaatagtcttgatctgaataaacagatggttgaatttttgcaggcagccggtttgtcattgggtcacaatgatcccgcagattttgtcagaaagataatttttaaaaacccttttatcttaattcagagcaccaagcgggtgaaagctaacattgaattcttacggtcaactttcaatttgaacagtgaggaactgctggttctgatatgtggtccaggagctgaaatcctagacctttccaatgactatgccagaagaagctacgcaaacatcaaagagaagctgttttctcttggatgtactgaagaagaggtacagaagtttgtcttaagctatccagatgtgatcttcttggcagagaaaaagtttaatgataaaatagactgcctcatggaagaaaacattagcatttcacaaataatcgaaaatcctcgggttctggattcaagcataagtactttaaaaagtcgaatcaaagaattggtaaatgctggctgtaacttgagtactttaaacatcactcttctatcttggagtaaaaaaagatatgaagctaaattgaaaaagttaagcagatttgcctagtaatgaactagtccgtaacttgaaagtatttcgatttcttggctttatatatcttgtggaaaggacgaacgaaggcgaattatgtaatataa

SEQ ID NO: 1923 - DNA, 1241 bp, Homo sapiens
  source 1..1241: mol_type = genomic DNA
accgccaccatggcaccaggaaacctctggcatatgagaaataactttctctttggttcaagatgttggatgactcgattttcagcagaaaacatcttcaaatcagtttcatttaggctttttggtgtgaagtgtcataatacagacagtgagcctttgaaaaatgaggacctactgaaaaacttacttactatgggagtagatattgacatggcaaggaaacgacagcctggagtttttcataggatgattaccaatgagcaggacctgaagatgttccttctttccaaaggagctagcaaagaagtgatcgctagcatcatatcaagatatccacgagcaataacacgtactcccgagaatctttcaaaacggtgggatctgtggagaaagattgtgacatcagaccttgaaattgtaaatattttggaacgttctcctgaatccttttttcggtccaataacaacctaaacttagagaataatataaagttcctctactcagttggattgacccgtaaatgcctttgtcgattgttgaccaatgcccctcgtaccttctccaatagtcttgatctgaataaacagatggttgaatttttgcaggcagccggtttgtcattgggtcacaatgatcccgcagattttgtcagaaagataatttttaaaaacccttttatcttaattcagagcaccaagcgggtgaaagctaacattgaattcttacggtcaactttcaatttgaacagtgaggaactgctggttctgatatgtggtccaggagctgaaatcctagacctttccaatgactatgccagaagaagctacgcaaacatcaaagagaagctgttttctcttggatgtactgaagaagaggtacagaagtttgtcttaagctatccagatgtgatcttcttggcagagaaaaagtttaatgataaaatagactgcctcatggaagaaaacattagcatttcacaaataatcgaaaatcctcgggttctggattcaagcataagtactttaaaaagtcgaatcaaagaattggtaaatgctggctgtaacttgagtactttaaacatcactcttctatcttggagtaaaaaaagatatgaagctaaattgaaaaagttaagcagatttgcctagtaatgaactagtccgtaacttgaaagtatttcgatttcttggctttatatatcttgtggaaaggacgagtctgtgagtgagctgctatcgga

SEQ ID NO: 1924 - DNA, 2318 bp, Homo sapiens
  source 1..2318: mol_type = genomic DNA
accgccaccatggaaataccaaatccccctacctccaaatgtatcacttactggaaaagaaaagtgaaatctgaatacatgcgacttcgacaacttaaacggcttcaggcaaatatgggtgcaaaggctttgtatgtggcaaattttgcaaaggttcaagaaaaaacccagatcctcaatgaagaatggaagaagcttcgtgtccaacctgttcagtcaatgaagccttgtaccatagagagcattttcccgggatttgcaagccaacatatgttaatgaggtcactgaacacagttgcattggttcccatcatgtattcctggtcccctctccaacagaactttatggtagaagatgagacggttttgtgcaatattccctacatgggagatgaagtgaaagaagaagatgagacttttattgaggagctgatcaataactatgatgggaaagtccatggtgaagaagagatgatccctggatccgttctgattagtgatgctgtttttctggagttggtcgatgccctgaatcagtactcagatgaggaggaggaagggcacaatgacacctcagatggaaagcaggatgacagcaaagaagatctgccagtaacaagaaagagaaagcgacatgctattgaaggcaacaaaaagagttccaagaaacagttcccaaatgacatgatcttcagtgcaattgcctcaatgttccctgagaatggtgtcccagatgacatgaaggagaggtatcgagaactaacagagatgtcagaccccaatgcacttccccctcagtgcacacccaacatcgatggccccaatgccaagtctgtgcagcgggagcaatctctgcactccttccacacacttttttgccggcgctgctttaaatacgactgcttccttcacccttttcatgccacccctaatgtatataaacgcaagaataaagaaatcaagattgaaccagaaccatgtggcacagactgcttccttttgctggaaggagcaaaggagtatgccatgctccacaacccccgctccaagtgctctggtcgtcgccggagaaggcaccacatagtcagtgcttcctgctccaatgcctcagcctctgctgtggctgagactaaagaaggagacagtgacagggacacaggcaatgactgggcctccagttcttcagaggctaactctcgctgtcagactcccacaaaacagaaggctagtccagccccacctcaactctgcgtagtggaagcaccctcggagcctgtggaatggactggggctgaagaatctctttttcgagtcttccatggcacctacttcaacaacttctgttcaatagccaggcttctggggaccaagacgtgcaagcaggtctttcagtttgcagtcaaagaatcacttatcctgaagctgccaacagatgagctcatgaacccctcacagaagaagaaaagaaagcacagattgtgggctgcacactgcaggaagattcagctgaagaaagataactcttccacacaagtgtacaactaccaaccctgcgaccacccagaccgcccctgtgacagcacctgcccctgcatcatgactcagaatttctgtgagaagttctgccagtgcaacccagactgtcagaatcgtttccctggctgtcgctgtaagacccagtgcaataccaagcaatgtccttgctatctggcagtgcgagaatgtgaccctgacctgtgtctcacctgtggggcctcagagcactgggactgcaaggtggtttcctgtaaaaactgcagcatccagcgtggacttaagaagcacctgctgctggccccctctgatgtggccggatggggcaccttcataaaggagtctgtgcagaagaacgaattcatttctgaatactgtggtgagctcatctctcaggatgaggctgatcgacgcggaaaggtctatgacaaatacatgtccagcttcctcttcaacctcaataatgattttgtagtggatgctactcggaaaggaaacaaaattcgatttgcaaatcattcagtgaatcccaactgttatgccaaagtggtcatggtgaatggagaccatcggattgggatctttgccaagagggcaattcaagctggcgaagagctcttctttgattacaggtacagccaagctgatgctctcaagtacgtggggatcgagagggagaccgacgtcctttagtaatgaactagtccgtaacttgaaagtatttcgatttcttggctttatatatcttgtggaaaggacgacagttctattattggcgtacattg

SEQ ID NO: 1925 - DNA, 2225 bp, Homo sapiens
  source 1..2225: mol_type = genomic DNA
accgccaccatggaaataccaaatccccctacctccaaatgtatcacttactggaaaagaaaagtgaaatctgaatacatgcgacttcgacaacttaaacggcttcaggcaaatatgggtgcaaaggctttgtatgtggcaaattttgcaaaggttcaagaaaaaacccagatcctcaatgaagaatggaagaagcttcgtgtccaacctgttcagtcaatgaagcctgtgagtggacacccttttctcaaaaaggtagaagatgagacggttttgtgcaatattccctacatgggagatgaagtgaaagaagaagatgagacttttattgaggagctgatcaataactatgatgggaaagtccatggtgaagaagagatgatccctggatccgttctgattagtgatgctgtttttctggagttggtcgatgccctgaatcagtactcagatgaggaggaggaagggcacaatgacacctcagatggaaagcaggatgacagcaaagaagatctgccagtaacaagaaagagaaagcgacatgctattgaaggcaacaaaaagagttccaagaaacagttcccaaatgacatgatcttcagtgcaattgcctcaatgttccctgagaatggtgtcccagatgacatgaaggagaggtatcgagaactaacagagatgtcagaccccaatgcacttccccctcagtgcacacccaacatcgatggccccaatgccaagtctgtgcagcgggagcaatctctgcactccttccacacacttttttgccggcgctgctttaaatacgactgcttccttcacccttttcatgccacccctaatgtatataaacgcaagaataaagaaatcaagattgaaccagaaccatgtggcacagactgcttccttttgctggaaggagcaaaggagtatgccatgctccacaacccccgctccaagtgctctggtcgtcgccggagaaggcaccacatagtcagtgcttcctgctccaatgcctcagcctctgctgtggctgagactaaagaaggagacagtgacagggacacaggcaatgactgggcctccagttcttcagaggctaactctcgctgtcagactcccacaaaacagaaggctagtccagccccacctcaactctgcgtagtggaagcaccctcggagcctgtggaatggactggggctgaagaatctctttttcgagtcttccatggcacctacttcaacaacttctgttcaatagccaggcttctggggaccaagacgtgcaagcaggtctttcagtttgcagtcaaagaatcacttatcctgaagctgccaacagatgagctcatgaacccctcacagaagaagaaaagaaagcacagattgtgggctgcacactgcaggaagattcagctgaagaaagataactcttccacacaagtgtacaactaccaaccctgcgaccacccagaccgcccctgtgacagcacctgcccctgcatcatgactcagaatttctgtgagaagttctgccagtgcaacccagactgtcagaatcgtttccctggctgtcgctgtaagacccagtgcaataccaagcaatgtccttgctatctggcagtgcgagaatgtgaccctgacctgtgtctcacctgtggggcctcagagcactgggactgcaaggtggtttcctgtaaaaactgcagcatccagcgtggacttaagaagcacctgctgctggccccctctgatgtggccggatggggcaccttcataaaggagtctgtgcagaagaacgaattcatttctgaatactgtggtgagctcatctctcaggatgaggctgatcgacgcggaaaggtctatgacaaatacatgtccagcttcctcttcaacctcaataatgattttgtagtggatgctactcggaaaggaaacaaaattcgatttgcaaatcattcagtgaatcccaactgttatgccaaagtggtcatggtgaatggagaccatcggattgggatctttgccaagagggcaattcaagctggcgaagagctcttctttgattacaggtacagccaagctgatgctctcaagtacgtggggatcgagagggagaccgacgtcctttagtaatgaactagtccgtaacttgaaagtatttcgatttcttggctttatatatcttgtggaaaggacgataacgtcgagatgtgccgtttctt

SEQ ID NO: 1926 - DNA, 2225 bp, Homo sapiens
  source 1..2225: mol_type = genomic DNA
accgccaccatgggccagactgggaagaaatctgagaagggaccagtttgttggcggaagcgtgtaaaatcagagtacatgcgactgagacagctcaagaggttcagacgagctgatgaagtaaagagtatgtttagttccaatcgtcagaaaattttggaaagaacggaaatcttaaaccaagaatggaaacagcgaaggatacagcctgtgcacatcctgacttctgtgagctcattgcgcgggactagggaggtggaagatgaaactgttttacataacattccttatatgggagatgaagttttagatcaggatggtactttcattgaagaactaataaaaaattatgatgggaaagtacacggggatagagaatgtgggtttataaatgatgaaatttttgtggagttggtgaatgcccttggtcaatataatgatgatgacgatgatgatgatggagacgatcctgaagaaagagaagaaaagcagaaagatctggaggatcaccgagatgataaagaaagccgcccacctcggaaatttccttctgataaaatttttgaagccatttcctcaatgtttccagataagggcacagcagaagaactaaaggaaaaatataaagaactcaccgaacagcagctcccaggcgcacttcctcctgaatgtacccccaacatagatggaccaaatgctaaatctgttcagagagagcaaagcttacactcctttcatacgcttttctgtaggcgatgttttaaatatgactgcttcctacatccttttcatgcaacacccaacacttataagcggaagaacacagaaacagctctagacaacaaaccttgtggaccacagtgttaccagcatttggagggagcaaaggagtttgctgctgctctcaccgctgagcggataaagaccccaccaaaacgtccaggaggccgcagaagaggacggcttcccaataacagtagcaggcccagcacccccaccattaatgtgctggaatcaaaggatacagacagtgatagggaagcagggactgaaacggggggagagaacaatgataaagaagaagaagagaagaaagatgaaacttcgagctcctctgaagcaaattctcggtgtcaaacaccaataaagatgaagccaaatattgaacctcctgagaatgtggagtggagtggtgctgaagcctcaatgtttagagtcctcattggcacttactatgacaatttctgtgccattgctaggttaattgggaccaaaacatgtagacaggtgtatgagtttagagtcaaagaatctagcatcatagctccagctcccgctgaggatgtggatactcctccaaggaaaaagaagaggaaacaccggttgtgggctgcacactgcagaaagatacagctgaaaaaggacggctcctctaaccatgtttacaactatcaaccctgtgatcatccacggcagccttgtgacagttcgtgcccttgtgtgatagcacaaaatttttgtgaaaagttttgtcaatgtagttcagagtgtcaaaaccgctttccgggatgccgctgcaaagcacagtgcaacaccaagcagtgcccgtgctacctggctgtccgagagtgtgaccctgacctctgtcttacttgtggagccgctgaccattgggacagtaaaaatgtgtcctgcaagaactgcagtattcagcggggctccaaaaagcatctattgctggcaccatctgacgtggcaggctgggggatttttatcaaagatcctgtgcagaaaaatgaattcatctcagaatactgtggagagattatttctcaagatgaagctgacagaagagggaaagtgtatgataaatacatgtgcagctttctgttcaacttgaacaatgattttgtggtggatgcaacccgcaagggtaacaaaattcgttttgcaaatcattcggtaaatccaaactgctatgcaaaagttatgatggttaacggtgatcacaggataggtatttttgccaagagagccatccagactggcgaagagctgttttttgattacagatacagccaggctgatgccctgaagtatgtcggcatcgaaagagaaatggaaatcccttagtaatgaactagtccgtaacttgaaagtatttcgatttcttggctttatatatcttgtggaaaggacgaaggccaaagctattgtggacgctg

SEQ ID NO: 1927 - DNA, 2189 bp, Homo sapiens
  source 1..2189: mol_type = genomic DNA
accgccaccatgggccagactgggaagaaatctgagaagggaccagtttgttggcggaagcgtgtaaaatcagagtacatgcgactgagacagctcaagaggttcagacgagctgatgaagtaaagagtatgtttagttccaatcgtcagaaaattttggaaagaacggaaatcttaaaccaagaatggaaacagcgaaggatacagcctgtgcacatcctgacttcttgttcggtgaccagtgacttggattttccaacacaagtcatcccattaaagactctgaatgcagttgcttcagtacccataatgtattcttggtctcccctacagcagaattttatggtggaagatgaaactgttttacataacattccttatatgggagatgaagttttagatcaggatggtactttcattgaagaactaataaaaaattatgatgggaaagtacacggggatagagaatgtgggtttataaatgatgaaatttttgtggagttggtgaatgcccttggtcaatataatgatgatgacgatgatgatgatggagacgatcctgaagaaagagaagaaaagcagaaagatctggaggatcaccgagatgataaagaaagccgcccacctcggaaatttccttctgataaaatttttgaagccatttcctcaatgtttccagataagggcacagcagaagaactaaaggaaaaatataaagaactcaccgaacagcagctcccaggcgcacttcctcctgaatgtacccccaacatagatggaccaaatgctaaatctgttcagagagagcaaagcttacactcctttcatacgcttttctgtaggcgatgttttaaatatgactgcttcctacatccttttcatgcaacacccaacacttataagcggaagaacacagaaacagctctagacaacaaaccttgtggaccacagtgttaccagcatttggagggagcaaaggagtttgctgctgctctcaccgctgagcggataaagaccccaccaaaacgtccaggaggccgcagaagaggacggcttcccaataacagtagcaggcccagcacccccaccattaatgtgctggaatcaaaggatacagacagtgatagggaagcagggactgaaacggggggagagaacaatgataaagaagaagaagagaagaaagatgaaacttcgagctcctctgaagcaaattctcggtgtcaaacaccaataaagatgaagccaaatattgaacctcctgagaatgtggagtggagtggtgctgaagcctcaatgtttagagtcctcattggcacttactatgacaatttctgtgccattgctaggttaattgggaccaaaacatgtagacaggtgtatgagtttagagtcaaagaatctagcatcatagctccagctcccgctgaggatgtggatactcctccaaggaaaaagaagaggaaacaccggttgtgggctgcacactgcagaaagatacagctgaaaaagggtcaaaaccgctttccgggatgccgctgcaaagcacagtgcaacaccaagcagtgcccgtgctacctggctgtccgagagtgtgaccctgacctctgtcttacttgtggagccgctgaccattgggacagtaaaaatgtgtcctgcaagaactgcagtattcagcggggctccaaaaagcatctattgctggcaccatctgacgtggcaggctgggggatttttatcaaagatcctgtgcagaaaaatgaattcatctcagaatactgtggagagattatttctcaagatgaagctgacagaagagggaaagtgtatgataaatacatgtgcagctttctgttcaacttgaacaatgattttgtggtggatgcaacccgcaagggtaacaaaattcgttttgcaaatcattcggtaaatccaaactgctatgcaaaagttatgatggttaacggtgatcacaggataggtatttttgccaagagagccatccagactggcgaagagctgttttttgattacagatacagccaggctgatgccctgaagtatgtcggcatcgaaagagaaatggaaatcccttagtaatgaactagtccgtaacttgaaagtatttcgatttcttggctttatatatcttgtggaaaggacgatctgagcaagcaacgtgttagccg

SEQ ID NO: 1928 - DNA, 2342 bp, Homo sapiens
  source 1..2342: mol_type = genomic DNA
accgccaccatgggccagactgggaagaaatctgagaagggaccagtttgttggcggaagcgtgtaaaatcagagtacatgcgactgagacagctcaagaggttcagacgagctgatgaagtaaagagtatgtttagttccaatcgtcagaaaattttggaaagaacggaaatcttaaaccaagaatggaaacagcgaaggatacagcctgtgcacatcctgacttctgtgagctcattgcgcgggactagggagtgttcggtgaccagtgacttggattttccaacacaagtcatcccattaaagactctgaatgcagttgcttcagtacccataatgtattcttggtctcccctacagcagaattttatggtggaagatgaaactgttttacataacattccttatatgggagatgaagttttagatcaggatggtactttcattgaagaactaataaaaaattatgatgggaaagtacacggggatagagaatgtgggtttataaatgatgaaatttttgtggagttggtgaatgcccttggtcaatataatgatgatgacgatgatgatgatggagacgatcctgaagaaagagaagaaaagcagaaagatctggaggatcaccgagatgataaagaaagccgcccacctcggaaatttccttctgataaaatttttgaagccatttcctcaatgtttccagataagggcacagcagaagaactaaaggaaaaatataaagaactcaccgaacagcagctcccaggcgcacttcctcctgaatgtacccccaacatagatggaccaaatgctaaatctgttcagagagagcaaagcttacactcctttcatacgcttttctgtaggcgatgttttaaatatgactgcttcctacatccttttcatgcaacacccaacacttataagcggaagaacacagaaacagctctagacaacaaaccttgtggaccacagtgttaccagcatttggagggagcaaaggagtttgctgctgctctcaccgctgagcggataaagaccccaccaaaacgtccaggaggccgcagaagaggacggcttcccaataacagtagcaggcccagcacccccaccattaatgtgctggaatcaaaggatacagacagtgatagggaagcagggactgaaacggggggagagaacaatgataaagaagaagaagagaagaaagatgaaacttcgagctcctctgaagcaaattctcggtgtcaaacaccaataaagatgaagccaaatattgaacctcctgagaatgtggagtggagtggtgctgaagcctcaatgtttagagtcctcattggcacttactatgacaatttctgtgccattgctaggttaattgggaccaaaacatgtagacaggtgtatgagtttagagtcaaagaatctagcatcatagctccagctcccgctgaggatgtggatactcctccaaggaaaaagaagaggaaacaccggttgtgggctgcacactgcagaaagatacagctgaaaaaggacggctcctctaaccatgtttacaactatcaaccctgtgatcatccacggcagccttgtgacagttcgtgcccttgtgtgatagcacaaaatttttgtgaaaagttttgtcaatgtagttcagagtgtcaaaaccgctttccgggatgccgctgcaaagcacagtgcaacaccaagcagtgcccgtgctacctggctgtccgagagtgtgaccctgacctctgtcttacttgtggagccgctgaccattgggacagtaaaaatgtgtcctgcaagaactgcagtattcagcggggctccaaaaagcatctattgctggcaccatctgacgtggcaggctgggggatttttatcaaagatcctgtgcagaaaaatgaattcatctcagaatactgtggagagattatttctcaagatgaagctgacagaagagggaaagtgtatgataaatacatgtgcagctttctgttcaacttgaacaatgattttgtggtggatgcaacccgcaagggtaacaaaattcgttttgcaaatcattcggtaaatccaaactgctatgcaaaagttatgatggttaacggtgatcacaggataggtatttttgccaagagagccatccagactggcgaagagctgttttttgattacagatacagccaggctgatgccctgaagtatgtcggcatcgaaagagaaatggaaatcccttagtaatgaactagtccgtaacttgaaagtatttcgatttcttggctttatatatcttgtggaaaggacgactatccggtgcggaactgccacag

SEQ ID NO: 1929 - DNA, 2315 bp, Homo sapiens
  source 1..2315: mol_type = genomic DNA
accgccaccatgggccagactgggaagaaatctgagaagggaccagtttgttggcggaagcgtgtaaaatcagagtacatgcgactgagacagctcaagaggttcagacgagctgatgaagtaaagagtatgtttagttccaatcgtcagaaaattttggaaagaacggaaatcttaaaccaagaatggaaacagcgaaggatacagcctgtgcacatcctgacttcttgttcggtgaccagtgacttggattttccaacacaagtcatcccattaaagactctgaatgcagttgcttcagtacccataatgtattcttggtctcccctacagcagaattttatggtggaagatgaaactgttttacataacattccttatatgggagatgaagttttagatcaggatggtactttcattgaagaactaataaaaaattatgatgggaaagtacacggggatagagaatgtgggtttataaatgatgaaatttttgtggagttggtgaatgcccttggtcaatataatgatgatgacgatgatgatgatggagacgatcctgaagaaagagaagaaaagcagaaagatctggaggatcaccgagatgataaagaaagccgcccacctcggaaatttccttctgataaaatttttgaagccatttcctcaatgtttccagataagggcacagcagaagaactaaaggaaaaatataaagaactcaccgaacagcagctcccaggcgcacttcctcctgaatgtacccccaacatagatggaccaaatgctaaatctgttcagagagagcaaagcttacactcctttcatacgcttttctgtaggcgatgttttaaatatgactgcttcctacatccttttcatgcaacacccaacacttataagcggaagaacacagaaacagctctagacaacaaaccttgtggaccacagtgttaccagcatttggagggagcaaaggagtttgctgctgctctcaccgctgagcggataaagaccccaccaaaacgtccaggaggccgcagaagaggacggcttcccaataacagtagcaggcccagcacccccaccattaatgtgctggaatcaaaggatacagacagtgatagggaagcagggactgaaacggggggagagaacaatgataaagaagaagaagagaagaaagatgaaacttcgagctcctctgaagcaaattctcggtgtcaaacaccaataaagatgaagccaaatattgaacctcctgagaatgtggagtggagtggtgctgaagcctcaatgtttagagtcctcattggcacttactatgacaatttctgtgccattgctaggttaattgggaccaaaacatgtagacaggtgtatgagtttagagtcaaagaatctagcatcatagctccagctcccgctgaggatgtggatactcctccaaggaaaaagaagaggaaacaccggttgtgggctgcacactgcagaaagatacagctgaaaaaggacggctcctctaaccatgtttacaactatcaaccctgtgatcatccacggcagccttgtgacagttcgtgcccttgtgtgatagcacaaaatttttgtgaaaagttttgtcaatgtagttcagagtgtcaaaaccgctttccgggatgccgctgcaaagcacagtgcaacaccaagcagtgcccgtgctacctggctgtccgagagtgtgaccctgacctctgtcttacttgtggagccgctgaccattgggacagtaaaaatgtgtcctgcaagaactgcagtattcagcggggctccaaaaagcatctattgctggcaccatctgacgtggcaggctgggggatttttatcaaagatcctgtgcagaaaaatgaattcatctcagaatactgtggagagattatttctcaagatgaagctgacagaagagggaaagtgtatgataaatacatgtgcagctttctgttcaacttgaacaatgattttgtggtggatgcaacccgcaagggtaacaaaattcgttttgcaaatcattcggtaaatccaaactgctatgcaaaagttatgatggttaacggtgatcacaggataggtatttttgccaagagagccatccagactggcgaagagctgttttttgattacagatacagccaggctgatgccctgaagtatgtcggcatcgaaagagaaatggaaatcccttagtaatgaactagtccgtaacttgaaagtatttcgatttcttggctttatatatcttgtggaaaggacgagttcaacgcagggacacgacgcgg

SEQ ID NO: 1930 - DNA, 1115 bp, Homo sapiens
  source 1..1115: mol_type = genomic DNA
accgccaccatggaactaaaaactttatgggaaaacaaactaatgcagtccagggcagtagatggatttcattcagaagagcagcagcttctactgcaagttcaacagcagcatcaaccccagcagcagcagcatcaccaccatcaccatcatcagcaagctcagcctcagcagacagtacctcagcaagcgcagacccagcaggttcttattcctgcatcacagcaagccacagcaccacaagttattgttccagattctaagttgatacagcatatgaatgcatcaaacatgagtgctgctgctacagctgctaccttagcactccctgcaggtgtgactcctgttcagcagatattaacaaattcaggccagcttcttcaggtggtcagagcagccaatggtgcccaatatatctttcagcctcagcagtcagtggttctacaacaacaggttataccacaaatgcagcctggtggagtacaagctcctgttatacagcaggtgctggctcctcttcctggagggatttcaccacagacaggtgtcatcatccagcctcagcaaatcttatttacaggaaataagactcaagttatacctacgacagtggcagcacctacaccagcccaagcacagataactgcaactggccagcagcaaccgcaggcccagcctgctcaaacacaagctccattggtcttacaagttgatggaactggggatacatcatctgaagaagatgaagatgaagaagaagactatgatgatgatgaggaggaagacaaagagaaagatggagctgaagatgggcaggtggaagaagagcccctcaatagtgaagatgatgtgagtgatgaggaaggacaggaactctttgacacagaaaatgttgttgtatgccaatatgataagatacacagaagtaaaaacaaatggaaatttcatctcaaggatggcattatgaatcttaatggaagagattatatattttccaaagccattggagatgcagaatggtagtaatgaactagtccgtaacttgaaagtatttcgatttcttggctttatatatcttgtggaaaggacgaactacggctgcagttgcaacggca

SEQ ID NO: 1931 - DNA, 1646 bp, Homo sapiens
  source 1..1646: mol_type = genomic DNA
accgccaccatggtgtgggaagtgaagacaaatcagatgcctaatgcagtacagaaactcctgttggtgatggacaagagagcctcaggaatgaatgactcattggagttgctgcagtgtaatgagaatttgccatcttcacctggatataactcctgtgatgaacacatggagcttgatgaccttcctgaacttcaggcagttcaaagtgatcctacccaatctggcatgtaccagctgagttcagatgtttcacatcaagaatacccaagatcatcttggaaccaaaatacctcagacataccagaaactacttaccgtgaaaatgaggtggactggctaacagaattggcaaatatcgcgaccagtccacaaagtccactgatgcagtgctcattttacaatagatcatctcctgtacacatcatagccactagcaaaagtttacattcctatgcacgccctccaccagtgtcctcttcttcgaagagtgaaccagccttccctcatcaccattggaaggaggaaacaccagtaagacacgaaagggcaaatagtgagtcagaatctggcattttctgcatgtcctccctgtcagatgatgatgatttgggatggtgcaattcctggccttcaactgtctggcactgttttttgaaaggcacacgactgtgctttcataagggaagcaataaggaatggcaagatgttgaagattttgctagagctgaaggctgtgataatgaggaagatcttcaaatgggcattcacaagggctatggttctgatggtctaaagttgttatcacatgaagaaagtgtatcatttggcgagtctgtactgaagttgacttttgatcctggtacagtagaagatggtttacttaccgtagagtgtaagctggaccaccctttctatgttaaaaataaaggttggtcatcattttatccaagcttgactgtggtacagcatggcattccatgttgtgaagttcatattggcgatgtatgtctacctcctggacaccccgatgccattaattttgatgattcaggtgtttttgatacatttaaaagctatgacttcacacctatggattcttctgcagtttatgtgttaagtagtatggctcgccagcgtcgtgcatctttgtcttgtggaggacctggtggtcaagactttgcaagatctggattcagtaaaaactgtggctcacctggatcatcacagctctcttccaattctttgtatgctaaagctgtcaaaaaccacagctcagggactgtgagtgccacttctcctaataagtgcaaaagaccaatgaatgccttcatgctttttgccaaaaaatacagagttgaatatactcagatgtatccagggaaagataacagagccataagtgtgatccttggtgacaggtggaagaaaatgaagaatgaagagagaagaatgtacacattagaagcaaaggctttggctgaagaacagaaacgtttaaatcctgactgttggaagaggaaaagaaccaattcaggctcacaacaacattagtaatgaactagtccgtaacttgaaagtatttcgatttcttggctttatatatcttgtggaaaggacgacagatgaatagggtgatcggactt

SEQ ID NO: 1932 - DNA, 839 bp, Homo sapiens
  source 1..839: mol_type = genomic DNA
accgccaccatggataaaaatgagctggttcagaaggccaaactggccgagcaggctgagcgatatgatgacatggcagcctgcatgaagtctgtaactgagcaaggagctgaattatccaatgaggagaggaatcttctctcagttgcttataaaaatgttgtaggagcccgtaggtcatcttggagggtcgtctcaagtattgaacaaaagacggaaggtgctgagaaaaaacagcagatggctcgagaatacagagagaaaattgagacggagctaagagatatctgcaatgatgtactgtctcttttggaaaagttcttgatccccaatgcttcacaagcagagagcaaagtcttctatttgaaaatgaaaggagattactaccgttacttggctgaggttgccgctggtgatgacaagaaagggattgtcgatcagtcacaacaagcataccaagaagcttttgaaatcagcaaaaaggaaatgcaaccaacacatcctatcagactgggtctggcccttaacttctctgtgttctattatgagattctgaactccccagagaaagcctgctctcttgcaaagacagcttttgatgaagccattgctgaacttgatacattaagtgaagagtcatacaaagacagcacgctaataatgcaattactgagagacaacttgacattgtggacatcggatacccaaggagacgaagctgaagcaggagaaggaggggaaaattagtaatgaactagtccgtaacttgaaagtatttcgatttcttggctttatatatcttgtggaaaggacgagcgggatgctctggaaatatgcta

SEQ ID NO: 1933 - DNA, 1082 bp, Homo sapiens
  source 1..1082: mol_type = genomic DNA
accgccaccatggagtttctgagcgagaagtttgccctcaagagccctccgagtaaaaacagtgacttttacatgggcgcaggaggtcctctggagcacgttatggagacgctggacaatgagtccttttacagcaaagcgtctgcaggcaaatgcgtgcaggccttcggacccctgccccgcgccgagcatcacgtgcgcttggagaggacctcgccctgtcaggacagcagcgtgaactatgggatcactaaagtagaaggacagccccttcacaccgaactgaatagagctatggacaactgtaacagtctccgaatgtctcccgtgaaagggatgcaagagaagggagagctggatgaacttggggataaatgtgatagcaatgtatccagcagtaagaaacggaggcaccgaaccaccttcaccagtttgcagctagaggagctggagaaagtctttcagaaaactcattacccggatgtgtatgtcagagaacagcttgctctgaggacagagctcactgaggccagggtccaggtttggtttcaaaatcgaagggccaaatggagaaaaagggaacgttatggccaaatacaacaagcgaaaagccattttgctgccacctatgatatatcagttttgccaaggactgacagctacccacagattcagaacaatttgtgggcaggaaatgcaagtggtggttctgtggttacttcatgcatgttaccacgtgacacttcctcctgtatgacaccttattctcactcgcctcggacagattccagttacacggggttttcaaaccaccagaaccagttcagccacgtgcccctcaacaattttttcactgactctcttcttactggggcaaccaatggacatgcatttgaaacaaagccagagtttgaaaggaggtcttccagtatcgcagttcttcgaatgaaagccaaggagcacaccgccaatatttcatgggccatgtagtaatgaactagtccgtaacttgaaagtatttcgatttcttggctttatatatcttgtggaaaggacgagacacatccagcggcagcgtggac

SEQ ID NO: 1934 - DNA, 2888 bp, Homo sapiens
  source 1..2888: mol_type = genomic DNA
accgccaccatgccgcccaaaaccccccgaaaaacggccgccaccgccgccgctgccgccgcggaacccccggcaccgccgccgccgccccctcctgaggaggacccagagcaggacagcggcccggaggacctgcctctcgtcaggcttgagtttgaagaaacagaagaacctgattttactgcattatgtcagaaattaaagataccagatcatgtcagagagagagcttggttaacttgggagaaagtttcatctgtggatggagtattgggaggttatattcaaaagaaaaaggaactgtggggaatctgtatctttattgcagcagttgacctagatgagatgtcgttcacttttactgagctacagaaaaacatagaaatcagtgtccataaattctttaacttactaaaagaaattgataccagtaccaaagttgataatgctatgtcaagactgttgaagaagtatgatgtattgtttgcactcttcagcaaattggaaaggacatgtgaacttatatatttgacacaacccagcagttcgatatctactgaaataaattctgcattggtgctaaaagtttcttggatcacatttttattagctaaaggggaagtattacaaatggaagatgatctggtgatttcatttcagttaatgctatgtgtccttgactattttattaaactctcacctcccatgttgctcaaagaaccatataaaacagctgttatacccattaatggttcacctcgaacacccaggcgaggtcagaacaggagtgcacggatagcaaaacaactagaaaatgatacaagaattattgaagttctctgtaaagaacatgaatgtaatatagatgaggtgaaaaatgtttatttcaaaaattttataccttttatgaattctcttggacttgtaacatctaatggacttccagaggttgaaaatctttctaaacgatacgaagaaatttatcttaaaaataaagatctagatgcaagattatttttggatcatgataaaactcttcagactgattctatagacagttttgaaacacagagaacaccacgaaaaagtaaccttgatgaagaggtgaatgtaattcctccacacactccagttaggactgttatgaacactatccaacaattaatgatgattttaaattcagcaagtgatcaaccttcagaaaatctgatttcctattttaacaactgcacagtgaatccaaaagaaagtatactgaaaagagtgaaggatataggatacatctttaaagagaaatttgctaaagctgtgggacagggttgtgtcgaaattggatcacagcgatacaaacttggagttcgcttgtattaccgagtaatggaatccatgcttaaatcagaagaagaacgattatccattcaaaattttagcaaacttctgaatgacaacatttttcatatgtctttattggcgtgcgctcttgaggttgtaatggccacatatagcagaagtacatctcagaatcttgattctggaacagatttgtctttcccatggattctgaatgtgcttaatttaaaagcctttgatttttacaaagtgatcgaaagttttatcaaagcagaaggcaacttgacaagagaaatgataaaacatttagaacgatgtgaacatcgaatcatggaatcccttgcatggctctcagattcacctttatttgatcttattaaacaatcaaaggaccgagaaggaccaactgatcaccttgaatctgcttgtcctcttaatcttcctctccagaataatcacactgcagcagatatgtatctttctcctgtaagatctccaaagaaaaaaggttcaactacgcgtgtaaattctactgcaaatgcagagacacaagcaacctcagccttccagacccagaagccattgaaatctacctctctttcactgttttataaaaaagtgtatcggctagcctatctccggctaaatacactttgtgaacgccttctgtctgagcacccagaattagaacatatcatctggacccttttccagcacaccctgcagaatgagtatgaactcatgagagacaggcatttggaccaaattatgatgtgttccatgtatggcatatgcaaagtgaagaatatagaccttaaattcaaaatcattgtaacagcatacaaggatcttcctcatgctgttcaggagacattcaaacgtgttttgatcaaagaagaggagtatgattctattatagtattctataactcggtcttcatgcagagactgaaaacaaatattttgcagtatgcttccaccaggccccctaccttgtcaccaatacctcacattcctcgaagcccttacaagtttcctagttcacccttacggattcctggagggaacatctatatttcacccctgaagagtccatataaaatttcagaaggtctgccaacaccaacaaaaatgactccaagatcaagaatcttagtatcaattggtgaatcattcgggacttctgagaagttccagaaaataaatcagatggtatgtaacagcgaccgtgtgctcaaaagaagtgctgaaggaagcaaccctcctaaaccactgaaaaaactacgctttgatattgaaggatcagatgaagcagatggaagtaaacatctcccaggagagtccaaatttcagcagaaactggcagaaatgacttctactcgaacacgaatgcaaaagcagaaaatgaatgatagcatggatacctcaaacaaggaagagaaatagtaatgaactagtccgtaacttgaaagtatttcgatttcttggctttatatatcttgtggaaaggacgatggccgggaggccgctaggcgctt

SEQ ID NO: 1935 - DNA, 1337 bp, Homo sapiens
  source 1..1337: mol_type = genomic DNA
accgccaccatgaatgctgagacttgcgtctcttactgcgagtcgccggccgctgccatggacgcctactacagcccggtgtcgcagagtcgggagggctcgtcgccttttagggcatttcccggaggcgacaagttcggcacaactttcctgtcggccgccgccaaagcacagggattcggggacgccaagagccgggcccgttacggcgctgggcagcaggacctggcgacacccctggagagtggagctggggcgcggggctcctttaacaagttccagccccagccgtcgaccccgcagccccagccgccgccgcagccgcagccgcagcagcagcagccgcagccccagccgcccgcgcaaccgcatctttacttgcagcgaggcgcctgcaagacgcccccggacggcagcctcaaactccaggaaggcagcagcggccacagcgcggccttgcaggttccctgctacgctaaagagagctccctgggtgagccagagttaccccctgactctgacactgtggggatggacagcagctacctgagtgtcaaggaggctggggtgaaggggccccaggaccgggccagctcagacctccccagcccattggagaaggccgactcagagagcaacaagggcaagaagcggcggaaccggaccaccttcaccagctaccagctggaggagctggagaaggtcttccagaagacccactacccagacgtgtatgcgcgggaacagctggccatgaggacagacctcactgaggcccgcgtgcaggtctggttccagaaccgaagggccaagtggaggaagcgggagcgttttgggcagatgcagcaggttcgaacccacttctccactgcatatgagctgcccctcctcacccgagctgagaactacgcccagattcagaacccgtcctggctcggcaacaacggggctgcctcaccagtgccagcctgcgtggtcccctgcgacccggtgcctgcctgcatgtcccctcatgcccacccccctggctctggggccagcagcgtcaccgacttcctgagtgtgtctggggctggcagtcacgtgggccagacgcacatgggcagcctgtttggagcagccagcctcagcccaggcctcaatggctacgagctcaacggcgagccggaccgcaagacctcgagcatcgcggccctccgcatgaaggccaaggagcacagtgcggccatttcctgggccacatagtaatgaactagtccgtaacttgaaagtatttcgatttcttggctttatatatcttgtggaaaggacgagcctaccttactgcggctttgctt

SEQ ID NO: 1936 - DNA, 1427 bp, Homo sapiens
  source 1..1427: mol_type = genomic DNA
accgccaccatgaaggcggccgtcgatctcaagccgactctcaccatcatcaagacggaaaaagtcgatctggagcttttcccctccccggatatggaatgtgcagatgtcccactattaactccaagcagcaaagaaatgatgtctcaagcattaaaagctactttcagtggtttcactaaagaacagcaacgactggggatcccaaaagacccccggcagtggacagaaacccatgttcgggactgggtgatgtgggctgtgaatgaattcagcctgaaaggtgtagacttccagaagttctgtatgaatggagcagccctctgcgccctgggtaaagactgctttctcgagctggccccagactttgttggggacatcttatgggaacatctagagatcctgcagaaagaggatgtgaaaccatatcaagttaatggagtcaacccagcctatccagaatcccgctatacctcggattacttcattagctatggtattgagcatgcccagtgtgttccaccatcggagttctcagagcccagcttcatcacagagtcctatcagacgctccatcccatcagctcggaagagctcctctccctcaagtatgagaatgactacccctcggtcattctccgagaccctctccagacagacaccttgcagaatgactactttgctatcaaacaagaagtcgtcaccccagacaacatgtgcatggggaggaccagtcgtggtaaactcgggggccaggactcttttgaaagcatagagagctacgatagttgtgatcgcctcacccagtcctggagcagccagtcatctttcaacagcctgcagcgtgttccctcctatgacagcttcgactcagaggactatccggctgccctgcccaaccacaagcccaagggcaccttcaaggactatgtgcgggaccgtgctgacctcaataaggacaagcctgtcattcctgctgctgccctagctggctacacaggcagtggaccaatccagctatggcagtttcttctggaattactcactgataaatcctgtcagtcttttatcagctggacaggagatggctgggaattcaaactttctgacccagatgaggtggccaggagatggggaaagaggaaaaacaaacctaagatgaattatgagaaactgagccgtggcctacgctactattacgacaaaaacatcatccacaagacagcggggaaacgctacgtgtaccgctttgtgtgtgacctgcagagcctgctggggtacacccctgaggagctgcacgccatgctggacgtcaagccagatgccgacgagtagtaatgaactagtccgtaacttgaaagtatttcgatttcttggctttatatatcttgtggaaaggacgatttgtcatatacaacaagcgttgt

SEQ ID NO: 1937 - DNA, 1559 bp, Homo sapiens
  source 1..1559: mol_type = genomic DNA
accgccaccatgagctactttgtggattctgctgggagcagccccgtcccttactcagcgcctcgtcctgcagtggtgaggcaaggacctagcaacacttatgaagatcctcgaatgaactgtggtttccagtccaattatcaccagcaaagaccttgctaccccttttgggatgagatggcaactcaggaagttcctactggtcttgaacactgtgtctcagatatggaatgtgcagatgtcccactattaactccaagcagcaaagaaatgatgtctcaagcattaaaagctactttcagtggtttcactaaagaacagcaacgactggggatcccaaaagacccccggcagtggacagaaacccatgttcgggactgggtgatgtgggctgtgaatgaattcagcctgaaaggtgtagacttccagaagttctgtatgaatggagcagccctctgcgccctgggtaaagactgctttctcgagctggccccagactttgttggggacatcttatgggaacatctagagatcctgcagaaagaggatgtgaaaccatatcaagttaatggagtcaacccagcctatccagaatcccgctatacctcggattacttcattagctatggtattgagcatgcccagtgtgttccaccatcggagttctcagagcccagcttcatcacagagtcctatcagacgctccatcccatcagctcggaagagctcctctccctcaagtatgagaatgactacccctcggtcattctccgagaccctctccagacagacaccttgcagaatgactactttgctatcaaacaagaagtcgtcaccccagacaacatgtgcatggggaggaccagtcgtggtaaactcgggggccaggactcttttgaaagcatagagagctacgatagttgtgatcgcctcacccagtcctggagcagccagtcatctttcaacagcctgcagcgtgttccctcctatgacagcttcgactcagaggactatccggctgccctgcccaaccacaagcccaagggcaccttcaaggactatgtgcgggaccgtgctgacctcaataaggacaagcctgtcattcctgctgctgccctagctggctacacaggcagtggaccaatccagctatggcagtttcttctggaattactcactgataaatcctgtcagtcttttatcagctggacaggagatggctgggaattcaaactttctgacccagatgaggtggccaggagatggggaaagaggaaaaacaaacctaagatgaattatgagaaactgagccgtggcctacgctactattacgacaaaaacatcatccacaagacagcggggaaacgctacgtgtaccgctttgtgtgtgacctgcagagcctgctggggtacacccctgaggagctgcacgccatgctggacgtcaagccagatgccgacgagtagtaatgaactagtccgtaacttgaaagtatttcgatttcttggctttatatatcttgtggaaaggacgacgaccaggccacatccgcgggcct

SEQ ID NO: 1938 - DNA, 1166 bp, Homo sapiens
  source 1..1166: mol_type = genomic DNA
accgccaccatgaaggcggccgtcgatctcaagccgactctcaccatcatcaagacggaaaaagtcgatctggagcttttcccctccccggatatggaatgtgcagatgtcccactattaactccaagcagcaaagaaatgatgtctcaagcattaaaagctactttcagtggtttcactaaagaacagcaacgactggggatcccaaaagacccccggcagtggacagaaacccatgttcgggactgggtgatgtgggctgtgaatgaattcagcctgaaaggtgtagacttccagaagttctgtatgaatggagcagccctctgcgccctgggtaaagactgctttctcgagctggccccagactttgttggggacatcttatgggaacatctagagatcctgcagaaagaggatgtgaaaccatatcaagttaatggagtcaacccagcctatccagaatcccgctatacctcggattacttcattagctatggtattgagcatgcccagtgtgttccaccatcggagttctcagagcccagcttcatcacagagtcctatcagacgctccatcccatcagctcggaagagctcctctccctcaagtatgagaatgactacccctcggtcattctccgagaccctctccagacagacaccttgcagaatgactactttgctatcaaacaagaagtcgtcaccccagacaacatgtgcatggggaggaccagtcgtggcagtggaccaatccagctatggcagtttcttctggaattactcactgataaatcctgtcagtcttttatcagctggacaggagatggctgggaattcaaactttctgacccagatgaggtggccaggagatggggaaagaggaaaaacaaacctaagatgaattatgagaaactgagccgtggcctacgctactattacgacaaaaacatcatccacaagacagcggggaaacgctacgtgtaccgctttgtgtgtgacctgcagagcctgctggggtacacccctgaggagctgcacgccatgctggacgtcaagccagatgccgacgagtagtaatgaactagtccgtaacttgaaagtatttcgatttcttggctttatatatcttgtggaaaggacgatatgtgttgaaataaagtctatag

SEQ ID NO: 1939 - DNA, 779 bp, Homo sapiens
  source 1..779: mol_type = genomic DNA
accgccaccatgaaggcggccgtcgatctcaagccgactctcaccatcatcaagacggaaaaagtcgatctggagcttttcccctccccgggtaaactcgggggccaggactcttttgaaagcatagagagctacgatagttgtgatcgcctcacccagtcctggagcagccagtcatctttcaacagcctgcagcgtgttccctcctatgacagcttcgactcagaggactatccggctgccctgcccaaccacaagcccaagggcaccttcaaggactatgtgcgggaccgtgctgacctcaataaggacaagcctgtcattcctgctgctgccctagctggctacacaggcagtggaccaatccagctatggcagtttcttctggaattactcactgataaatcctgtcagtcttttatcagctggacaggagatggctgggaattcaaactttctgacccagatgaggtggccaggagatggggaaagaggaaaaacaaacctaagatgaattatgagaaactgagccgtggcctacgctactattacgacaaaaacatcatccacaagacagcggggaaacgctacgtgtaccgctttgtgtgtgacctgcagagcctgctggggtacacccctgaggagctgcacgccatgctggacgtcaagccagatgccgacgagtagtaatgaactagtccgtaacttgaaagtatttcgatttcttggctttatatatcttgtggaaaggacgatgaaggcgatttaactgactctga

SEQ ID NO: 1940 - DNA, 869 bp, Homo sapiens
  source 1..869: mol_type = genomic DNA
accgccaccatggatgatcgagaggatctggtgtaccaggcgaagctggccgagcaggctgagcgatacgacgaaatggtggagtcaatgaagaaagtagcagggatggatgtggagctgacagttgaagaaagaaacctcctatctgttgcatataagaatgtgattggagctagaagagcctcctggagaataatcagcagcattgaacagaaagaagaaaacaagggaggagaagacaagctaaaaatgattcgggaatatcggcaaatggttgagactgagctaaagttaatctgttgtgacattctggatgtactggacaaacacctcattccagcagctaacactggcgagtccaaggttttctattataaaatgaaaggggactaccacaggtatctggcagaatttgccacaggaaacgacaggaaggaggctgcggagaacagcctagtggcttataaagctgctagtgatattgcaatgacagaacttccaccaacgcatcctattcgcttaggtcttgctctcaatttttccgtattctactacgaaattcttaattcccctgaccgtgcctgcaggttggcaaaagcagcttttgatgatgcaattgcagaactggatacgctgagtgaagaaagctataaggactctacacttatcatgcagttgttacgtgataatctgacactatggacttcagacatgcagggtgacggtgaagagcagaataaagaagcgctgcaggacgtggaagacgaaaatcagtagtaatgaactagtccgtaacttgaaagtatttcgatttcttggctttatatatcttgtggaaaggacgatgtcggctccatgacgtcttaaac

SEQ ID NO: 1941 - DNA, 1826 bp, Homo sapiens
  source 1..1826: mol_type = genomic DNA
accgccaccatgcttagggagttctcgaagtggggcgtagaggcatcgcctggcaaggcctgggagcgaaaaagatctctacttcgtggagccgttggacgctaccggggagccactggtggggaccttttttgggccccctttccttcgtggggtactatggagttcccagaacacagtcagcagctgctgcagagcctccgggagcagcggtcccagggtttcctttgtgactgcaccgtgatggtgggtagtacccagttcttggcccatcgggctgtgctggcctcctgcagcccattcttccagcttttctacaaggagcgggaattggacaagagggatctggtgtgtattcacaatgaaattgtcacagccccagcctttgggctgcttctggactttatgtatgctggccagctgaccctgagaggggatacccctgtggaggatgtgctggcagctgccagctacttgcacatgaatgacatcgtcaaggtgtgtaagcggcggcttcaagcccgggccctggcagaggcagacagtaccaagaaggaggaggaaaccaactcacagcttcctagtttggagtttttgtctagtacttcccgtggcacccaaccttcgttggcatctgctgagacatcaggccactggggcaaaggggaatggaaaggctctgctgctccctcacctactgtccgtcctccagatgagccaccaatgtctagtggggctgacactacacagcctggcatggaggttgacgcaccacatctgcgggcacctcatccaccagtggctgatgtctctcttgccagccctagtagctccactgagaccattcctacaaactacttctcttctggcatctcagcagtttcattggagccactgccatctcttgatgtgggtcctgagagtctgagggtggtggaaccaaaggatcctggaggaccactgcaaggcttctatcccccagcctcagccccaacgtcagccccagcccctgtctcagctccagttccatcccaggctccagccccagctgaagctgagctggtccaggtgaaagttgaagctattgtgatctctgatgaagagactgatgtgtcagatgaacagcctcagggtcctgagagagctttcccatctggaggagcagtgtatggggcacagccctcccagccagaggcttttgaagacccaggggcagcaggactggaggaggtggggccaagtgaccacttcctgccaacagaccctcatctaccctaccatctgctgccaggtgcagggcagtatcatcgaggactggtgacctcacctctgcctgcacccgcatccctgcatgagccactttacctgtcttctgagtacgaagcagctccaggaagctttggggtttttactgaggatgttcccacctgcaagacatgtgggaagaccttctcatgctcttacacactacggcgacatgccacggtgcacacacgtgagcgaccctatgagtgccgctactgcctgcggagctacacgcagtcaggggacctctaccgccacatccgcaaggctcacaatgaggacctggccaaacgcagcaaaccagatccagaagtgggaccccttctaggggtgcagcctctccctggctccccaacagcagacagacagagcagcagtggtggagggccacctaaagattttgtattggccccaaaaactaacatctagtaatgaactagtccgtaacttgaaagtatttcgatttcttggctttatatatcttgtggaaaggacgacctgcccactgatggtgaggagct

SEQ ID NO: 1942 - DNA, 1256 bp, Homo sapiens
  source 1..1256: mol_type = genomic DNA
accgccaccatgcagagatcgccgcccggctacggcgcacaggacgacccgcccgcccgccgcgactgtgcatgggccccgggacacggggccgccgctgacacgcgcggcctcgccgccggccccgccgccctcgccgcgcccgccgcgcccgcctcgccgcccagcccgcagcgcagtcccccgcgcagccccgagccggggcgctatggcctcagcccggccggccgcggggaacgccaggcggcagacgagtcgcgcatccggcggcccatgaacgccttcatggtgtgggcaaaggacgagcgcaagcggctggctcagcagaacccggacctgcacaacgcggtgctcagcaagatgctgggcaaagcgtggaaggagctgaacgcggcggagaagcggcccttcgtggaggaagccgaacggctgcgcgtgcagcacttgcgcgaccaccccaactacaagtaccggccgcgccgcaagaagcaggcgcgcaaggcccggcggctggagcccggcctcctgctcccgggattagcgcccccgcagccaccgcccgagcctttccccgcggcgtctggctcggctcgcgccttccgcgagctgcccccgctgggcgccgagttcgacggcctggggctgcccacgcccgagcgctcgcctctggacggcctggagcccggcgaggctgccttcttcccaccgcccgcggcgcccgaggactgcgcgctgcggcccttccgcgcgccctacgcgcccaccgagttgtcgcgggaccccggcggttgctacggggctcccctggcggaggcgctcaggaccgcgccccccgcggcgccgctcgctggcctgtactacggcaccctgggcacgcccggcccgtaccccggcccgctgtcgccgccgcccgaggccccgccgctggagagcgccgagccgctggggcccgccgccgatctgtgggccgacgtggacctcaccgagttcgaccagtacctcaactgcagccggactcggcccgacgcccccgggctcccgtaccacgtggcactggccaaactgggcccgcgcgccatgtcctgcccagaggagagcagcctgatctccgcgctgtcggacgccagcagcgcggtctattacagcgcgtgcatctccggctagtaatgaactagtccgtaacttgaaagtatttcgatttcttggctttatatatcttgtggaaaggacgagattcgcgtccctctaattaggtg

SEQ ID NO: 1943 - DNA, 2036 bp, Homo sapiens
  source 1..2036: mol_type = genomic DNA
accgccaccatggcaaagcccagccacagcagctatgtccttcagcagctaaacaaccaaagagaatggggttttctctgtgactgctgtattgcaattgatgacatttactttcaagcacacaaggcagttctagctgcctgtagctcctattttagaatgtttttcatgaaccatcagcatagtactgcacaactgaatctcagcaacatgaaaattagtgcagaatgttttgatctcattttgcagtttatgtatttaggaaaaattatgacagctccctccagttttgagcagtttaaagtggcaatgaactacctacagctatacaatgttcctgactgtttagaagacatccaggatgcagattgttctagttcaaaatgttcctcttctgcttccagcaaacagaacagcaaaatgatatttggggtaagaatgtatgaagatactgtggctcgaaatggcaatgaagccaacaggtggtgtgcagagccaagttcaacggtaaatacaccacataatagagaggctgatgaagagtctttacaattaggtaattttcctgagccactatttgatgtatgtaaaaaaagttccgtgtccaaattatctactccaaaagaacgtgtgtcaagacgctttgggcggagttttacctgtgatagctgtggatttggctttagctgtgaaaaattattagatgagcatgtgctaacctgtactaacagacatttataccaaaacacaagatcttaccatagaatagtagatattagagatggaaaagacagtaacatcaaagctgaatttggtgaaaaagattcttccaaaacattttctgcacagacggacaaatacagaggagacacaagccaggctgctgatgattcagcttcaaccactggaagcagaaaaagtagcacagtggagtctgaaatagcaagcgaagagaaaagcagagctgctgagaggaaaaggattattattaagatggagccagaagatattcctacagatgaactgaaagactttaacattattaaagttactgataaagactgtaatgaatccactgacaatgatgaattagaagatgaacctgaagagccattttatagatactatgttgaagaagatgtcagcataaaaaaaagtggtaggaaaactctaaaacctcgaatgtcagtaagtgctgatgaaagaggtggtttagagaatatgaggccccctaacaacagcagtccagtacaagaggatgctgaaaatgcatcttgtgagctgtgtggacttacaataaccgaggaggacctgtcatctcattacttagccaaacacattgaaaatatctgtgcatgtggtaaatgtggacaaatacttgtaaagggtaggcagcttcaggaacatgctcaacgatgtggcgagccccaagatctgaccatgaatgggttaggaaatactgaggagaaaatggacttggaagagaatcctgatgagcagtccgaaataagagatatgtttgttgaaatgctggatgattttagggacaatcattaccagataaacagtatccaaaaaaagcagttatttaaacattctgcctgcccttttcgatgtcctaattgtggccagcgttttgaaactgaaaatctagtggttgaacatatgtctagctgcttagatcaagatatgtttaagagtgccatcatggaagaaaatgaaagagatcacagacgaaagcatttttgtaatctgtgtggaaaaggattttatcagcggtgtcacttaagagaacactatactgttcatactaaggaaaaacagtttgtttgtcaaacatgtggaaagcagtttttaagagagcgtcagttgcgactgcacaatgatatgcacaaaggcatggccagtggtgaaatagggccttctaaacctgtggagaagtagtaatgaactagtccgtaacttgaaagtatttcgatttcttggctttatatatcttgtggaaaggacgatgtatttacagcggaagcgccaag

SEQ ID NO: 1944 - DNA, 2135 bp, Homo sapiens
  source 1..2135: mol_type = genomic DNA
accgccaccatggattttcctggtcactttgaacaaatcttccagcagctgaactaccagagacttcatggccagctctgtgattgtgtcattgtagtggggaatagacactttaaagcccaccgctccgtgctggcagcatgcagcacgcatttccgagccctgttctcagtggcagaaggagatcagaccatgaacatgatccagctggatagcgaggtggtgacagcagaggcctttgctgcactgattgacatgatgtatacctccaccctcatgctgggggagagcaatgtaatggatgtcttattggcagcctctcacctgcatttgaactctgttgttaaggcatgtaaacattacttaacgacaaggacgctgcccatgtctccccccagtgagcgcgttcaggagcagagcgcccgcatgcagcgctcctttatgctacagcagctgggactaagcatcgtgagctcagccctcaattccagccagaatggcgaggagcagccagcccccatgagctcttccatgcgcagtaacctggatcagcgcacgcccttccccatgagacgccttcataagcgcaagcagtctgcagaggagcgggccaggcagcgcctccgaccctccatagatgagtctgccatttcagatgttacaccggagaatgggccttcaggggttcattctcgggaggagttcttttcaccagattctctgaaaattgtggataatcctaaagctgatggaatgactgataaccaggaagatagtgcgatcatgtttgatcagtcttttggcactcaagaagatgcccaggtgcccagccagtctgataacagtgctggcaacatggcacagttgtccatggcctctcgtgcaactcaggttgagactagttttgatcaggaagctgcacctgagaaaagtagttttcagtgtgaaaaccctgaggttggccttggtgagaaggagcacatgagagtggtggttaaatctgagcccctgagctcacctgagcctcaggatgaagtgagcgatgtgacctcacaagcagaaggcagcgagtctgtggaagtggaaggagttgtggtcagtgccgagaagatagacctcagccctgaaagcagtgatcggagtttttcagatccccagtctagcacagacagggtaggtgatatccatattttggaagtcacaaataacctagagcataagtccacttttagtatttcgaattttcttaacaagagcagaggaaataactttactgcaaatcagaacaatgatgataatattccaaacaccactagtgactgcaggctggagagtgaggccccctatttgttgagtccagaggctgggcctgcaggtgggccctcctctgcccctggctcccatgtagagaacccatttagtgaacctgcagactcccacttcgtcaggcctatgcaggaggtgatgggcctgccgtgtgtgcagacttcaggctaccaaggaggagaacagtttgggatggacttttccaggtctggtttgggcctccactcctccttctccagggtaatgataggttccccaaggggaggagccagtaactttccttactaccgccgcatagctcccaaaatgccagttgtaacttccgtcaggagctcacagatcccagaaaactctaccagttctcagctaatgatgaatggagctacgtcctcatttgaaaatggccatccttcccagcctggccctccacagttgaccagggcatctgcagatgttctgtcaaagtgcaagaaggccttatcagagcacaatgttttggttgtagagggagctcgcaagtatgcctgcaaaatctgctgcaaaacttttctgactttgacagattgcaagaagcacatccgtgttcacacaggtgaaaagccttacgcctgcctgaagtgtggcaagaggtttagtcagtccagccacctgtataagcactcaaagactacctgcctgcgctggcagagcagcaatcttcccagcactttgctctagtaatgaactagtccgtaacttgaaagtatttcgatttcttggctttatatatcttgtggaaaggacgacaatgacagtgaggcactagtctc

SEQ ID NO: 1945 - DNA, 3143 bp, Homo sapiens
  source 1..3143: mol_type = genomic DNA
accgccaccatgcccccccctgcagaggtgacggacccgtcccatgcccccgccgtcctgcgccagctcaatgaacagcggctccgtggcctcttctgtgacgtcaccctcatagccggagacaccaagttccctgctcaccgcagcgtcctggctgcttcaagtcccttcttcagagaggccctgctcacttcagccccactaccccttccaccagctactgggggcgccgcacccaaccctgccaccaccacagctgcctcttcctcctcctcctcttcctcgtcttcttcctcttcttcctcctctgcttcttcttcttcttcctcttcctcttcctctccccctccagcctctccccctgcttcttccccaccccgggtcctggagttgccaggagtcccagcagctgcgttttctgatgtcctcaacttcatctacagcgcccggctcgcactgcctggtggtggaggggacggggcagctgtagcagagattggagctttggggcgccgtctgggcatctcccgccttcagggcctgggggagggaggtgatgcctgggtacctcctaccccagcccccatggccacctcgcagcctgaagaggacagctttgggcccgggcccaggccagctggggagtgggagggtgacagggctgaggcccaggcccctgacttgcagtgctccctgccccggcggcccctcccctgcccccagtgtggaaaaagcttcatccatcccaaacggctgcagacccatgaggcccagtgccgacgaggggccagcacgcgggggtctacagggctgggagctgggggcgctggccctggtggtcctgcaggggtggacgcctcagccctgcctccaccagtgggcttccgagggggccccgagcacgtggtgaaggtggtgggcggccacgtgctgtatgtgtgcgcggcctgcgagcgttcctacgtgaccctgtccagtctgaagagacacagcaatgtacactcgtggcggaggaagtacccctgccgctattgtgagaaagtgtttgctctggcggagtaccgcacgaagcatgaagtgtggcacacgggggagcgcaggtaccagtgcatcttctgttgggagacctttgtcacttactataacctgaagacccaccagcgagccttccacggcattagcccgggcctccttgccagtgagaagacacccaatggaggctacaagcccaagctcaatacactcaagctctaccgcctgctccccatgcgggcagccaagcggccctacaagacctacagccagggagccccggaggctcccctttctccaaccctcaacacaccggcccctgtggcaatgccagccagcccgccgcctgggcctccacctgccccagagcctggccctccaccctctgtcatcacttttgcccacccagccccctctgtcattgtccatgggggcagtagcagtggtggaggggggagtgggacggccagcacaggagggtcccaagctgcctcggttatcacttacactgctcccccgaggccacccaagaaacgagaatacccacctcctccccctgagcctgcagccacacccaccagcccagccacagcagtcagcccagccaccgctgcagggccagccatggccaccaccacggaggaggccaagggccggaatccacgggctggaaggactctgacttacacagccaagccagtgggcgggattggtggaggtgggggtccccccacaggggctggccggggcccctctcagctgcaggctccacctccactgtgtcagatcactgtgcgaataggggaggaggccatcgtcaagcgccgcatctcagagactgacctgcgtcctggggagctgagcggagaggagatggaggagagtgaggaggacgaagaggaggaggacgaagaggaggaggaggaggatgaggaggaatcaaaggctggtggggaggaccagctctggaggccctactactcctacaagcctaagcgcaaggctggagctgctggaggtgccagtgtggggggcagtgggctgccccgaggccgccggccaccacgttggaggcagaagctggaacggaggagctgggaggaaaccccagcggccgagagcccagcgggacgtgcccgcacagagcggaggcaccgatgcggggactgtgcccagaccttcaccaccctgagaaagctgcggaagcaccaagaggcccacggtgggggctcccacagctcccgggccggacggaggccctccacccgctttacctgcccccactgcgccaaggtgtgcaagaccgcagctgccctgagccgccacgggcagaggcatgctgctgagcggcccgggggcaccccaacccctgtcattgcctattccaagggcagcgctggcaccaggcccggggatgtcaaggaggaagccccccaagagatgcaagtctcctcatccagcggtgaggcaggtggcgggagcactgctgctgaggaagcttccgagaccgcctcactccaggaccctatcatttcagggggtgaggagcccccagtagtggcaagcgggggcagctatgtatacccacctgtgcaggaatttccactggccttgattgggggcggccgggaacctggcggtggcaggggaaaatctgggagtgaagggccagtgggggctggtgagggggaccggatggaggggataggggctgccaaagtcactttctaccctgagccctacccgctcgtctatggcccccagctccttgccgcctacccttacaacttcagtaacttggccgctctcccggttgctctcaacatggtcctacctgatgagaagggtgcgggggcccttcccttcctaccaggggtctttggctacgcagtgaatcctcaagcagcaccccctgccccaccaacaccacctcccccaactcttcctccaccaattccccctaagggagaaggggaaagggcaggggttgagagaacccagaagggcgatgtggggtagtaatgaactagtccgtaacttgaaagtatttcgatttcttggctttatatatcttgtggaaaggacgaagggtaacatagaatccttaggct

SEQ ID NO: 1946 - DNA, 1898 bp, Homo sapiens
  source 1..1898: mol_type = genomic DNA
accgccaccatgccttgtgttcaggcgcagtatgggtcctcgcctcaaggagccagccccgcttctcagagctacagttaccactcttcgggagaatacagctccgatttcttaactccagagtttgtcaagtttagcatggacctcaccaacactgaaatcactgccaccacttctctccccagcttcagtacctttatggacaactacagcacaggctacgacgtcaagccaccttgcttgtaccaaatgcccctgtccggacagcagtcctccattaaggtagaagacattcagatgcacaactaccagcaacacagccacctgcccccccagtctgaggagatgatgccgcactccgggtcggtttactacaagccctcctcgcccccgacgcccaccaccccgggcttccaggtgcagcacagccccatgtgggacgacccgggatctctccacaacttccaccagaactacgtggccactacgcacatgatcgagcagaggaaaacgccagtctcccgcctctccctcttctcctttaagcaatcgccccctggcaccccggtgtctagttgccagatgcgcttcgacgggcccctgcacgtccccatgaacccggagcccgccggcagccaccacgtggtggacgggcagaccttcgctgtgcccaaccccattcgcaagcccgcgtccatgggcttcccgggcctgcagatcggccacgcgtctcagctgctcgacacgcaggtgccctcaccgccgtcgcggggctccccctccaacgaggggctgtgcgctgtgtgtggggacaacgcggcctgccaacactacggcgtgcgcacctgtgagggctgcaaaggcttctttaagcgcacagtgcaaaaaaatgcaaaatacgtgtgtttagcaaataaaaactgcccagtggacaagcgtcgccggaatcgctgtcagtactgccgatttcagaagtgcctggctgttgggatggtcaaagaagtggttcgcacagacagtttaaaaggccggagaggtcgtttgccctcgaaaccgaagagcccacaggagccctctcccccttcgcccccggtgagtctgatcagtgccctcgtcagggcccatgtcgactccaacccggctatgaccagcctggactattccaggttccaggcgaaccctgactatcaaatgagtggagatgacacccagcatatccagcaattctatgatctcctgactggctccatggagatcatccggggctgggcagagaagatccctggcttcgcagacctgcccaaagccgaccaagacctgctttttgaatcagctttcttagaactgtttgtccttcgattagcatacaggtccaacccagtggagggtaaactcatcttttgcaatggggtggtcttgcacaggttgcaatgcgttcgtggctttggggaatggattgattccattgttgaattctcctccaacttgcagaatatgaacatcgacatttctgccttctcctgcattgctgccctggctatggtcacagagagacacgggctcaaggaacccaagagagtggaagaactgcaaaacaagattgtaaattgtctcaaagaccacgtgactttcaacaatggggggttgaaccgccccaattatttgtccaaactgttggggaagctcccagaacttcgtaccctttgcacacaggggctacagcgcattttctacctgaaattggaagacttggtgccaccgccagcaataattgacaaacttttcctggacactttacctttctagtaatgaactagtccgtaacttgaaagtatttcgatttcttggctttatatatcttgtggaaaggacgagcagattgcctgttcagcggcaaa

SEQ ID NO: 1947 - DNA, 1709 bp, Homo sapiens
  source 1..1709: mol_type = genomic DNA
accgccaccatggacaactacagcacaggctacgacgtcaagccaccttgcttgtaccaaatgcccctgtccggacagcagtcctccattaaggtagaagacattcagatgcacaactaccagcaacacagccacctgcccccccagtctgaggagatgatgccgcactccgggtcggtttactacaagccctcctcgcccccgacgcccaccaccccgggcttccaggtgcagcacagccccatgtgggacgacccgggatctctccacaacttccaccagaactacgtggccactacgcacatgatcgagcagaggaaaacgccagtctcccgcctctccctcttctcctttaagcaatcgccccctggcaccccggtgtctagttgccagatgcgcttcgacgggcccctgcacgtccccatgaacccggagcccgccggcagccaccacgtggtggacgggcagaccttcgctgtgcccaaccccattcgcaagcccgcgtccatgggcttcccgggcctgcagatcggccacgcgtctcagctgctcgacacgcaggtgccctcaccgccgtcgcggggctccccctccaacgaggggctgtgcgctgtgtgtggggacaacgcggcctgccaacactacggcgtgcgcacctgtgagggctgcaaaggcttctttaagcgcacagtgcaaaaaaatgcaaaatacgtgtgtttagcaaataaaaactgcccagtggacaagcgtcgccggaatcgctgtcagtactgccgatttcagaagtgcctggctgttgggatggtcaaagaagtggttcgcacagacagtttaaaaggccggagaggtcgtttgccctcgaaaccgaagagcccacaggagccctctcccccttcgcccccggtgagtctgatcagtgccctcgtcagggcccatgtcgactccaacccggctatgaccagcctggactattccaggttccaggcgaaccctgactatcaaatgagtggagatgacacccagcatatccagcaattctatgatctcctgactggctccatggagatcatccggggctgggcagagaagatccctggcttcgcagacctgcccaaagccgaccaagacctgctttttgaatcagctttcttagaactgtttgtccttcgattagcatacaggtccaacccagtggagggtaaactcatcttttgcaatggggtggtcttgcacaggttgcaatgcgttcgtggctttggggaatggattgattccattgttgaattctcctccaacttgcagaatatgaacatcgacatttctgccttctcctgcattgctgccctggctatggtcacagagagacacgggctcaaggaacccaagagagtggaagaactgcaaaacaagattgtaaattgtctcaaagaccacgtgactttcaacaatggggggttgaaccgccccaattatttgtccaaactgttggggaagctcccagaacttcgtaccctttgcacacaggggctacagcgcattttctacctgaaattggaagacttggtgccaccgccagcaataattgacaaacttttcctggacactttacctttctagtaatgaactagtccgtaacttgaaagtatttcgatttcttggctttatatatcttgtggaaaggacgaattgggatgggctcgaggctagca

SEQ ID NO: 1948 - DNA, 1982 bp, Homo sapiens
  source 1..1982: mol_type = genomic DNA
accgccaccatgccctgcgtccaagcccaatatagcccttcccctccaggttccagttatgcggcgcagacatacagctcggaatacaccacggagatcatgaaccccgactacaccaagctgaccatggaccttggcagcactgagatcacggctacagccaccacgtccctgcccagcatcagtaccttcgtggagggctactcgagcaactacgaactcaagccttcctgcgtgtaccaaatgcagcggcccttgatcaaagtggaggaggggcgggcgcccagctaccatcaccatcaccaccaccaccaccaccaccaccaccatcaccagcagcagcatcagcagccatccattcctccagcctccagcccggaggacgaggtgctgcccagcacctccatgtacttcaagcagtccccaccgtccacccccaccacgccggccttccccccgcaggcgggggcgttatgggacgaggcactgccctcggcgcccggctgcatcgcacccggcccgctgctggacccgccgatgaaggcggtccccacggtggccggcgcgcgcttcccgctcttccacttcaagccctcgccgccgcatccccccgcgcccagcccggccggcggccaccacctcggctacgacccgacggccgctgccgcgctcagcctgccgctgggagccgcagccgccgcgggcagccaggccgccgcgcttgagagccacccgtacgggctgccgctggccaagagggcggccccgctggccttcccgcctctcggcctcacgccctcccctaccgcgtccagcctgctgggcgagagtcccagcctgccgtcgccgcccagcaggagctcgtcgtctggcgagggcacgtgtgccgtgtgcggggacaacgccgcctgccagcactacggcgtgcgaacctgcgagggctgcaagggctttttcaagagaacagtgcagaaaaatgcaaaatatgtttgcctggcaaataaaaactgcccagtagacaagagacgtcgaaaccgatgtcagtactgtcgatttcagaagtgtctcagtgttggaatggtaaaagaagttgtccgtacagatagtctgaaagggaggagaggtcgtctgccttccaaaccaaagagcccattacaacaggaaccttctcagccctctccaccttctcctccaatctgcatgatgaatgcccttgtccgagctttaacagactcaacacccagagatcttgattattccagatactgtcccactgaccaggctgctgcaggcacagatgctgagcatgtgcaacaattctacaacctcctgacagcctccattgatgtatccagaagctgggcagaaaagattccgggatttactgatctccccaaagaagatcagacattacttattgaatcagcctttttggagctgtttgtcctcagactttccatcaggtcaaacactgctgaagataagtttgtgttctgcaatggacttgtcctgcatcgacttcagtgccttcgtggatttggggagtggctcgactctattaaagacttttccttaaatttgcagagcctgaaccttgatatccaagccttagcctgcctgtcagcactgagcatgatcacagaaagacatgggttaaaagaaccaaagagagtcgaagagctatgcaacaagatcacaagcagtttaaaagaccaccagagtaagggacaggctctggagcccaccgagtccaaggtcctgggtgccctggtagaactgaggaagatctgcaccctgggcctccagcgcatcttctacctgaagctggaagacttggtgtctccaccttccatcattgacaagctcttcctggacaccctacctttctagtaatgaactagtccgtaacttgaaagtatttcgatttcttggctttatatatcttgtggaaaggacgagtaaagtcaacgtgccggtcgatt

SEQ ID NO: 1949 - DNA, 1433 bp, Homo sapiens
  source 1..1433: mol_type = genomic DNA
accgccaccatgccctgcgtccaagcccaatatagcccttcccctccaggttccagttatgcggcgcagacatacagctcggaatacaccacggagatcatgaaccccgactacaccaagctgaccatggaccttggcagcactgagatcacggctacagccaccacgtccctgcccagcatcagtaccttcgtggagggctactcgagcaactacgaactcaagccttcctgcgtgtaccaaatgcagcggcccttgatcaaagtggaggaggggcgggcgcccagctaccatcaccatcaccaccaccaccaccaccaccaccaccatcaccagcagcagcatcagcagccatccattcctccagcctccagcccggaggacgaggtgctgcccagcacctccatgtacttcaagcagtccccaccgtccacccccaccacgccggccttccccccgcaggcgggggcgttatgggacgaggcactgccctcggcgcccggctgcatcgcacccggcccgctgctggacccgccgatgaaggcggtccccacggtggccggcgcgcgcttcccgctcttccacttcaagccctcgccgccgcatccccccgcgcccagcccggccggcggccaccacctcggctacgacccgacggccgctgccgcgctcagcctgccgctgggagccgcagccgccgcgggcagccaggccgccgcgcttgagagccacccgtacgggctgccgctggccaagagggcggccccgctggccttcccgcctctcggcctcacgccctcccctaccgcgtccagcctgctgggcgagagtcccagcctgccgtcgccgcccagcaggagctcgtcgtctggcgagggcacgtgtgccgtgtgcggggacaacgccgcctgccagcactacggcgtgcgaacctgcgagggctgcaagggctttttcaagagaacagtgcagaaaaatgcaaaatatgtttgcctggcaaataaaaactgcccagtagacaagagacgtcgaaaccgatgtcagtactgtcgatttcagaagtgtctcagtgttggaatggtaaaagaagttgtccgtacagatagtctgaaagggaggagaggtcgtctgccttccaaaccaaagagcccattacaacaggaaccttctcagccctctccaccttctcctccaatctgcatgatgaatgcccttgtccgagctttaacagactcaacacccagagatcttgattattccagagtaagttttatgatttcctgctttcaaatgaatgatcagggtctctatttatggctactagtaataagagttgattagtaatgaactagtccgtaacttgaaagtatttcgatttcttggctttatatatcttgtggaaaggacgagcaattccggatgctttgtcgtgg

SEQ ID NO: 1950 - DNA, 2015 bp, Homo sapiens
  source 1..2015: mol_type = genomic DNA
accgccaccatgcatgactcaatcagatttggaaatgtggatatgccctgcgtccaagcccaatatagcccttcccctccaggttccagttatgcggcgcagacatacagctcggaatacaccacggagatcatgaaccccgactacaccaagctgaccatggaccttggcagcactgagatcacggctacagccaccacgtccctgcccagcatcagtaccttcgtggagggctactcgagcaactacgaactcaagccttcctgcgtgtaccaaatgcagcggcccttgatcaaagtggaggaggggcgggcgcccagctaccatcaccatcaccaccaccaccaccaccaccaccaccatcaccagcagcagcatcagcagccatccattcctccagcctccagcccggaggacgaggtgctgcccagcacctccatgtacttcaagcagtccccaccgtccacccccaccacgccggccttccccccgcaggcgggggcgttatgggacgaggcactgccctcggcgcccggctgcatcgcacccggcccgctgctggacccgccgatgaaggcggtccccacggtggccggcgcgcgcttcccgctcttccacttcaagccctcgccgccgcatccccccgcgcccagcccggccggcggccaccacctcggctacgacccgacggccgctgccgcgctcagcctgccgctgggagccgcagccgccgcgggcagccaggccgccgcgcttgagagccacccgtacgggctgccgctggccaagagggcggccccgctggccttcccgcctctcggcctcacgccctcccctaccgcgtccagcctgctgggcgagagtcccagcctgccgtcgccgcccagcaggagctcgtcgtctggcgagggcacgtgtgccgtgtgcggggacaacgccgcctgccagcactacggcgtgcgaacctgcgagggctgcaagggctttttcaagagaacagtgcagaaaaatgcaaaatatgtttgcctggcaaataaaaactgcccagtagacaagagacgtcgaaaccgatgtcagtactgtcgatttcagaagtgtctcagtgttggaatggtaaaagaagttgtccgtacagatagtctgaaagggaggagaggtcgtctgccttccaaaccaaagagcccattacaacaggaaccttctcagccctctccaccttctcctccaatctgcatgatgaatgcccttgtccgagctttaacagactcaacacccagagatcttgattattccagatactgtcccactgaccaggctgctgcaggcacagatgctgagcatgtgcaacaattctacaacctcctgacagcctccattgatgtatccagaagctgggcagaaaagattccgggatttactgatctccccaaagaagatcagacattacttattgaatcagcctttttggagctgtttgtcctcagactttccatcaggtcaaacactgctgaagataagtttgtgttctgcaatggacttgtcctgcatcgacttcagtgccttcgtggatttggggagtggctcgactctattaaagacttttccttaaatttgcagagcctgaaccttgatatccaagccttagcctgcctgtcagcactgagcatgatcacagaaagacatgggttaaaagaaccaaagagagtcgaagagctatgcaacaagatcacaagcagtttaaaagaccaccagagtaagggacaggctctggagcccaccgagtccaaggtcctgggtgccctggtagaactgaggaagatctgcaccctgggcctccagcgcatcttctacctgaagctggaagacttggtgtctccaccttccatcattgacaagctcttcctggacaccctacctttctagtaatgaactagtccgtaacttgaaagtatttcgatttcttggctttatatatcttgtggaaaggacgactgttgaggacagtggagccctct

SEQ ID NO: 1951 - DNA, 893 bp, Homo sapiens
  source 1..893: mol_type = genomic DNA
accgccaccatgttttatttccactgcccgccacagctagagggcactgcaacctttggcaatcactcttcgggggattttgatgacgggtttctgcgtagaaaacagcgccggaaccggacgacgttcactcttcagcagctggaagctctcgaggccgtttttgcccaaacacactatccagatgtcttcaccagagaagagctcgccatgaaaataaacctcacagaagccagagtgcaggtttggttccagaacagaagggccaaatggaggaagacagagagaggggcctcagaccaggagccaggagccaaggagcccatggcagaggtgacacctcctccagtgagaaacatcaactccccgccccctggggaccaagcccggagtaagaaggaggcgctggaggcccagcagagcctggggcgaacggtaggtcctgcagggcctttcttcccctcctgcttgccggggactctcctgaacacggccacctacgcccaggccttgtcccatgtggcttccctcaaagggggcccactgtgctcttgctgcgtcccagaccccatgggactctccttccttcccacctatggctgccagagtaaccgcacggccagcgtggccaccctgcgcatgaaggcccgcgagcactcagaagctgtcctgcagtcagccaacctcctgccttccaccagcagcagccccggccctgtcgccaagccggcgcccccagatggcagccaggaaaagacctctcccaccaaggaacagagcgaggcagagaagagtgtatagtaatgaactagtccgtaacttgaaagtatttcgatttcttggctttatatatcttgtggaaaggacgagattcatccagagacacgggcgac

SEQ ID NO: 1952 - DNA, 1079 bp, Homo sapiens
  source 1..1079: mol_type = genomic DNA
accgccaccatgctgtctcatgccgacctcctggacgccaggctaggtatgaaagatgccgccgagcttctgggccaccgggaggcggtgaagtgtaggctgggcgtggggggctccgaccccgggggccatccgggggacctggcgcccaactctgacccagtggagggagccactctgctgcccggggaggacatcaccacagtgggctctactccggcctcgctggcggtgagcgccaaagacccggacaagcagcccgggccccagggcggcccgaaccccagccaagccggccagcagcagggccaacagaagcagaagcgccaccggacgcgcttcacccccgcacagctcaacgagttggagaggagcttcgccaagactcactaccccgacatctttatgcgtgaggagctggcactgcgtatcgggctgaccgagtcccgagtgcaggtctggttccagaaccgacgcgccaagtggaagaagcgcaaaaagacgaccaacgtgttccgtgcgcccggcacactgctgcccacgccaggcctgcctcagttcccgtcggctgccgccgccgctgccgccgccatgggcgacagcctgtgctctttccacgccaacgacacccgctgggcggcggccgccatgcctggcgtgtcacagctgcctctgccgccggcgctgggcaggcagcaggccatggcgcagtcgctgtcccagtgcagcctggcggccggtccgccgcccaactccatgggcctgtccaacagcctggcgggttccaacggcgcggggctgcagtcgcacctctaccagcccgccttccccggcatggtgcccgcctccctccccggccccagcaacgtctccggttcgccccagctctgcagctccccggacagcagcgacgtgtggcggggcaccagcatcgcctccctccgccgcaaggcgctagagcacacagtctctatgagcttcacttagtaatgaactagtccgtaacttgaaagtatttcgatttcttggctttatatatcttgtggaaaggacgaaacaatttgatagacagcccgtcg

SEQ ID NO: 1953 - DNA, 1862 bp, Homo sapiens
  source 1..1862: mol_type = genomic DNA
accgccaccatggttcactccagcatgggggctccagaaataagaatgtctaagcccctggaggccgagaagcaaggtctggactccccatcagagcacacagacaccgaaagaaatggaccagacactaatcatcagaacccccaaaataagacctccccattctccgtgtccccaactggccccagtacaaagatcaaggctgaagaccccagtggcgattcagccccagcagcacccctgccccctcagccggcccagcctcatctgccccaggcccaactcatgttgacgggcagccagctagctggggacatacagcagctcctccagctccagcagctggtgcttgtgccaggccaccacctccagccacctgctcagttcctgctaccgcaggcccagcagagccagccaggcctgctaccgacaccaaatctattccagctacctcagcaaacccagggagctcttctgacctcccagccccgggccgggcttcccacacagccccccaaatgcttggagccaccatcccaccccgaggagcccagtgatctggaggagctggagcaattcgcccgcaccttcaagcaacgccgcatcaagctgggcttcacgcagggtgatgtgggcctggccatgggcaagctctacggcaacgacttcagccagacgaccatttcccgcttcgaggccctcaacctgagcttcaagaacatgtgcaaactcaagcccctcctggagaagtggctcaacgatgcagagactatgtctgtggactcaagcctgcccagccccaaccagctgagcagccccagcctgggtttcgacggcctgcccggccggagacgcaagaagaggaccagcatcgagacaaacgtccgcttcgccttagagaagagttttctagcgaaccagaagcctacctcagaggagatcctgctgatcgccgagcagctgcacatggagaaggaagtgatccgcgtctggttctgcaaccggcgccagaaggagaaacgcatcaacccctgcagtgcggcccccatgctgcccagcccagggaagccggccagctacagcccccatatggtcacaccccaagggggcgcggggaccttaccgttgtcccaagcttccagcagtctgagcacaacagttactaccttatcctcagctgtggggacgctccaccccagccggacagctggagggggtgggggcgggggcggggctgcgccccccctcaattccatcccctctgtcactcccccacccccggccaccaccaacagcacaaaccccagccctcaaggcagccactcggctatcggcttgtcaggcctgaaccccagcacgggaagcacaatggtggggttgagctccgggctgagtccagccctcatgagcaacaaccctttggccactatccaagccctggcctctggtggaaccctgccccttaccagccttgatggcagcgggaatctggtgctgggggcagccggtgcagccccggggagccctggcctggtgacctcgccgctcttcttgaatcatgctgggctgcccctgctcagcaccccgcctggtgtgggcctggtctcagcagcggctgcggctgtggcagcctccatctccagcaagtctcctggcctctcctcctcatcctcttcatcctcatcctcctcctcctccacttgcagcgagacggcagcacagacccctggaggtccaggggggcccgaggcagggtccaaacctgagtagtaatgaactagtccgtaacttgaaagtatttcgatttcttggctttatatatcttgtggaaaggacgacttagcgcgtatcgtctgcttgtt

SEQ ID NO: 1954 - DNA, 1541 bp, Homo sapiens
  source 1..1541: mol_type = genomic DNA
accgccaccatggttcactccagcatgggggctccagaaataagaatgtctaagcccctggaggccgagaagcaaggtctggactccccatcagagcacacagacaccgaaagaaatggaccagacactaatcatcagaacccccaaaataagacctccccattctccgtgtccccaactggccccagtacaaagatcaaggctgaagaccccagtggcgattcagccccagcagcacccctgccccctcagccggcccagcctcatctgccccaggcccaactcatgttgacgggcagccagctagctggggacatacagcagctcctccagctccagcagctggtgcttgtgccaggccaccacctccagccacctgctcagttcctgctaccgcaggcccagcagagccagccaggcctgctaccgacaccaaatctattccagctacctcagcaaacccagggagctcttctgacctcccagccccgggccgggcttcccacacaggccgtgacccgccctacgctgcccgacccgcacctctcgcacccgcagccccccaaatgcttggagccaccatcccaccccgaggagcccagtgatctggaggagctggagcaattcgcccgcaccttcaagcaacgccgcatcaagctgggcttcacgcagggtgatgtgggcctggccatgggcaagctctacggcaacgacttcagccagacgaccatttcccgcttcgaggccctcaacctgagcttcaagaacatgtgcaaactcaagcccctcctggagaagtggctcaacgatgcagagactatgtctgtggactcaagcctgcccagccccaaccagctgagcagccccagcctgggtttcgacggcctgcccggccggagacgcaagaagaggaccagcatcgagacaaacgtccgcttcgccttagagaagagttttctagcgaaccagaagcctacctcagaggagatcctgctgatcgccgagcagctgcacatggagaaggaagtgatccgcgtctggttctgcaaccggcgccagaaggagaaacgcatcaacccctgcagtgcggcccccatgctgcccagcccagggaagccggccagctacagcccccatatggtcacaccccaagggggcgcggggaccttaccgttgtcccaagcttccagcagtctgagcacaacagttactaccttatcctcagctgtggggacgctccaccccagccggacagctggagggggtgggggcgggggcggggctgcgccccccctcaattccatcccctctgtcactcccccacccccggccaccaccaacagcacaaaccccagccctcaaggcagccactcggctatcggcttgtcaggcctgaaccccagcacgggccctggcctctggtggaaccctgccccttaccagccttagtaatgaactagtccgtaacttgaaagtatttcgatttcttggctttatatatcttgtggaaaggacgaacgtcaaatacttatggagacgta

SEQ ID NO: 1955 - DNA, 1559 bp, Homo sapiens
  source 1..1559: mol_type = genomic DNA
accgccaccatggttcactccagcatgggggctccagaaataagaatgtctaagcccctggaggccgagaagcaaggtctggactccccatcagagcacacagacaccgaaagaaatggaccagacactaatcatcagaacccccaaaataagacctccccattctccgtgtccccaactggccccagtacaaaggtgggcattctctctggcctccacttaacattctggggtcccggaccctgcctctctcccccccagatcaaggctgaagaccccagtggcgattcagccccagcagcacccctgccccctcagccggcccagcctcatctgccccaggcccaactcatgttgacgggcagccagctagctggggacatacagcagctcctccagctccagcagctggtgcttgtgccaggccaccacctccagccacctgctcagttcctgctaccgcaggcccagcagagccagccaggcctgctaccgacaccaaatctattccagctacctcagcaaacccagggagctcttctgacctcccagccccgggccgggcttcccacacagccccccaaatgcttggagccaccatcccaccccgaggagcccagtgatctggaggagctggagcaattcgcccgcaccttcaagcaacgccgcatcaagctgggcttcacgcagggtgatgtgggcctggccatgggcaagctctacggcaacgacttcagccagacgaccatttcccgcttcgaggccctcaacctgagcttcaagaacatgtgcaaactcaagcccctcctggagaagtggctcaacgatgcagagactatgtctgtggactcaagcctgcccagccccaaccagctgagcagccccagcctgggtttcgacggcctgcccggccggagacgcaagaagaggaccagcatcgagacaaacgtccgcttcgccttagagaagagttttctagcgaaccagaagcctacctcagaggagatcctgctgatcgccgagcagctgcacatggagaaggaagtgatccgcgtctggttctgcaaccggcgccagaaggagaaacgcatcaacccctgcagtgcggcccccatgctgcccagcccagggaagccggccagctacagcccccatatggtcacaccccaagggggcgcggggaccttaccgttgtcccaagcttccagcagtctgagcacaacagttactaccttatcctcagctgtggggacgctccaccccagccggacagctggagggggtgggggcgggggcggggctgcgccccccctcaattccatcccctctgtcactcccccacccccggccaccaccaacagcacaaaccccagccctcaaggcagccactcggctatcggcttgtcaggcctgaaccccagcacgggccctggcctctggtggaaccctgccccttaccagccttagtaatgaactagtccgtaacttgaaagtatttcgatttcttggctttatatatcttgtggaaaggacgagtttcaacaaatatttgtctataa

SEQ ID NO: 1956 - DNA, 1493 bp, Homo sapiens
  source 1..1493: mol_type = genomic DNA
accgccaccatggttcactccagcatgggggctccagaaataagaatgtctaagcccctggaggccgagaagcaaggtctggactccccatcagagcacacagacaccgaaagaaatggaccagacactaatcatcagaacccccaaaataagacctccccattctccgtgtccccaactggccccagtacaaagatcaaggctgaagaccccagtggcgattcagccccagcagcacccctgccccctcagccggcccagcctcatctgccccaggcccaactcatgttgacgggcagccagctagctggggacatacagcagctcctccagctccagcagctggtgcttgtgccaggccaccacctccagccacctgctcagttcctgctaccgcaggcccagcagagccagccaggcctgctaccgacaccaaatctattccagctacctcagcaaacccagggagctcttctgacctcccagccccgggccgggcttcccacacagccccccaaatgcttggagccaccatcccaccccgaggagcccagtgatctggaggagctggagcaattcgcccgcaccttcaagcaacgccgcatcaagctgggcttcacgcagggtgatgtgggcctggccatgggcaagctctacggcaacgacttcagccagacgaccatttcccgcttcgaggccctcaacctgagcttcaagaacatgtgcaaactcaagcccctcctggagaagtggctcaacgatgcagagactatgtctgtggactcaagcctgcccagccccaaccagctgagcagccccagcctgggtttcgacggcctgcccggccggagacgcaagaagaggaccagcatcgagacaaacgtccgcttcgccttagagaagagttttctagcgaaccagaagcctacctcagaggagatcctgctgatcgccgagcagctgcacatggagaaggaagtgatccgcgtctggttctgcaaccggcgccagaaggagaaacgcatcaacccctgcagtgcggcccccatgctgcccagcccagggaagccggccagctacagcccccatatggtcacaccccaagggggcgcggggaccttaccgttgtcccaagcttccagcagtctgagcacaacagttactaccttatcctcagctgtggggacgctccaccccagccggacagctggagggggtgggggcgggggcggggctgcgccccccctcaattccatcccctctgtcactcccccacccccggccaccaccaacagcacaaaccccagccctcaaggcagccactcggctatcggcttgtcaggcctgaaccccagcacgggccctggcctctggtggaaccctgccccttaccagccttagtaatgaactagtccgtaacttgaaagtatttcgatttcttggctttatatatcttgtggaaaggacgactgacgtttgattccgccgtggca

SEQ ID NO: 1957 - DNA, 1505 bp, Homo sapiens
  source 1..1505: mol_type = genomic DNA
accgccaccatggttcactccagcatgggggctccagaaataagaatgtctaagcccctggaggccgagaagcaaggtctggactccccatcagagcacacagacaccgaaagaaatggaccagacactaatcatcagaacccccaaaataagacctccccattctccgtgtccccaactggccccagtacaaagatcaaggctgaagaccccagtggcgattcagccccagcagcacccctgccccctcagccggcccagcctcatctgccccaggcccaactcatgttgacgggcagccagctagctggggacatacagcagctcctccagctccagcagctggtgcttgtgccaggccaccacctccagccacctgctcagttcctgctaccgcaggcccagcagagccagccaggcctgctaccgacaccaaatctattccagctacctcagcaaacccagggagctcttctgacctcccagccccgggccgggcttcccacacaggccgtgacccgccctacgctgcccgacccgcacctctcgcacccgcagccccccaaatgcttggagccaccatcccaccccgaggagcccagtgatctggaggagctggagcaattcgcccgcaccttcaagcaacgccgcatcaagctgggcttcacgcagggtgatgtgggcctggccatgggcaagctctacggcaacgacttcagccagacgaccatttcccgcttcgaggccctcaacctgagcttcaagaacatgtgcaaactcaagcccctcctggagaagtggctcaacgatgcagagactatgtctgtggactcaagcctgcccagccccaaccagctgagcagccccagcctgggtttcgacggcctgcccggccggagacgcaagaagaggaccagcatcgagacaaacgtccgcttcgccttagagaagagttttctagcgaaccagaagcctacctcagaggagatcctgctgatcgccgagcagctgcacatggagaaggaagtgatccgcgtctggttctgcaaccggcgccagaaggagaaacgcatcaacccctgcagtgcggcccccatgctgcccagcccagggaagccggccagctacagcccccatatggtcacaccccaagggggcgcggggaccttaccgttgtcccaagcttccagcagtctgagcacaacagttactaccttatcctcagctgtggggacgctccaccccagccggacagctggagggggtgggggcgggggcggggctgcgccccccctcaattccatcccctctgtcactcccccacccccggccaccaccaacagcacaaaccccagccctcaaggcagccactcggctatcggcttgtcaggcctgaaccccagcacggggtagtaatgaactagtccgtaacttgaaagtatttcgatttcttggctttatatatcttgtggaaaggacgaaccgacgacaatcatgacgatcct

SEQ ID NO: 1958 - DNA, 1535 bp, Homo sapiens
  source 1..1535: mol_type = genomic DNA
accgccaccatgaagagtcttccaatcctactgttgctgtgcgtggcagtttgctcagcctatccattggatggagctgcaaggggtgaggacaccagcatgaaccttgttcagaaatatctagaaaactactacgacctcaaaaaagatgtgaaacagtttgttaggagaaaggacagtggtcctgttgttaaaaaaatccgagaaatgcagaagttccttggattggaggtgacggggaagctggactccgacactctggaggtgatgcgcaagcccaggtgtggagttcctgatgttggtcacttcagaacctttcctggcatcccgaagtggaggaaaacccaccttacatacaggattgtgaattatacaccagatttgccaaaagatgctgttgattctgctgttgagaaagctctgaaagtctgggaagaggtgactccactcacattctccaggctgtatgaaggagaggctgatataatgatctcttttgcagttagagaacatggagacttttacccttttgatggacctggaaatgttttggcccatgcctatgcccctgggccagggattaatggagatgcccactttgatgatgatgaacaatggacaaaggatacaacagggaccaatttatttctcgttgctgctcatgaaattggccactccctgggtctctttcactcagccaacactgaagctttgatgtacccactctatcactcactcacagacctgactcggttccgcctgtctcaagatgatataaatggcattcagtccctctatggacctccccctgactcccctgagacccccctggtacccacggaacctgtccctccagaacctgggacgccagccaactgtgatcctgctttgtcctttgatgctgtcagcactctgaggggagaaatcctgatctttaaagacaggcacttttggcgcaaatccctcaggaagcttgaacctgaattgcatttgatctcttcattttggccatctcttccttcaggcgtggatgccgcatatgaagttactagcaaggacctcgttttcatttttaaaggaaatcaattctgggctatcagaggaaatgaggtacgagctggatacccaagaggcatccacaccctaggtttccctccaaccgtgaggaaaatcgatgcagccatttctgataaggaaaagaacaaaacatatttctttgtagaggacaaatactggagatttgatgagaagagaaattccatggagccaggctttcccaagcaaatagctgaagactttccagggattgactcaaagattgatgctgtttttgaagaatttgggttcttttatttctttactggatcttcacagttggagtttgacccaaatgcaaagaaagtgacacacactttgaagagtaacagctggcttaattgttagtaatgaactagtccgtaacttgaaagtatttcgatttcttggctttatatatcttgtggaaaggacgagcctcgtttagttacgaccagaac

SEQ ID NO: 1959 - DNA, 2369 bp, Homo sapiens
  source 1..2369: mol_type = genomic DNA
accgccaccatgctggactgcagtgactatgttctagactcaagaatgaacaatccgtcagaaaccagtaaaccatctatggagagtggagatggcaacacaggcacacaaaccaatggtctggactttcagaagcagcctgtgcctgtaggaggagcaatctcaacagcccaggcgcaggctttccttggacatctccatcaggtccaactcgctggaacaagtttacaggctgctgctcagtctttaaatgtacagtctaaatctaatgaagaatcgggggattcgcagcagccaagccagccttcccagcagccttcagtgcaggcagccattccccagacccagcttatgctagctggaggacagataactgggcttactttgacgcctgcccagcaacagttactactccagcaggcacaggcacaggcacagctgctggctgctgcagtgcagcagcactccgccagccagcagcacagtgctgctggagccaccatctccgcctctgctgccacgcccatgacgcagatccccctgtctcagcccatacagatcgcacaggatcttcaacaactgcaacagcttcaacagcagaatctcaacctgcaacagtttgtgttggtgcatccaaccaccaatttgcagccagcgcagtttatcatctcacagacgccccagggccagcagggtctcctgcaagcgcaaaatcttctaacgcaactacctcagcaaagccaagccaacctcctacagtcgcagccaagcatcaccctcacctcccagccagcaaccccaacacgcacaatagcagcaaccccaattcagacacttccacagagccagtcaacaccaaagcgaattgatactcccagcttggaggagcccagtgaccttgaggagcttgagcagtttgccaagaccttcaaacaaagacgaatcaaacttggattcactcagggtgatgttgggctcgctatggggaaactatatggaaatgacttcagccaaactaccatctctcgatttgaagccttgaacctcagctttaagaacatgtgcaagttgaagccacttttagagaagtggctaaatgatgcagagaacctctcatctgattcgtccctctccagcccaagtgccctgaattctccaggaattgagggcttgagccgtaggaggaagaaacgcaccagcatagagaccaacatccgtgtggccttagagaagagtttcttggagaatcaaaagcctacctcggaagagatcactatgattgctgatcagctcaatatggaaaaagaggtgattcgtgtttggttctgtaaccgccgccagaaagaaaaaagaatcaacccaccaagcagtggtgggaccagcagctcacctattaaagcaattttccccagcccaacttcactggtggcgaccacaccaagccttgtgactagcagtgcagcaactaccctcacagtcagccctgtcctccctctgaccagtgctgctgtgacgaatctttcagttacaggcacttcagacaccacctccaacaacacagcaaccgtgatttccacagcgcctccagcttcctcagcagtcacgtccccctctctgagtccctccccttctgcctcagcctccacctccgaggcatccagtgccagtgagaccagcacaacacagaccacctccactcctttgtcctcccctcttgggaccagccaggtgatggtgacagcatcaggtttgcaaacagcagcagctgctgcccttcaaggagctgcacagttgccagcaaatgccagtcttgctgccatggcagctgctgcaggactaaacccaagcctgatggcaccctcacagtttgcggctggaggtgccttactcagtctgaatccagggaccctgagcggtgctctcagcccagctctaatgagcaacagtacactggcaactattcaagctcttgcttctggtggctctcttccaataacatcacttgatgcaactgggaacctggtatttgccaatgcgggaggagcccccaacatcgtgactgcccctctgttcctgaaccctcagaacctctctctgctcaccagcaaccctgttagcttggtctctgccgccgcagcatctgcagggaactctgcacctgtagccagccttcacgccacctccacctctgctgagtccatccagaactctctcttcacagtggcctctgccagcggggctgcgtccaccaccaccaccgcctccaaggcacagtagtaatgaactagtccgtaacttgaaagtatttcgatttcttggctttatatatcttgtggaaaggacgaaacgctccagcatgcccgctggaa

SEQ ID NO: 1960 - DNA, 2213 bp, Homo sapiens
  source 1..2213: mol_type = genomic DNA
accgccaccatggcggacggaggagcagcgagtcaagatgagagttcagccgcggcggcagcagcagcagactcaagaatgaacaatccgtcagaaaccagtaaaccatctatggagagtggagatggcaacacaggcacacaaaccaatggtctggactttcagaagcagcctgtgcctgtaggaggagcaatctcaacagcccaggcgcaggctttccttggacatctccatcaggtccaactcgctggaacaagtttacaggctgctgctcagtctttaaatgtacagtctaaatctaatgaagaatcgggggattcgcagcagccaagccagccttcccagcagccttcagtgcaggcagccattccccagacccagcttatgctagctggaggacagataactggggatcttcaacaactgcaacagcttcaacagcagaatctcaacctgcaacagtttgtgttggtgcatccaaccaccaatttgcagccagcgcagtttatcatctcacagacgccccagggccagcagggtctcctgcaagcgcaaaatcttctaacgcaactacctcagcaaagccaagccaacctcctacagtcgcagccaagcatcaccctcacctcccagccagcaaccccaacacgcacaatagcagcaaccccaattcagacacttccacagagccagtcaacaccaaagcgaattgatactcccagcttggaggagcccagtgaccttgaggagcttgagcagtttgccaagaccttcaaacaaagacgaatcaaacttggattcactcagggtgatgttgggctcgctatggggaaactatatggaaatgacttcagccaaactaccatctctcgatttgaagccttgaacctcagctttaagaacatgtgcaagttgaagccacttttagagaagtggctaaatgatgcagagaacctctcatctgattcgtccctctccagcccaagtgccctgaattctccaggaattgagggcttgagccgtaggaggaagaaacgcaccagcatagagaccaacatccgtgtggccttagagaagagtttcttggagaatcaaaagcctacctcggaagagatcactatgattgctgatcagctcaatatggaaaaagaggtgattcgtgtttggttctgtaaccgccgccagaaagaaaaaagaatcaacccaccaagcagtggtgggaccagcagctcacctattaaagcaattttccccagcccaacttcactggtggcgaccacaccaagccttgtgactagcagtgcagcaactaccctcacagtcagccctgtcctccctctgaccagtgctgctgtgacgaatctttcagttacaggcacttcagacaccacctccaacaacacagcaaccgtgatttccacagcgcctccagcttcctcagcagtcacgtccccctctctgagtccctccccttctgcctcagcctccacctccgaggcatccagtgccagtgagaccagcacaacacagaccacctccactcctttgtcctcccctcttgggaccagccaggtgatggtgacagcatcaggtttgcaaacagcagcagctgctgcccttcaaggagctgcacagttgccagcaaatgccagtcttgctgccatggcagctgctgcaggactaaacccaagcctgatggcaccctcacagtttgcggctggaggtgccttactcagtctgaatccagggaccctgagcggtgctctcagcccagctctaatgagcaacagtacactggcaactattcaagctcttgcttctggtggctctcttccaataacatcacttgatgcaactgggaacctggtatttgccaatgcgggaggagcccccaacatcgtgactgcccctctgttcctgaaccctcagaacctctctctgctcaccagcaaccctgttagcttggtctctgccgccgcagcatctgcagggaactctgcacctgtagccagccttcacgccacctccacctctgctgagtccatccagaactctctcttcacagtggcctctgccagcggggctgcgtccaccaccaccaccgcctccaaggcacagtagtaatgaactagtccgtaacttgaaagtatttcgatttcttggctttatatatcttgtggaaaggacgagcgccgatagtctgcgtagcggac

SEQ ID NO: 1961 - DNA, 2402 bp, Homo sapiens
  source 1..2402: mol_type = genomic DNA
accgccaccatggcggacggaggagcagcgagtcaagatgagagttcagccgcggcggcagcagcagcagactcaagaatgaacaatccgtcagaaaccagtaaaccatctatggagagtggagatggcaacacaggcacacaaaccaatggtctggactttcagaagcagcctgtgcctgtaggaggagcaatctcaacagcccaggcgcaggctttccttggacatctccatcaggtccaactcgctggaacaagtttacaggctgctgctcagtctttaaatgtacagtctaaatctaatgaagaatcgggggattcgcagcagccaagccagccttcccagcagccttcagtgcaggcagccattccccagacccagcttatgctagctggaggacagataactgggcttactttgacgcctgcccagcaacagttactactccagcaggcacaggcacaggcacagctgctggctgctgcagtgcagcagcactccgccagccagcagcacagtgctgctggagccaccatctccgcctctgctgccacgcccatgacgcagatccccctgtctcagcccatacagatcgcacaggatcttcaacaactgcaacagcttcaacagcagaatctcaacctgcaacagtttgtgttggtgcatccaaccaccaatttgcagccagcgcagtttatcatctcacagacgccccagggccagcagggtctcctgcaagcgcaaaatcttctaacgcaactacctcagcaaagccaagccaacctcctacagtcgcagccaagcatcaccctcacctcccagccagcaaccccaacacgcacaatagcagcaaccccaattcagacacttccacagagccagtcaacaccaaagcgaattgatactcccagcttggaggagcccagtgaccttgaggagcttgagcagtttgccaagaccttcaaacaaagacgaatcaaacttggattcactcagggtgatgttgggctcgctatggggaaactatatggaaatgacttcagccaaactaccatctctcgatttgaagccttgaacctcagctttaagaacatgtgcaagttgaagccacttttagagaagtggctaaatgatgcagagaacctctcatctgattcgtccctctccagcccaagtgccctgaattctccaggaattgagggcttgagccgtaggaggaagaaacgcaccagcatagagaccaacatccgtgtggccttagagaagagtttcttggagaatcaaaagcctacctcggaagagatcactatgattgctgatcagctcaatatggaaaaagaggtgattcgtgtttggttctgtaaccgccgccagaaagaaaaaagaatcaacccaccaagcagtggtgggaccagcagctcacctattaaagcaattttccccagcccaacttcactggtggcgaccacaccaagccttgtgactagcagtgcagcaactaccctcacagtcagccctgtcctccctctgaccagtgctgctgtgacgaatctttcagttacaggcacttcagacaccacctccaacaacacagcaaccgtgatttccacagcgcctccagcttcctcagcagtcacgtccccctctctgagtccctccccttctgcctcagcctccacctccgaggcatccagtgccagtgagaccagcacaacacagaccacctccactcctttgtcctcccctcttgggaccagccaggtgatggtgacagcatcaggtttgcaaacagcagcagctgctgcccttcaaggagctgcacagttgccagcaaatgccagtcttgctgccatggcagctgctgcaggactaaacccaagcctgatggcaccctcacagtttgcggctggaggtgccttactcagtctgaatccagggaccctgagcggtgctctcagcccagctctaatgagcaacagtacactggcaactattcaagctcttgcttctggtggctctcttccaataacatcacttgatgcaactgggaacctggtatttgccaatgcgggaggagcccccaacatcgtgactgcccctctgttcctgaaccctcagaacctctctctgctcaccagcaaccctgttagcttggtctctgccgccgcagcatctgcagggaactctgcacctgtagccagccttcacgccacctccacctctgctgagtccatccagaactctctcttcacagtggcctctgccagcggggctgcgtccaccaccaccaccgcctccaaggcacagtagtaatgaactagtccgtaacttgaaagtatttcgatttcttggctttatatatcttgtggaaaggacgacgcagggctccaaatagacgacgc

SEQ ID NO: 1962 - DNA, 8864 bp, Homo sapiens
  source 1..8864: mol_type = genomic DNA
accgccaccatgaggggccggcggggcaggccgcccaagcagcccgcggctcccgctgcggagcgctgcgccccggccccgccgccaccgccgccgccgcccacgtccggacccatcggggggctccgctcgcggcaccgcggcagcagccggggcaggtgggccgccgcccaggctgaggtggcgcccaagacgcggctgagctcgcccagggggggcagcagtagccggaggaagccgccgccgccgccgccggccccccccagcaccagcgccccgggccggggggggcgaggaggcgggggcggcaggacggggggcgggggcggcggcggccacctggcccggaccaccgcggcccggagggccgtcaacaaagtggtgtacgatgaccacgagagcgaggaggaggaggaagaggaggacatggtctccgaggaggaggaggaggaggacggcgacgccgaggagacccaggattctgaggacgacgaggaggatgagatggaagaggacgacgatgactccgattatccggaggagatggaagacgacgacgacgacgccagttactgcacggaaagcagcttcaggagccatagtacctacagcagcactccaggtaggcgaaaaccaagagtacatcggcctcgttctcctatattggaagaaaaagacatcccgccccttgaatttcccaagtcctctgaggatttaatggtgcctaatgagcatataatgaatgtcattgccatttacgaggtactgcggaactttggcactgttttgagattatctccttttcgctttgaggacttttgtgcagctctggtgagccaagagcagtgcacactcatggcagagatgcatgttgtgcttttgaaagcagttctgcgtgaagaagacacttccaatactacctttggacctgctgatctgaaagatagcgttaattccacactgtatttcatagatgggatgacgtggccagaggtgctgcgggtgtactgtgagagtgataaggagtaccatcacgttcttccttaccaagaggcagaggactacccatatggaccagtagagaacaagatcaaagttctacagtttctagtcgatcagtttcttacaacaaatattgctcgagaggaattgatgtctgaaggggtgatacagtatgatgaccattgtagggtttgtcacaaacttggggatttgctttgctgtgagacatgttcagcagtataccatttggaatgtgtgaagccacctcttgaggaggtgccagaggacgagtggcagtgtgaagtctgtgtagcacacaaggtgcctggtgtgactgactgtgttgctgaaatccaaaaaaataaaccatatattcgacatgaacctattggatatgatagaagtcggaggaaatactggttcttgaaccgaagactcataatagaagaagatacagaaaatgaaaatgaaaagaaaatttggtattacagcacaaaggtccaacttgcagaattaattgactgtctagacaaagattattgggaagcagaactctgcaaaattctagaagaaatgcgtgaagaaatccaccgacacatggacataactgaagacctgaccaataaggctcggggcagtaacaaatcctttctggcggcagctaatgaagaaattttggaatccataagagccaaaaagggagacattgataatgttaaaagcccagaagaaacagaaaaagacaagaatgagactgagaatgactctaaagatgctgagaaaaacagagaagaatttgaagaccagtcccttgaaaaagacagtgacgacaaaacaccagatgatgaccctgagcaaggaaaatctgaggtaggtgatttcaaatcggagaagtccaacggggagctaagtgaatctcctggagctggaaaaggagcatctggctcaactcgaatcatcaccagattgcggaatccagatagcaaacttagtcagctgaagagccagcaggtggcagccgctgcacatgaagcaaataaattatttaaggagggcaaagaggtactggtagttaactctcaaggagaaatttcacggttgagcaccaaaaaggaagtgatcatgaaaggaaatatcaacaattattttaaattgggtcaagaagggaagtatcgcgtctaccacaatcaatactccaccaattcatttgctttgaataagcaccagcacagagaagaccatgataagagaaggcatcttgcacataagttctgtctgactccagcaggagagttcaaatggaacggttctgtccatgggtccaaagttcttaccatatctactctgagactgactatcacccaattagaaaacaacatcccttcatcctttcttcatcccaactgggcatcacatagggcaaattggatcaaggcagttcagatgtgtagcaaacccagagaatttgcattggctttagccattttggagtgtgcagttaaaccagttgtgatgctaccaatatggcgagaatctttaggacataccaggttacaccggatgacatcaattgaaagagaagaaaaggagaaagtcaaaaaaaaagagaagaaacaggaagaagaagaaacgatgcagcaagcgacatgggtaaaatacacatttccagttaagcatcaggtttggaaacaaaaaggtgaagagtacagagtgacaggatatggtggttggagctggattagtaaaactcatgtttataggtttgttcctaaattgccaggcaatactaatgtgaattacagaaagtcgttagaaggaaccaaaaataatatggatgaaaatatggatgagtcagataaaagaaaatgttcacgaagtccaaaaaaaataaaaatagagcctgattctgaaaaagatgaggtaaaaggttcagatgctgcaaaaggagcagaccaaaatgaaatggatatctcaaagattactgagaagaaggaccaagatgtgaaggagctcttagattctgacagtgataaaccctgcaaggaagaaccaatggaagtagacgatgacatgaaaacagagtcacatgtaaattgtcaggagagttctcaagtagatgtggtcaatgttagtgagggttttcatctaaggactagttacaaaaagaaaacaaaatcatccaaactagatggacttcttgaaaggagaattaaacagtttacactggaagaaaaacagcgactcgaaaaaatcaagttggagggtggaattaagggtataggaaagacttctacaaattcttcaaaaaatctctctgaatcaccagtaataacgaaagcaaaagaagggtgtcagagtgactcgatgagacaagaacagagcccaaatgcaaataatgatcaacctgaggacttgattcagggatgttcagaaagtgattcctcagttcttagaatgagtgatcctagtcataccacaaacaaactttatccaaaagatcgagtgttagatgatgtctccattcggagcccagaaacaaaatgtccgaaacaaaattccattgaaaatgacatagaagaaaaagtctctgaccttgccagtagaggccaggaacccagtaagagtaaaacaaaaggaaatgattttttcatcgatgactctaaactagccagtgcagatgatattggtactttgatctgtaagaacaaaaaaccgctcatacaggaggaaagtgacaccattgtttcttcttccaagagtgctttacattcatcagtgcctaaaagtaccaatgacagagatgccacacctctgtcaagagcaatggactttgaaggaaaactgggatgtgactctgaatctaatagcactttggaaaatagttctgataccgtgtctattcaggatagcagtgaagaagatatgattgttcagaatagcaatgaaagcatttctgaacagttcagaactcgagaacaagatgttgaagtcttggagccgttaaagtgtgagttggtttctggtgagtccactggaaactgtgaggacaggctgccggtcaaggggactgaagcaaatggtaaaaaaccaagtcagcagaagaaattagaggagagaccagttaataaatgtagtgatcaaataaagctaaaaaataccactgacaaaaagaataatgaaaatcgagagtctgaaaagaaaggacagagaacaagtacatttcaaataaatggaaaagataataaacccaaaatatatttgaaaggtgaatgcttgaaagaaatttctgagagtagagtagtaagtggtaatgttgaaccaaaggttaataatataaataaaataatccctgagaatgatattaaatcattgactgttaaagaatctgctataaggccattcattaatggtgatgtcatcatggaagattttaatgaaagaaacagctccgaaacaaaatcgcatttgctgagttcttcagatgctgaaggtaactaccgagatagccttgagaccctgccatcaaccaaagagtctgacagtacacagacgaccacaccctcagcatcttgtccagaaagcaattcagttaatcaggtagaagatatggaaatagaaacctcagaagttaagaaagttacttcatcacctattacttctgaagaggaatctaatctcagtaatgactttattgatgaaaatggtctgcccatcaacaaaaatgaaaatgtcaatggagaatctaaaagaaaaaccgtcatcacagaagtcaccacgatgacctccacagtggccacagaatcaaaaactgtgatcaaggtagaaaaaggcgataagcaaactgtggtttcttccacagaaaattgtgcaaaatccactgtcacaaccaccactacaacagtgaccaagctttccacaccctccacaggcggcagtgtggacatcatctctgtaaaggagcagagcaaaaccgtggtcaccacgacagtgacagactccctgaccaccacgggaggcacactggttacatctatgactgtgagcaaagagtattccacacgagacaaagtgaaactgatgaaattttcaagaccaaagaagactcgttcaggtacagctctgccatcctatagaaaatttgttaccaagagcagcaagaagagcatttttgttttgcctaatgatgacttaaaaaagttggcccgaaaaggaggaatccgagaggtcccttattttaattacaatgcaaaacctgctttggatatatggccatatccttctcctagaccgacctttggcatcacttggaggtatagacttcagacagtaaagtccttagctggagtgagcctgatgttacggttactgtgggcaagtttgagatgggatgatatggcggccaaggctcctccaggaggagggactacacggacagaaacatccgaaactgaaatcacaacaacagaaataattaagaggagagatgttggtccttatggcattcgatctgaatattgtatcaggaaaatcatttgtcccattggagttccagaaacaccaaaagaaacgcctacacctcagaggaaaggccttcgatcaagtgcactgcggccaaagagaccagaaacgcccaagcaaactggccctgttattattgaaacctgggtagcagaagaagaactggaattgtgggagatcagggcatttgctgagagagtggagaaagaaaaggcacaagcagttgagcaacaggctaagaaacgactggagcagcagaagccgacagtgattgcaacttccactacttccccaacaagcagtacaaccagcaccatctctccagcacagaaggttatggtggcccccataagtggctcagttacaactggaaccaaaatggtactaactactaaagttggatctccagctacagtaacattccaacaaaacaagaactttcatcaaacctttgctacatgggttaagcaaggccagtcaaattcaggcgttgttcaagtacagcagaaagtcctgggtatcattccatcaagtacaggtaccagtcagcaaacctttacttcattccagcccaggacagcaacagtcacaattaggcccaatacctcaggctctggaggaaccacaagcaattcacaagtaatcacagggcctcagattcgccctggtatgaccgtgattagaacaccactccaacagtcaacactaggaaaggcaattattcgaacacctgtgatggtacagccaggtgctcctcagcaagtgatgactcaaatcatcagggggcagcctgtctccactgcagtctccgcccctaacacggtttcctcaacacctgggcagaaaagcttaacttcagcaacgtccacttcaaatatacagtcttcagcctcacaaccccctcgcccccaacaaggacaagtgaagctcaccatggctcaacttactcagttaacacagggccacggtggcaatcaaggtttgacagtagtaattcaaggacaaggtcaaactactggacagttgcagttgatacctcaaggggtgactgtactcccaggcccaggccagcagctaatgcaagctgcaatgccaaatggtactgttcagcgattcctctttaccccattggcaacaacagccaccacagccagcaccaccaccaccactgtttccacgacagcagcaggtacaggtgaacaaaggcagagtaaactgtcaccccagatgcaggtacatcaagacaaaaccctgccaccagctcagtcatcaagtgtgggtccagcagaagcccagccacagactgctcagccttcagctcagccccagccccaaacccagccccagtccccagctcagcctgaagttcagactcagcctgaagttcagacccaaacaactgtttcatcccatgtcccttctgaagcacaacccacccacgcacagtcatccaagccccaagttgcagcacagtctcagcctcaaagtaatgtccaaggacagtctcctgttcgtgtccaaagtccatcacagactcgaatacgtccatcaactccatcccaactgtctcctggacaacaatcccaggttcagactacaacctcacaaccgattccaattcaaccacatacatctcttcagataccttcccaaggccagccacagtcacaaccccaggtacagtcttcaactcaaactctttcatcaggacaaactttaaatcaagttactgtttcatccccatcccgtcctcagctacaaatacagcagccacagccccaagtcattgctgtgcctcagctgcaacaacaagtccaggttctctctcagatccagtcacaggttgtggctcagatacaggctcagcaaagtggtgtgccccagcaaatcaaactccagttacctatccaaattcagcaaagcagtgctgtgcagactcaccagattcagaatgtggttacagtgcaggcagccagtgtgcaagagcagttgcaaagggttcagcaactcagggatcagcagcaaaagaagaaacagcaacagatagaaattaagcgtgaacacaccctccaagcttctaatcaaagtgaaatcattcagaaacaggtggtgatgaagcataatgctgtaatagaacatttaaaacagaaaaagagcatgactccagctgaaagagaagagaatcaaagaatgattgtctgtaaccaggtgatgaagtatattttggataagatagataaagaagaaaaacaggcagcaaaaaaacggaagcgtgaagagagtgtggagcagaaacgtagcaagcagaatgccactaagctgtcagctctgctcttcaagcacaaagagcagctcagagccgagatcctgaagaagagagcactcctggacaaggatctgcaaattgaagtgcaggaagagctgaagagagacctgaaaattaagaaagaaaaagacctgatgcagttggctcaggccacagcagtagctgcaccctgccccccagtgacaccagctcctccagcccctccagcccctccaccttcacctccccctccacctgctgtgcaacacacaggccttctgtccacgcccaccttacctgctgcttcccagaagaggaagcgggaagaggaaaaagactccagctcaaagtccaagaaaaagaaaatgatctctactacctcaaaggaaactaagaaggacacaaagctttactgtatctgtaaaacgccttatgatgaatctaaattttatattggctgtgatcggtgtcagaattggtaccatgggcgctgcgttggcatcttgcaaagtgaggcagagctcattgatgagtatgtctgtccacagtgccagtcaacagaggatgccatgacagtgctcacgccactaacagagaaggattatgaggggttgaagagggtgctccgttccttacaggcccataagatggcctggcctttccttgaaccagtagaccctaatgatgcaccagattattatggtgttattaaggaacctatggaccttgccaccatggaagaaagagtacaaagacgatattatgaaaagctgacggaatttgtggcagatatgaccaaaatttttgataactgtcgttactacaatccaagtgactccccattttaccagtgtgcagaagttctcgaatcattctttgtacagaaattgaaaggcttcaaagctagcaggtctcataacaacaaactgcagtctacagcttcttagtaatgaactagtccgtaacttgaaagtatttcgatttcttggctttatatatcttgtggaaaggacgagatgggtcctactggatgcctcgt

SEQ ID NO: 1963 - DNA, 2837 bp, Homo sapiens
  source 1..2837: mol_type = genomic DNA
accgccaccatgaaaggcagtaatagaaataaggatcattcagcagaaggagaaggggttggaaaacgaccaaaacgaaagtgtcttcagtggcatccattgctagcaaagaaacttcttgatttttcagaagaggaagaagaggaagacgaagaggaggatattgataaggttcaacttcttggggccgatggcctagagcaagatgttggtgaaactgaagatgatgaatcaccagagcagcgagcccggagaccaatgaatgcatttcttttattttgcaaacgccatcgctctcttgtacgtcaggaacaccccaggcttgataaccgaggtgctaccaagatactagctgattggtgggctgttcttgatccaaaggaaaagcagaaatacacagacatggccaaggagtataaggatgcatttatgaaagcaaatcctggctacaaatggtgtcctaccacaaacaagcctgtgaaatccccaacacccactgtcaatccacgaaagaaactttgggccttcccatctgactcttcaagagacttgccaagccccaagaaagcaaagactgaagaaatgcctcagcttaactttggaatggctgatcctactcaaatgggaggcctgagtatgctgctgttagctggagaacatgctcttggcacaccagaggtatcctctggcacatgcaggcctgatgtttcagaatctcctgaattacgtcagaagtcaccattgtttcagtttgccgagatatcttcaagtacgtcccactctgatgcttctacaaagcagtgtcaaacatctgccttgtttcagtttgcagagatttcttcaaacacttcgcagttgggtggtgctgagcctgtaaaacgctgtggaaagtctgcactctttcaactggcagagatgtgcctggcatcagaagggatgaaaatggaagaatcaaagctaataaaagcaaaagaatccgatggtggaagaattaaagaattagagaagggaaaggaagaaaaagaaattaaaatggagaaaacagatgaaactaggttacagaaggaagcagaatttgaaaaatcggctaaggaaaatttaagagattctaaggaattgagaaattttgaggcattgcaaatagatgacataatggctataaaaatggaagatcccaaagaaattagaaaggaagagttagaagaagatcacaaatgtagtcattttcctgatttttcttattctgccagtagcaagataataattagtgatgttcccagtagaaaggatcatatgtgccatcctcatggaattatgatcattgaggatcccgcagcattaaacaagccagaaaagctaaaaaagaaaaagaagaaaagcaaaatggatcgacatggaaatgataaatccacacccaagaagacttgcaaaaagaggcagtcttcggaatctgacattgagagcgtcatatataccattgaagccgtcgcaaaaggagactggggcatagagaaacttggagatacccctcgcaagaaggtccgcacatcctcaagtggcaagggaagcattttggatgccaagccaccaaagaaaaaagtgaaatcaagagagaagaaaatgtcaaaggagaaatcctcagacaccaccaaagagtcaagacctccagatttcattagtatttctgctagcaagaacatttctggtgagacaccagagggtataaaagcagaaccattgacccctatggaagatgcactaccacccagcctatcaggacaggccaagcctgaggacagtgactgtcacagaaaaatagaaacttgtggttccaggaaatccgagaggtcttgcaaaggtgctctttataaaaccctggtgtctgagggcatgctcacctctctgcgagctaatgttgacagaggaaaacgaagctcaggaaaaggaaactcctctgatcatgaagggtgttggaatgaagaaagctggacatttagtcagagtgggaccagtgggagcaagaagttcaagaagacaaagccaaaagaagactgtctccttggctccgcaaagctggatgaagaatttgaaaaaaaattcaacagcctccctcaatatagtcctgttacatttgaccggaaatgtgtacctgtcccaagaaaaaagaagaagactggaaatgtgtcctcagaaccgactaaaaccagcaaaggaagtggggataaatggtcaaacaagcaactcttcttggatgccattcaccctacagaagccatattttcagaagacagaaacaccatggagcctgttcataaggttaaaaatatcccatccattttcaacactccagagccaacaacaacgcaagaacctttggtgggcagccaaaagagaaaagcaaggaaaaccaagattacacaccttgtcaggacagcagatggccgggtatcaccagcaggaggtactttggatgacaaaccaaaggaacaactgcagaggagtctccctaaagcaactgagacagactgcaatgacaaatgctcacacaacaccgaggtcggggagacgcggagcagtactccagaaatgcctgccgtgtctgcgttctttagcctcgctgcgctggctgaagtggcagccatggaaaatgtgcacagaggtcagaggtcaactccgctcacccatgatggacagccaaaagaaatgccgcaggctcctgtacttatttcctgcgctgaccagtagtaatgaactagtccgtaacttgaaagtatttcgatttcttggctttatatatcttgtggaaaggacgacgaaagttcatgaacaggttaagt

SEQ ID NO: 1964 - DNA, 2927 bp, Homo sapiens
  source 1..2927: mol_type = genomic DNA
accgccaccatgaaaggcagtaatagaaataaggatcattcagcagaaggagaaggggttggaaaacgaccaaaacgaaagtgtcttcagtggcatccattgctagcaaagaaacttcttgatttttcagaagaggaagaagaggaagacgaagaggaggatattgataaggttcaacttcttggggccgatggcctagagcaagatgttggtgaaactgaagatgatgaatcaccagagcagcgagcccggagaccaatgaatgcatttcttttattttgcaaacgccatcgctctcttgtacgtcaggaacaccccaggcttgataaccgaggtgctaccaagatactagctgattggtgggctgttcttgatccaaaggaaaagcagaaatacacagacatggccaaggagtataaggatgcatttatgaaagcaaatcctggctacaaatggtgtcctaccacaaacaagcctgtgaaatccccaacacccactgtcaatccacgaaagaaactttgggccttcccatctgactcttcaagagacttgccaagccccaagaaagcaaagactgaagaaatgcctcagcttaactttggaatggctgatcctactcaaatgggaggcctgagtatgctgctgttagctggagaacatgctcttggcacaccagaggtatcctctggcacatgcaggcctgatgtttcagaatctcctgaattacgtcagaagtcaccattgtttcagtttgccgagatatcttcaagtacgtcccactctgatgcttctacaaagcagtgtcaaacatctgccttgtttcagtttgcagagatttcttcaaacacttcgcagttgggtggtgctgagcctgtaaaacgctgtggaaagtctgcactctttcaactggcagagatgtgcctggcatcagaagggatgaaaatggaagaatcaaagctaataaaagcaaaagaatccgatggtggaagaattaaagaattagagaagggaaaggaagaaaaagaaattaaaatggagaaaacagatgaaactaggttacagaaggaagcagaatttgaaaaatcggctaaggaaaatttaagagattctaaggaattgagaaattttgaggcattgcaaatagatgacataatggctataaaaatggaagatcccaaagaaattagaaaggaagagttagaagaagatcacaaatgtagtcattttcctgatttttcttattctgccagtagcaagataataattagtgatgttcccagtagaaaggatcatatgtgccatcctcatggaattatgatcattgaggatcccgcagcattaaacaagccagaaaagctaaaaaagaaaaagaagaaaagcaaaatggatcgacatggaaatgataaatccacacccaagaagacttgcaaaaagaggcagtcttcggaatctgacattgagagcgtcatatataccattgaagccgtcgcaaaaggagactggggcatagagaaacttggagatacccctcgcaagaaggtccgcacatcctcaagtggcaagggaagcattttggatgccaagccaccaaagaaaaaagtgaaatcaagagagaagaaaatgtcaaaggagaaatcctcagacaccaccaaagagtcaagacctccagatttcattagtatttctgctagcaagaacatttctggtgagacaccagagggtataaaagcagaaccattgacccctatggaagatgcactaccacccagcctatcaggacaggccaagcctgaggacagtgactgtcacagaaaaatagaaacttgtggttccaggaaatccgagaggtcttgcaaaggtgctctttataaaaccctggtgtctgagggcatgctcacctctctgcgagctaatgttgacagaggaaaacgaagctcaggaaaaggaaactcctctgatcatgaagggtgttggaatgaagaaagctggacatttagtcagagtgggaccagtgggagcaagaagttcaagaagacaaagccaaaagaagactgtctccttggctccgcaaagctggatgaagaatttgaaaaaaaattcaacagcctccctcaatatagtcctgttacatttgaccggaaatgtgtacctgtcccaagaaaaaagaagaagactggaaatgtgtcctcagaaccgactaaaaccagcaaaggtcctttccagtctcagaaaaagaacttattccacaaaattgtcagcaaatataagcacaaaaaggagaagcccaatgttccggaaaaaggaagtggggataaatggtcaaacaagcaactcttcttggatgccattcaccctacagaagccatattttcagaagacagaaacaccatggagcctgttcataaggttaaaaatatcccatccattttcaacactccagagccaacaacaacgcaagaacctttggtgggcagccaaaagagaaaagcaaggaaaaccaagattacacaccttgtcaggacagcagatggccgggtatcaccagcaggaggtactttggatgacaaaccaaaggaacaactgcagaggagtctccctaaagcaactgagacagactgcaatgacaaatgctcacacaacaccgaggtcggggagacgcggagcagtactccagaaatgcctgccgtgtctgcgttctttagcctcgctgcgctggctgaagtggcagccatggaaaatgtgcacagaggtcagaggtcaactccgctcacccatgatggacagccaaaagaaatgccgcaggctcctgtacttatttcctgcgctgaccagtagtaatgaactagtccgtaacttgaaagtatttcgatttcttggctttatatatcttgtggaaaggacgaagaatcggcgtaacacagctgcca

SEQ ID NO: 1965 - DNA, 656 bp, Homo sapiens
  source 1..656: mol_type = genomic DNA
accgccaccatggagggagagaggaagaacaacaacaaacggtggtatttcactcgagaacagctggaaaatagcccatcccgtcgttttggcgtggacccagataaagaactttcttatcgccagcaggcggccaatctgcttcaggacatggggcagcgtcttaacgtctcacaattgactatcaacactgctatagtatacatgcatcgattctacatgattcagtccttcacacagttccctggaaattctgtggctccagcagccttgtttctagcagctaaagtggaggagcagcccaaaaaattggaacatgtcatcaaggtagcacatacttgtctccatcctcaggaatcccttcctgatactagaagtgaggcttatttgcaacaagttcaagatctggtcattttagaaagcataattttgcagactttaggctttgaactaacaattgatcacccacatactcatgtagtaaagtgcactcaacttgttcgagcaagcaaggacttagcacagacttcttacttcatggcaaccaacagaactgacacatagtaatgaactagtccgtaacttgaaagtatttcgatttcttggctttatatatcttgtggaaaggacgacacagctacaaatagtcgcaccta

SEQ ID NO: 1966 - DNA, 2282 bp, Homo sapiens
  source 1..2282: mol_type = genomic DNA
accgccaccatggagggagagaggaagaacaacaacaaacggtggtatttcactcgagaacagctggaaaatagcccatcccgtcgttttggcgtggacccagataaagaactttcttatcgccagcaggcggccaatctgcttcaggacatggggcagcgtcttaacgtctcacaattgactatcaacactgctatagtatacatgcatcgattctacatgattcagtccttcacacagttccctggaaattctgtggctccagcagccttgtttctagcagctaaagtggaggagcagcccaaaaaattggaacatgtcatcaaggtagcacatacttgtctccatcctcaggaatcccttcctgatactagaagtgaggcttatttgcaacaagttcaagatctggtcattttagaaagcataattttgcagactttaggctttgaactaacaattgatcacccacatactcatgtagtaaagtgcactcaacttgttcgagcaagcaaggacttagcacagacttcttacttcatggcaaccaacagcctgcatttgaccacatttagcctgcagtacacacctcctgtggtggcctgtgtctgcattcacctggcttgcaagtggtccaattgggagatcccagtctcaactgacgggaagcactggtgggagtatgttgacgccactgtgaccttggaacttttagatgaactgacacatgagtttctacagattttggagaaaactcccaacaggctcaaacgcatttggaattggagggcatgcgaggctgccaagaaaacaaaagcagatgaccgaggaacagatgaaaagacttcagagcagacaatcctcaatatgatttcccagagctcttcagacacaaccattgcaggtttaatgagcatgtcaacttctaccacaagtgcagtgccttccctgccagtctccgaagagtcatccagcaacttaaccagtgtggagatgttgccgggcaagcgttggctgtcctcccaaccttctttcaaactagaacctactcagggtcatcggactagtgagaatttagcacttacaggagttgatcattccttaccacaggatggttcaaatgcatttatttcccagaagcagaatagtaagagtgtgccatcagctaaagtgtcactgaaagaataccgcgcgaagcatgcagaagaattggctgcccagaagaggcaactggagaacatggaagccaatgtgaagtcacaatatgcatatgctgcccagaatctcctttctcatcatgatagccattcttcagtcattctaaaaatgcccatagagggttcagaaaaccccgagcggccttttctggaaaaggctgacaaaacagctctcaaaatgagaatcccagtggcaggtggagataaagctgcgtcttcaaaaccagaggagataaaaatgcgcataaaagtccatgctgcagctgataagcacaattctgtagaggacagtgttacaaagagccgagagcacaaagaaaagcacaagactcacccatctaatcatcatcatcatcataatcaccactcacacaagcactctcattcccaacttccagttggtactgggaacaaacgtcctggtgatccaaaacatagtagccagacaagcaacttagcacataaaacctatagcttgtctagttctttttcctcttccagttctactcgtaaaaggggaccctctgaagagactggaggggctgtgtttgatcatccagccaagattgccaagagtactaaatcctcttccctaaatttctccttcccttcacttcctacaatgggtcagatgcctgggcatagctcagacacaagtggcctttccttttcacagcccagctgtaaaactcgtgtccctcattcgaaactggataaagggcccactggggccaatggtcacaacacgacccagacaatagactatcaagacactgtgaatatgcttcactccctgctcagtgcccagggtgttcagcccactcagcccactgcatttgaatttgttcgtccttatagtgactatctgaatcctcggtctggtggaatctcctcgagatctggcaatacagacaaaccccggccaccacctctgccatcagaacctcctccaccacttccaccccttcctaagtagtaatgaactagtccgtaacttgaaagtatttcgatttcttggctttatatatcttgtggaaaggacgatttgcgattgacccattgtggtgt

SEQ ID NO: 1967 - DNA, 2093 bp, Homo sapiens
  source 1..2093: mol_type = genomic DNA
accgccaccatggcgtcgggccgtggagcttcttctcgctggttctttactcgggaacagctggagaacacgccgagccgccgctgcggagtggaggcggataaagagctctcgtgccgccagcaggcggccaacctcatccaggagatgggacagcgtctcaatgtctctcagcttacaataaacactgcgattgtttatatgcacaggttttatatgcaccattctttcaccaaattcaacaaaaatataatatcgtctactgcattatttttggctgcaaaagtggaagaacaggctcgaaaacttgaacatgttatcaaagtagcacatgcttgtcttcatcctctagagccactgctggatactaaatgtgatgcttaccttcaacagactcaagaactggttatacttgaaaccataatgctacaaactctaggttttgagatcaccattgaacacccacacacagatgtggtgaaatgtacccagttagtaagagcaagcaaggatttggcacagacatcctatttcatggctaccaacagtctgcatcttacaaccttctgtcttcagtacaaaccaacagtgatagcatgtgtatgcattcatttggcttgcaaatggtccaattgggagatccctgtatcaactgatggaaagcattggtgggaatatgtggatcctacagttactctagaattattagatgagctaacacatgagtttctacaaatattggagaaaacgcctaataggttgaagaagattcgaaactggagggctaatcaggcagctaggaaaccaaaagtagatggacaggtatcagagacaccacttcttggttcatctttggtccagaattccattttagtagatagtgtcactggtgtgcctacaaacccaagttttcagaaaccatctacatcagcattccctgcgccagtacctctaaattcaggaaatatttctgttcaagacagccatacatctgataatttgtcaatgctagcaacaggaatgccaagtacttcatacggtttatcatcacaccaggaatggcctcaacatcaagactcagcaaggacagaacagctatattcacagaaacaggagacatctttgtctggtagccagtacaacatcaacttccagcagggaccttctatatcactgcattcaggattacatcacagacctgacaaaatttcagatcattcttctgttaagcaagaatatactcataaagcagggagcagtaaacaccatgggccaatttccactactccaggaataattcctcagaaaatgtctttagataaatatagagaaaagcgtaaactagaaactcttgatctcgatgtaagggatcattatatagctgcccaggtagaacagcagcacaaacaagggcagtcacaggcagccagcagcagttctgttacttctcccattaaaatgaaaatacctatcgcaaatactgaaaaatacatggcagacaaaaaggaaaagagtgggtcactgaaattacggattccaataccacccactgataaaagcgccagtaaagaagaactgaaaatgaaaataaaagtttcttcttcagaaagacacagctcttctgatgaaggcagtgggaagagcaaacattcaagcccacatattagcagagaccataaggagaagcacaaggagcatccttcaagccgccaccacaccagcagccacaagcattcccactcgcatagtggcagcagcagcggtggcagtaaacacagtgccgacggaataccacccactgttctgaggagtcctgttggcctgagcagtgatggcatttcctctagctccagctcttcaaggaagaggctgcatgtcaatgatgcatctcacaaccaccactccaaaatgagcaaaagttccaaaagttcaggtgggctacggacatctcagcaccctcgtgaaactggacaagaagccagtggagaccaacggtcctagtaatgaactagtccgtaacttgaaagtatttcgatttcttggctttatatatcttgtggaaaggacgatctgtaattaccctgctaagtagc

SEQ ID NO: 1968 - DNA, 2294 bp, Homo sapiens
  source 1..2294: mol_type = genomic DNA
accgccaccatggcgtcgggccgtggagcttcttctcgctggttctttactcgggaacagctggagaacacgccgagccgccgctgcggagtggaggcggataaagagctctcgtgccgccagcaggcggccaacctcatccaggagatgggacagcgtctcaatgtctctcagcttacaataaacactgcgattgtttatatgcacaggttttatatgcaccattctttcaccaaattcaacaaaaatataatatcgtctactgcattatttttggctgcaaaagtggaagaacaggctcgaaaacttgaacatgttatcaaagtagcacatgcttgtcttcatcctctagagccactgctggatactaaatgtgatgcttaccttcaacagactcaagaactggttatacttgaaaccataatgctacaaactctaggttttgagatcaccattgaacacccacacacagatgtggtgaaatgtacccagttagtaagagcaagcaaggatttggcacagacatcctatttcatggctaccaacagtctgcatcttacaaccttctgtcttcagtacaaaccaacagtgatagcatgtgtatgcattcatttggcttgcaaatggtccaattgggagatccctgtatcaactgatggaaagcattggtgggaatatgtggatcctacagttactctagaattattagatgagctaacacatgagtttctacaaatattggagaaaacgcctaataggttgaagaagattcgaaactggagggctaatcaggcagctaggaaaccaaaagtagatggacaggtatcagagacaccacttcttggttcatctttggtccagaattccattttagtagatagtgtcactggtgtgcctacaaacccaagttttcagaaaccatctacatcagcattccctgcgccagtacctctaaattcaggaaatatttctgttcaagacagccatacatctgataatttgtcaatgctagcaacaggaatgccaagtacttcatacggtttatcatcacaccaggaatggcctcaacatcaagactcagcaaggacagaacagctatattcacagaaacaggagacatctttgtctggtagccagtacaacatcaacttccagcagggaccttctatatcactgcattcaggattacatcacagacctgacaaaatttcagatcattcttctgttaagcaagaatatactcataaagcagggagcagtaaacaccatgggccaatttccactactccaggaataattcctcagaaaatgtctttagataaatatagagaaaagcgtaaactagaaactcttgatctcgatgtaagggatcattatatagctgcccaggtagaacagcagcacaaacaagggcagtcacaggcagccagcagcagttctgttacttctcccattaaaatgaaaatacctatcgcaaatactgaaaaatacatggcagacaaaaaggaaaagagtgggtcactgaaattacggattccaataccacccactgataaaagcgccagtaaagaagaactgaaaatgaaaataaaagtttcttcttcagaaagacacagctcttctgatgaaggcagtgggaagagcaaacattcaagcccacatattagcagagaccataaggagaagcacaaggagcatccttcaagccgccaccacaccagcagccacaagcattcccactcgcatagtggcagcagcagcggtggcagtaaacacagtgccgacggaataccacccactgttctgaggagtcctgttggcctgagcagtgatggcatttcctctagctccagctcttcaaggaagaggctgcatgtcaatgatgcatctcacaaccaccactccaaaatgagcaaaagttccaaaagttcaggtagttcatctagttcttcctcctctgttaagcagtatatatcctctcacaactctgtttttaaccatcccttaccccctcctccccctgtcacataccaggtgggctacggacatctcagcaccctcgtgaaactggacaagaagccagtggagaccaacggtcctgatgccaatcacgagtacagtacaagcagccagcatatggactacaaagacacattcgacatgctggactcactgttaagtgcccaaggaatgaacatgtagtaatgaactagtccgtaacttgaaagtatttcgatttcttggctttatatatcttgtggaaaggacgatcctgcctgtacatgcctatgtat

SEQ ID NO: 1969 - DNA, 1166 bp, Homo sapiens
  source 1..1166: mol_type = genomic DNA
accgccaccatgaggcatagcctgaccaagctgctggcagcctcgggcagcaactccccaacccgcagtgagagcccggagccggctgcaacttgttcgctgccctctgacctgacccgggctgcagcgggggaggaggagacggcggcggccggatctcccggccgcaagcagcagtttggcgacgaaggagagttggaagccgggagggggagccgcggcggcgtggccgtgcgcgcgccctcccccgaggagatggaggaggaggcgatcgccagcctcccgggggaagagacggaggatatggactttctgtctgggctggaactggcggatctcctggaccccaggcaaccggactggcacctggaccccgggcttagctcgccggggcctctctcctcgtctggcggaggctcggatagcggcggcctgtggagaggggacgatgacgatgaggccgcggctgctgaaatgcagcgcttctctgacctgctgcaaaggctgttaaacggtatcggaggctgcagcagcagcagtgacagtggcagcgccgaaaagaggcggagaaagtccccaggaggaggcggcggtggcggcagcggtaacgacaacaaccaggcggcgacaaagagtccccggaaggcggcggcggccgctgcccgccttaatcgactgaagaagaaggagtacgtgatggggctggagagtcgagtccggggtctggcagccgagaaccaggagctgcgggccgagaatcgggagctgggcaaacgcgtacaggcactgcaggaggagagtcgctacctacgggcagtcttagccaacgagactggactggctcgcttgctgagccggctgagcggcgtgggactgcggctgaccacctcgctcttcagagactcgcccgccggtgaccacgactacgctctgccggtgggaaagcagaagcaggacctgctggaagaggacgactcggcgggaggagtctgtctccatgtggacaaggataaggtgtcggtggagttctgctcggcgtgcgcccggaaggcgtcgtcttctcttaaaatgtagtaatgaactagtccgtaacttgaaagtatttcgatttcttggctttatatatcttgtggaaaggacgactaggcgatggttagtcagctcaa

SEQ ID NO: 1970 - DNA, 1178 bp, Homo sapiens
  source 1..1178: mol_type = genomic DNA
accgccaccatgaggcatagcctgaccaagctgctggcagcctcgggcagcaactccccaacccgcagtgagagcccggagccggctgcaacttgttcgctgccctctgacctgacccgggctgcagcgggggaggaggagacggcggcggccggatctcccggccgcaagcagcagtttggcgacgaaggagagttggaagccgggagggggagccgcggcggcgtggccgtgcgcgcgccctcccccgaggagatggaggaggaggcgatcgccagcctcccgggggaagagacggaggatatggactttctgtctgggctggaactggcggatctcctggaccccaggcaaccggactggcacctggaccccgggcttagctcgccggggcctctctcctcgtctggcggaggctcggatagcggcggcctgtggagaggggacgatgacgatgaggccgcggctgctgaaatgcagcgcttctctgacctgctgcaaaggctgttaaacggtatcggaggctgcagcagcagcagtgacagtggcagcgccgaaaagaggcggagaaagtccccaggaggaggcggcggtggcggcagcggtaacgacaacaaccaggcggcgacaaagagtccccggaaggcggcggcggccgctgcccgccttaatcgactgaagaagaaggagtacgtgatggggctggagagtcgagtccggggtctggcagccgagaaccaggagctgcgggccgagaatcgggagctgggcaaacgcgtacaggcactgcaggaggagagtcgctacctacgggcagtcttagccaacgagactggactggctcgcttgctgagccggctgagcggcgtgggactgcggctgaccacctcgctcttcagagactcgcccgccggtgaccacgactacgctctgccggtgggaaagcagaagcaggacctgctggaagaggacgactcggcgggaggagtctgtctccatgtggacaaggataaggtgtcggtggagttctgctcggcgtgcgcccggaaggcgtcgtcttctcttaaaattttcttttttaggtagtaatgaactagtccgtaacttgaaagtatttcgatttcttggctttatatatcttgtggaaaggacgatcggttctgggtattgtaacagtt

SEQ ID NO: 1971 - DNA, 2363 bp, Homo sapiens
  source 1..2363: mol_type = genomic DNA
accgccaccatggagagagccagacccgagccgccgcctcagccgcgcccgttgcgtcccgctccgcccccgctgccggtcgagggcacctccttttgggcagcagccatggagccccctccgtcgtctcccacactgagcgcggcagccagtgcgaccttggcctcgtcgtgcggggaggcagtggcgtccggcttacagcccgcggtgcggcggctgctgcaggtgaagccagagcaggtgttgctgctaccacagcctcaggcccagaacgaggaagccgctgcctcgtccgcgcaggcgcggctgttgcagttcaggcccgacctgcggctcctgcagccgccgacagcgtcagacggcgccacctccaggcccgagttgcacccggtgcagcccctggcgctgcatgtcaaggccaagaagcagaagctggggcccagcctggatcagtcagtggggcctcgaggggccgtcgaaaccggtcctagagcctccagggtggtcaagttggaaggccccgggccggccctcggctacttccgaggggacgagaagggcaagctggaggcggaggaggtcatgagagactcgatgcaaggcggggcaggcaaaagcccggcagccatccgagaaggtgtgatcaaaacggaggaacccgagagactcctcgaggactgcaggctcggcgcggagcccgcgtccaatggcctggttcatggcagcgcggaggtcatcttggccccaacgtccggtgcctttgggccgcaccagcaagaccttaggatccctttgacgctccacacggtcccccctggggcccggatccagtttcagggagctccgccttcagagctgataagattgaccaaggtccccctgacaccagtgcctactaaaatgcagtccctactggagccttctgtaaaaattgaaaccaaagatgtcccgctcaccgtgttgccctcagatgcaggcataccagatactcccttcagtaaggacagaaatggtcatgtgaagcgacccatgaacgcatttatggtttgggcaaggatccaccgaccagcactagccaaagctaacccagcagccaacaatgcagaaatcagtgtccagcttgggttagagtggaacaaacttagtgaagaacaaaagaaaccctattacgatgaagcacaaaagattaaggaaaagcacagagaggaatttcctggttgggtttatcagcctcgtccagggaagcgaaaacgattccctctaagtgtttccaatgtattttctggtaccacacagaatatcatctctacaaatcctacaacagtttatccttaccgctcacctacgtactctgtggtaattcccagcctacagaatcccatcactcatccagttggtgaaacctcacctgctatccagctgcccacacctgcagtccagagcccaagccctgtcacacttttccagcccagcgtctccagtgctgctcaggtggctgtccaggatccaagtctacctgtctatccagcactcccaccccaacgctttactgggccttcccaaacagacactcatcagctgcattctgaagccactcacactgtgaagcaacccactcctgtctctctagagagcgccaacaggatttcaagtagtgcaagtactgcccatgccagatttgcaacttcgaccatccaacctcctagggagtattccagcgtttccccttgtcccagaagtgctccaatcccccaggcttctcccattccacacccacatgtctaccagccccctccccttggccatccagccacactgttcgggacaccaccaagattctcttttcatcacccttacttcctacccggacctcactacttcccatcaagtacatgcccttacagtcggcctccctttggctatggaaattttccgagttcaatgccagaatgccttagttattatgaagacaggtacccaaaacatgagggtatcttttcaactttaaatagagactattcttttagagactactcaagtgaatgcacacacagtgaaaattctcggagttgtgagaacatgaatggaacttcttactataacagtcatagccacagtggggaagaaaacttaaaccctgtgcctcagctggacattggaaccttggagaatgtcttcacagccccgacatcaactccttctagcatccagcaagtcaatgtcaccgacagtgatgaggaggaagaagaaaaagtgctcagggatttatagtaatgaactagtccgtaacttgaaagtatttcgatttcttggctttatatatcttgtggaaaggacgaactcccacagaacataagtcgttt

SEQ ID NO: 1972 - DNA, 1607 bp, Homo sapiens
  source 1..1607: mol_type = genomic DNA
accgccaccatggagagagccagacccgagccgccgcctcagccgcgcccgttgcgtcccgctccgcccccgctgccggtcgagggcacctccttttgggcagcagccatggagccccctccgtcgtctcccacactgagcgcggcagccagtgcgaccttggcctcgtcgtgcggggaggcagtggcgtccggcttacagcccgcggtgcggcggctgctgcaggtgaagccagagcaggtgttgctgctaccacagcctcaggcccagaacgaggaagccgctgcctcgtccgcgcaggcgcggctgttgcagttcaggcccgacctgcggctcctgcagccgccgacagcgtcagacggcgccacctccaggcccgagttgcacccggtgcagcccctggcgctgcatgtcaaggccaagaagcagaagctggggcccagcctggatcagtcagtggggcctcgaggggccgtcgaaaccggtcctagagcctccagggtggtcaagttggaaggccccgggccggccctcggctacttccgaggggacgagaagggcaagctggaggcggaggaggtcatgagagactcgatgcaaggcggggcaggcaaaagcccggcagccatccgagaaggtgtgatcaaaacggaggaacccgagagactcctcgaggactgcaggctcggcgcggagcccgcgtccaatggcctggttcatggcagcgcggaggtcatcttggccccaacgtccggtgcctttgggccgcaccagcaagaccttaggatccctttgacgctccacacggtcccccctggggcccggatccagtttcagggagctccgccttcagagctgataagattgaccaaggtccccctgacaccagtgcctactaaaatgcagtccctactggagccttctgtaaaaattgaaaccaaagatgtcccgctcaccgtgttgccctcagatgcaggcataccagatactcccttcagtaaggacagaaatggtcatgtgaagcgacccatgaacgcatttatggtttgggcaaggatccaccgaccagcactagccaaagctaacccagcagccaacaatgcagaaatcagtgtccagcttgggttagagtggaacaaacttagtgaagaacaaaagaaaccctattacgatgaagcacaaaagattaaggaaaagcacagagaggaatttcctggttgggtttatcagcctcgtccagggaagcgaaaacgattccctctaagtgtttccaatgtattttctggtaccacacagaatatcatctctacaaatcctacaacagtttatccttaccgctcacctacgtactctgtggtaattcccagcctacagaatcccatcactcatccagttgtacatgcccttacagtcggcctccctttggctatggaaattttccgagttcaatgccagaatgccttagttattatgaagacaggtacccaaaacatgagggtatcttttcaactttagtaatgaactagtccgtaacttgaaagtatttcgatttcttggctttatatatcttgtggaaaggacgaagaaccgaagcaccttactatcac

SEQ ID NO: 1973 - DNA, 1448 bp, Homo sapiens
  source 1..1448: mol_type = genomic DNA
accgccaccatggagaaatgttgtagagggaaggaacaaagtctactgtgcatccagcaaggcataccagatactcccttcagtaaggacagaaatggtcatgtgaagcgacccatgaacgcatttatggtttgggcaaggatccaccgaccagcactagccaaagctaacccagcagccaacaatgcagaaatcagtgtccagcttgggttagagtggaacaaacttagtgaagaacaaaagaaaccctattacgatgaagcacaaaagattaaggaaaagcacagagaggaatttcctggttgggtttatcagcctcgtccagggaagcgaaaacgattccctctaagtgtttccaatgtattttctggtaccacacagaatatcatctctacaaatcctacaacagtttatccttaccgctcacctacgtactctgtggtaattcccagcctacagaatcccatcactcatccagttggtgaaacctcacctgctatccagctgcccacacctgcagtccagagcccaagccctgtcacacttttccagcccagcgtctccagtgctgctcaggtggctgtccaggatccaagtctacctgtctatccagcactcccaccccaacgctttactgggccttcccaaacagacactcatcagctgcattctgaagccactcacactgtgaagcaacccactcctgtctctctagagagcgccaacaggatttcaagtagtgcaagtactgcccatgccagatttgcaacttcgaccatccaacctcctagggagtattccagcgtttccccttgtcccagaagtgctccaatcccccaggcttctcccattccacacccacatgtctaccagccccctccccttggccatccagccacactgttcgggacaccaccaagattctcttttcatcacccttacttcctacccggacctcactacttcccatcaagtacatgcccttacagtcggcctccctttggctatggaaattttccgagttcaatgccagaatgccttagttattatgaagacaggtacccaaaacatgagggtatcttttcaactttaaatagagactattcttttagagactactcaagtgaatgcacacacagtgaaaattctcggagttgtgagaacatgaatggaacttcttactataacagtcatagccacagtggggaagaaaacttaaaccctgtgcctcagctggacattggaaccttggagaatgtcttcacagccccgacatcaactccttctagcatccagcaagtcaatgtcaccgacagtgatgaggaggaagaagaaaaagtgctcagggatttatagtaatgaactagtccgtaacttgaaagtatttcgatttcttggctttatatatcttgtggaaaggacgatagcacatgtttgcgtaaacctcg

SEQ ID NO: 1974 - DNA, 1700 bp, Homo sapiens
  source 1..1700: mol_type = genomic DNA
accgccaccatgctcctggacgcgggtccgcagttcccggccatcggggtgggcagcttcgcgcgccaccatcaccactccgccgcggcggcggcggcggctgccgccgagatgcaggaccgtgaactgagcctggcggcggcgcagaacggcttcgttgactccgccgccgcgcacatgggagccttcaagctcaacccgggcgcgcacgagctgtccccgggccagagctcggcgttcacgtcgcagggccccggcgcctaccccggctccgctgcggctgccgctgcggccgcagcgctcgggccccacgccgcgcacgttggctcctactctgggccgcccttcaactccacccgggacttcctgttccgcagccgcggcttcggggactcggcgccgggcggcgggcagcacgggctgttcgggccgggcgcgggcggcctgcaccacgcgcactcggacgcgcagggccacctcctcttcccgggcctgccagagcagcacgggccgcacggctcgcagaatgtgctcaacgggcagatgcgcctcgggctgcccggcgaggtgttcgggcgctcggagcaataccgccaggtggccagcccgcggaccgacccctactcggcggcgcaactccacaaccagtacggccccatgaatatgaacatgggtatgaacatggcagcagccgcggcccaccaccaccaccaccaccaccaccaccccggtgcctttttccgctatatgcggcagcagtgcatcaagcaggagctaatctgcaagtggatcgaccccgagcaactgagcaatcccaagaagagctgcaacaaaactttcagcaccatgcacgagctggtgacacacgtctcggtggagcacgtcggcggcccggagcagagcaaccacgtctgcttctgggaggagtgtccgcgcgagggcaagcccttcaaggccaaatacaaactggtcaaccacatccgcgtgcacacaggcgagaaacccttcccctgccccttcccgggctgtggcaaagtcttcgcgcgctccgagaacctcaagatccacaaaaggacccacacaggggagaagccgttccagtgtgagtttgagggctgcgaccggcgcttcgccaacagcagcgacaggaagaagcacatgcacgtccacacctccgataagccctatctctgcaagatgtgcgacaagtcctacacgcaccccagctcgctgcggaagcacatgaaggtccatgagtcctccccgcagggctctgaatcctccccggccgccagctccggctatgagtcgtccacgcccccggggctggtgtcccccagcgccgagccccagagcagctccaacctgtccccagcggcggcggcagcggcggcggcggctgcggcggcggcggccgcggtgtccgcggtgcaccggggcggaggctcgggcagtggcggcgcgggaggcggctcaggcggcggcagcggcagtggcgggggcggcggcggggcgggcggcgggggcggcggcagctctggcgggggcagcgggacagccgggggtcacagcggcctctcctccaacttcaatgaatggtacgtgtagtaatgaactagtccgtaacttgaaagtatttcgatttcttggctttatatatcttgtggaaaggacgaatagactcagaaatgagatgtgcc

SEQ ID NO: 1975 - DNA, 5693 bp, Homo sapiens
  source 1..5693: mol_type = genomic DNA
accgccaccatggatttatctgctcttcgcgttgaagaagtacaaaatgtcattaatgctatgcagaaaatcttagagtgtcccatctgtctggagttgatcaaggaacctgtctccacaaagtgtgaccacatattttgcaaattttgcatgctgaaacttctcaaccagaagaaagggccttcacagtgtcctttatgtaagaatgatataaccaaaaggagcctacaagaaagtacgagatttagtcaacttgttgaagagctattgaaaatcatttgtgcttttcagcttgacacaggtttggagtatgcaaacagctataattttgcaaaaaaggaaaataactctcctgaacatctaaaagatgaagtttctatcatccaaagtatgggctacagaaaccgtgccaaaagacttctacagagtgaacccgaaaatccttccttgcaggaaaccagtctcagtgtccaactctctaaccttggaactgtgagaactctgaggacaaagcagcggatacaacctcaaaagacgtctgtctacattgaattgggatctgattcttctgaagataccgttaataaggcaacttattgcagtgtgggagatcaagaattgttacaaatcacccctcaaggaaccagggatgaaatcagtttggattctgcaaaaaaggctgcttgtgaattttctgagacggatgtaacaaatactgaacatcatcaacccagtaataatgatttgaacaccactgagaagcgtgcagctgagaggcatccagaaaagtatcagggtagttctgtttcaaacttgcatgtggagccatgtggcacaaatactcatgccagctcattacagcatgagaacagcagtttattactcactaaagacagaatgaatgtagaaaaggctgaattctgtaataaaagcaaacagcctggcttagcaaggagccaacataacagatgggctggaagtaaggaaacatgtaatgataggcggactcccagcacagaaaaaaaggtagatctgaatgctgatcccctgtgtgagagaaaagaatggaataagcagaaactgccatgctcagagaatcctagagatactgaagatgttccttggataacactaaatagcagcattcagaaagttaatgagtggttttccagaagtgatgaactgttaggttctgatgactcacatgatggggagtctgaatcaaatgccaaagtagctgatgtattggacgttctaaatgaggtagatgaatattctggttcttcagagaaaatagacttactggccagtgatcctcatgaggctttaatatgtaaaagtgaaagagttcactccaaatcagtagagagtaatattgaagacaaaatatttgggaaaacctatcggaagaaggcaagcctccccaacttaagccatgtaactgaaaatctaattataggagcatttgttactgagccacagataatacaagagcgtcccctcacaaataaattaaagcgtaaaaggagacctacatcaggccttcatcctgaggattttatcaagaaagcagatttggcagttcaaaagactcctgaaatgataaatcagggaactaaccaaacggagcagaatggtcaagtgatgaatattactaatagtggtcatgagaataaaacaaaaggtgattctattcagaatgagaaaaatcctaacccaatagaatcactcgaaaaagaatctgctttcaaaacgaaagctgaacctataagcagcagtataagcaatatggaactcgaattaaatatccacaattcaaaagcacctaaaaagaataggctgaggaggaagtcttctaccaggcatattcatgcgcttgaactagtagtcagtagaaatctaagcccacctaattgtactgaattgcaaattgatagttgttctagcagtgaagagataaagaaaaaaaagtacaaccaaatgccagtcaggcacagcagaaacctacaactcatggaaggtaaagaacctgcaactggagccaagaagagtaacaagccaaatgaacagacaagtaaaagacatgacagcgatactttcccagagctgaagttaacaaatgcacctggttcttttactaagtgttcaaataccagtgaacttaaagaatttgtcaatcctagccttccaagagaagaaaaagaagagaaactagaaacagttaaagtgtctaataatgctgaagaccccaaagatctcatgttaagtggagaaagggttttgcaaactgaaagatctgtagagagtagcagtatttcattggtacctggtactgattatggcactcaggaaagtatctcgttactggaagttagcactctagggaaggcaaaaacagaaccaaataaatgtgtgagtcagtgtgcagcatttgaaaaccccaagggactaattcatggttgttccaaagataatagaaatgacacagaaggctttaagtatccattgggacatgaagttaaccacagtcgggaaacaagcatagaaatggaagaaagtgaacttgatgctcagtatttgcagaatacattcaaggtttcaaagcgccagtcatttgctccgttttcaaatccaggaaatgcagaagaggaatgtgcaacattctctgcccactctgggtccttaaagaaacaaagtccaaaagtcacttttgaatgtgaacaaaaggaagaaaatcaaggaaagaatgagtctaatatcaagcctgtacagacagttaatatcactgcaggctttcctgtggttggtcagaaagataagccagttgataatgccaaatgtagtatcaaaggaggctctaggttttgtctatcatctcagttcagaggcaacgaaactggactcattactccaaataaacatggacttttacaaaacccatatcgtataccaccactttttcccatcaagtcatttgttaaaactaaatgtaagaaaaatctgctagaggaaaactttgaggaacattcaatgtcacctgaaagagaaatgggaaatgagaacattccaagtacagtgagcacaattagccgtaataacattagagaaaatgtttttaaagaagccagctcaagcaatattaatgaagtaggttccagtactaatgaagtgggctccagtattaatgaaataggttccagtgatgaaaacattcaagcagaactaggtagaaacagagggccaaaattgaatgctatgcttagattaggggttttgcaacctgaggtctataaacaaagtcttcctggaagtaattgtaagcatcctgaaataaaaaagcaagaatatgaagaagtagttcagactgttaatacagatttctctccatatctgatttcagataacttagaacagcctatgggaagtagtcatgcatctcaggtttgttctgagacacctgatgacctgttagatgatggtgaaataaaggaagatactagttttgctgaaaatgacattaaggaaagttctgctgtttttagcaaaagcgtccagaaaggagagcttagcaggagtcctagccctttcacccatacacatttggctcagggttaccgaagaggggccaagaaattagagtcctcagaagagaacttatctagtgaggatgaagagcttccctgcttccaacacttgttatttggtaaagtaaacaatataccttctcagtctactaggcatagcaccgttgctaccgagtgtctgtctaagaacacagaggagaatttattatcattgaagaatagcttaaatgactgcagtaaccaggtaatattggcaaaggcatctcaggaacatcaccttagtgaggaaacaaaatgttctgctagcttgttttcttcacagtgcagtgaattggaagacttgactgcaaatacaaacacccaggatcctttcttgattggttcttccaaacaaatgaggcatcagtctgaaagccagggagttggtctgagtgacaaggaattggtttcagatgatgaagaaagaggaacgggcttggaagaaaataatcaagaagagcaaagcatggattcaaacttaggtgaagcagcatctgggtgtgagagtgaaacaagcgtctctgaagactgctcagggctatcctctcagagtgacattttaaccactcagcagagggataccatgcaacataacctgataaagctccagcaggaaatggctgaactagaagctgtgttagaacagcatgggagccagccttctaacagctacccttccatcataagtgactcttctgcccttgaggacctgcgaaatccagaacaaagcacatcagaaaaagcagtattaacttcacagaaaagtagtgaataccctataagccagaatccagaaggcctttctgctgacaagtttgaggtgtctgcagatagttctaccagtaaaaataaagaaccaggagtggaaaggtcatccccttctaaatgcccatcattagatgataggtggtacatgcacagttgctctgggagtcttcagaatagaaactacccatctcaagaggagctcattaaggttgttgatgtggaggagcaacagctggaagagtctgggccacacgatttgacggaaacatcttacttgccaaggcaagatctagagggaaccccttacctggaatctggaatcagcctcttctctgatgaccctgaatctgatccttctgaagacagagccccagagtcagctcgtgttggcaacataccatcttcaacctctgcattgaaagttccccaattgaaagttgcagaatctgcccagagtccagctgctgctcatactactgatactgctgggtataatgcaatggaagaaagtgtgagcagggagaagccagaattgacagcttcaacagaaagggtcaacaaaagaatgtccatggtggtgtctggcctgaccccagaagaatttatgctcgtgtacaagtttgccagaaaacaccacatcactttaactaatctaattactgaagagactactcatgttgttatgaaaacagatgctgagtttgtgtgtgaacggacactgaaatattttctaggaattgcgggaggaaaatgggtagttagctatttctgggtgacccagtctattaaagaaagaaaaatgctgaatgagcatgattttgaagtcagaggagatgtggtcaatggaagaaaccaccaaggtccaaagcgagcaagagaatcccaggacagaaagatcttcagggggctagaaatctgttgctatgggcccttcaccaacatgcccacagatcaactggaatggatggtacagctgtgtggtgcttctgtggtgaaggagctttcatcattcacccttggcacaggtgtccacccaattgtggttgtgcagccagatgcctggacagaggacaatggcttccatgcaattgggcagatgtgtgaggcacctgtggtgacccgagagtgggtgttggacagtgtagcactctaccagtgccaggagctggacacctacctgataccccagatcccccacagccactactagtaatgaactagtccgtaacttgaaagtatttcgatttcttggctttatatatcttgtggaaaggacgattcctcagctggtggaagccattg

SEQ ID NO: 1976 - DNA, 5756 bp, Homo sapiens
  source 1..5756: mol_type = genomic DNA
accgccaccatggatttatctgctcttcgcgttgaagaagtacaaaatgtcattaatgctatgcagaaaatcttagagtgtcccatctgtctggagttgatcaaggaacctgtctccacaaagtgtgaccacatattttgcaaattttgcatgctgaaacttctcaaccagaagaaagggccttcacagtgtcctttatgtaagaatgatataaccaaaaggagcctacaagaaagtacgagatttagtcaacttgttgaagagctattgaaaatcatttgtgcttttcagcttgacacaggtttggagtatgcaaacagctataattttgcaaaaaaggaaaataactctcctgaacatctaaaagatgaagtttctatcatccaaagtatgggctacagaaaccgtgccaaaagacttctacagagtgaacccgaaaatccttccttgcaggaaaccagtctcagtgtccaactctctaaccttggaactgtgagaactctgaggacaaagcagcggatacaacctcaaaagacgtctgtctacattgaattgggatctgattcttctgaagataccgttaataaggcaacttattgcagtgtgggagatcaagaattgttacaaatcacccctcaaggaaccagggatgaaatcagtttggattctgcaaaaaaggctgcttgtgaattttctgagacggatgtaacaaatactgaacatcatcaacccagtaataatgatttgaacaccactgagaagcgtgcagctgagaggcatccagaaaagtatcagggtagttctgtttcaaacttgcatgtggagccatgtggcacaaatactcatgccagctcattacagcatgagaacagcagtttattactcactaaagacagaatgaatgtagaaaaggctgaattctgtaataaaagcaaacagcctggcttagcaaggagccaacataacagatgggctggaagtaaggaaacatgtaatgataggcggactcccagcacagaaaaaaaggtagatctgaatgctgatcccctgtgtgagagaaaagaatggaataagcagaaactgccatgctcagagaatcctagagatactgaagatgttccttggataacactaaatagcagcattcagaaagttaatgagtggttttccagaagtgatgaactgttaggttctgatgactcacatgatggggagtctgaatcaaatgccaaagtagctgatgtattggacgttctaaatgaggtagatgaatattctggttcttcagagaaaatagacttactggccagtgatcctcatgaggctttaatatgtaaaagtgaaagagttcactccaaatcagtagagagtaatattgaagacaaaatatttgggaaaacctatcggaagaaggcaagcctccccaacttaagccatgtaactgaaaatctaattataggagcatttgttactgagccacagataatacaagagcgtcccctcacaaataaattaaagcgtaaaaggagacctacatcaggccttcatcctgaggattttatcaagaaagcagatttggcagttcaaaagactcctgaaatgataaatcagggaactaaccaaacggagcagaatggtcaagtgatgaatattactaatagtggtcatgagaataaaacaaaaggtgattctattcagaatgagaaaaatcctaacccaatagaatcactcgaaaaagaatctgctttcaaaacgaaagctgaacctataagcagcagtataagcaatatggaactcgaattaaatatccacaattcaaaagcacctaaaaagaataggctgaggaggaagtcttctaccaggcatattcatgcgcttgaactagtagtcagtagaaatctaagcccacctaattgtactgaattgcaaattgatagttgttctagcagtgaagagataaagaaaaaaaagtacaaccaaatgccagtcaggcacagcagaaacctacaactcatggaaggtaaagaacctgcaactggagccaagaagagtaacaagccaaatgaacagacaagtaaaagacatgacagcgatactttcccagagctgaagttaacaaatgcacctggttcttttactaagtgttcaaataccagtgaacttaaagaatttgtcaatcctagccttccaagagaagaaaaagaagagaaactagaaacagttaaagtgtctaataatgctgaagaccccaaagatctcatgttaagtggagaaagggttttgcaaactgaaagatctgtagagagtagcagtatttcattggtacctggtactgattatggcactcaggaaagtatctcgttactggaagttagcactctagggaaggcaaaaacagaaccaaataaatgtgtgagtcagtgtgcagcatttgaaaaccccaagggactaattcatggttgttccaaagataatagaaatgacacagaaggctttaagtatccattgggacatgaagttaaccacagtcgggaaacaagcatagaaatggaagaaagtgaacttgatgctcagtatttgcagaatacattcaaggtttcaaagcgccagtcatttgctccgttttcaaatccaggaaatgcagaagaggaatgtgcaacattctctgcccactctgggtccttaaagaaacaaagtccaaaagtcacttttgaatgtgaacaaaaggaagaaaatcaaggaaagaatgagtctaatatcaagcctgtacagacagttaatatcactgcaggctttcctgtggttggtcagaaagataagccagttgataatgccaaatgtagtatcaaaggaggctctaggttttgtctatcatctcagttcagaggcaacgaaactggactcattactccaaataaacatggacttttacaaaacccatatcgtataccaccactttttcccatcaagtcatttgttaaaactaaatgtaagaaaaatctgctagaggaaaactttgaggaacattcaatgtcacctgaaagagaaatgggaaatgagaacattccaagtacagtgagcacaattagccgtaataacattagagaaaatgtttttaaagaagccagctcaagcaatattaatgaagtaggttccagtactaatgaagtgggctccagtattaatgaaataggttccagtgatgaaaacattcaagcagaactaggtagaaacagagggccaaaattgaatgctatgcttagattaggggttttgcaacctgaggtctataaacaaagtcttcctggaagtaattgtaagcatcctgaaataaaaaagcaagaatatgaagaagtagttcagactgttaatacagatttctctccatatctgatttcagataacttagaacagcctatgggaagtagtcatgcatctcaggtttgttctgagacacctgatgacctgttagatgatggtgaaataaaggaagatactagttttgctgaaaatgacattaaggaaagttctgctgtttttagcaaaagcgtccagaaaggagagcttagcaggagtcctagccctttcacccatacacatttggctcagggttaccgaagaggggccaagaaattagagtcctcagaagagaacttatctagtgaggatgaagagcttccctgcttccaacacttgttatttggtaaagtaaacaatataccttctcagtctactaggcatagcaccgttgctaccgagtgtctgtctaagaacacagaggagaatttattatcattgaagaatagcttaaatgactgcagtaaccaggtaatattggcaaaggcatctcaggaacatcaccttagtgaggaaacaaaatgttctgctagcttgttttcttcacagtgcagtgaattggaagacttgactgcaaatacaaacacccaggatcctttcttgattggttcttccaaacaaatgaggcatcagtctgaaagccagggagttggtctgagtgacaaggaattggtttcagatgatgaagaaagaggaacgggcttggaagaaaataatcaagaagagcaaagcatggattcaaacttaggtgaagcagcatctgggtgtgagagtgaaacaagcgtctctgaagactgctcagggctatcctctcagagtgacattttaaccactcagcagagggataccatgcaacataacctgataaagctccagcaggaaatggctgaactagaagctgtgttagaacagcatgggagccagccttctaacagctacccttccatcataagtgactcttctgcccttgaggacctgcgaaatccagaacaaagcacatcagaaaaagattcgcatatacatggccaaaggaacaactccatgttttctaaaaggcctagagaacatatatcagtattaacttcacagaaaagtagtgaataccctataagccagaatccagaaggcctttctgctgacaagtttgaggtgtctgcagatagttctaccagtaaaaataaagaaccaggagtggaaaggtcatccccttctaaatgcccatcattagatgataggtggtacatgcacagttgctctgggagtcttcagaatagaaactacccatctcaagaggagctcattaaggttgttgatgtggaggagcaacagctggaagagtctgggccacacgatttgacggaaacatcttacttgccaaggcaagatctagagggaaccccttacctggaatctggaatcagcctcttctctgatgaccctgaatctgatccttctgaagacagagccccagagtcagctcgtgttggcaacataccatcttcaacctctgcattgaaagttccccaattgaaagttgcagaatctgcccagagtccagctgctgctcatactactgatactgctgggtataatgcaatggaagaaagtgtgagcagggagaagccagaattgacagcttcaacagaaagggtcaacaaaagaatgtccatggtggtgtctggcctgaccccagaagaatttatgctcgtgtacaagtttgccagaaaacaccacatcactttaactaatctaattactgaagagactactcatgttgttatgaaaacagatgctgagtttgtgtgtgaacggacactgaaatattttctaggaattgcgggaggaaaatgggtagttagctatttctgggtgacccagtctattaaagaaagaaaaatgctgaatgagcatgattttgaagtcagaggagatgtggtcaatggaagaaaccaccaaggtccaaagcgagcaagagaatcccaggacagaaagatcttcagggggctagaaatctgttgctatgggcccttcaccaacatgcccacagatcaactggaatggatggtacagctgtgtggtgcttctgtggtgaaggagctttcatcattcacccttggcacaggtgtccacccaattgtggttgtgcagccagatgcctggacagaggacaatggcttccatgcaattgggcagatgtgtgaggcacctgtggtgacccgagagtgggtgttggacagtgtagcactctaccagtgccaggagctggacacctacctgataccccagatcccccacagccactactagtaatgaactagtccgtaacttgaaagtatttcgatttcttggctttatatatcttgtggaaaggacgatgcttagctcaggctcaactccta

SEQ ID NO: 1977 - DNA, 2381 bp, Homo sapiens
  source 1..2381: mol_type = genomic DNA
accgccaccatggatttatctgctcttcgcgttgaagaagtacaaaatgtcattaatgctatgcagaaaatcttagagtgtcccatctgtctggagttgatcaaggaacctgtctccacaaagtgtgaccacatattttgcaaattttgcatgctgaaacttctcaaccagaagaaagggccttcacagtgtcctttatgtaagaatgatataaccaaaaggagcctacaagaaagtacgagatttagtcaacttgttgaagagctattgaaaatcatttgtgcttttcagcttgacacaggtttggagtatgcaaacagctataattttgcaaaaaaggaaaataactctcctgaacatctaaaagatgaagtttctatcatccaaagtatgggctacagaaaccgtgccaaaagacttctacagagtgaacccgaaaatccttccttgcaggaaaccagtctcagtgtccaactctctaaccttggaactgtgagaactctgaggacaaagcagcggatacaacctcaaaagacgtctgtctacattgaattgggatctgattcttctgaagataccgttaataaggcaacttattgcagtgtgggagatcaagaattgttacaaatcacccctcaaggaaccagggatgaaatcagtttggattctgcaaaaaaggctgcttgtgaattttctgagacggatgtaacaaatactgaacatcatcaacccagtaataatgatttgaacaccactgagaagcgtgcagctgagaggcatccagaaaagtatcagggtgaagcagcatctgggtgtgagagtgaaacaagcgtctctgaagactgctcagggctatcctctcagagtgacattttaaccactcagcagagggataccatgcaacataacctgataaagctccagcaggaaatggctgaactagaagctgtgttagaacagcatgggagccagccttctaacagctacccttccatcataagtgactcttctgcccttgaggacctgcgaaatccagaacaaagcacatcagaaaaagtattaacttcacagaaaagtagtgaataccctataagccagaatccagaaggcctttctgctgacaagtttgaggtgtctgcagatagttctaccagtaaaaataaagaaccaggagtggaaaggtcatccccttctaaatgcccatcattagatgataggtggtacatgcacagttgctctgggagtcttcagaatagaaactacccatctcaagaggagctcattaaggttgttgatgtggaggagcaacagctggaagagtctgggccacacgatttgacggaaacatcttacttgccaaggcaagatctagagggaaccccttacctggaatctggaatcagcctcttctctgatgaccctgaatctgatccttctgaagacagagccccagagtcagctcgtgttggcaacataccatcttcaacctctgcattgaaagttccccaattgaaagttgcagaatctgcccagagtccagctgctgctcatactactgatactgctgggtataatgcaatggaagaaagtgtgagcagggagaagccagaattgacagcttcaacagaaagggtcaacaaaagaatgtccatggtggtgtctggcctgaccccagaagaatttatgctcgtgtacaagtttgccagaaaacaccacatcactttaactaatctaattactgaagagactactcatgttgttatgaaaacagatgctgagtttgtgtgtgaacggacactgaaatattttctaggaattgcgggaggaaaatgggtagttagctatttctgggtgacccagtctattaaagaaagaaaaatgctgaatgagcatgattttgaagtcagaggagatgtggtcaatggaagaaaccaccaaggtccaaagcgagcaagagaatcccaggacagaaagatcttcagggggctagaaatctgttgctatgggcccttcaccaacatgcccacagatcaactggaatggatggtacagctgtgtggtgcttctgtggtgaaggagctttcatcattcacccttggcacaggtgtccacccaattgtggttgtgcagccagatgcctggacagaggacaatggcttccatgcaattgggcagatgtgtgaggcacctgtggtgacccgagagtgggtgttggacagtgtagcactctaccagtgccaggagctggacacctacctgataccccagatcccccacagccactactagtaatgaactagtccgtaacttgaaagtatttcgatttcttggctttatatatcttgtggaaaggacgaagtcgttagcgaggacatttagat

SEQ ID NO: 1978 - DNA, 5552 bp, Homo sapiens
  source 1..5552: mol_type = genomic DNA
accgccaccatgctgaaacttctcaaccagaagaaagggccttcacagtgtcctttatgtaagaatgatataaccaaaaggagcctacaagaaagtacgagatttagtcaacttgttgaagagctattgaaaatcatttgtgcttttcagcttgacacaggtttggagtatgcaaacagctataattttgcaaaaaaggaaaataactctcctgaacatctaaaagatgaagtttctatcatccaaagtatgggctacagaaaccgtgccaaaagacttctacagagtgaacccgaaaatccttccttgcaggaaaccagtctcagtgtccaactctctaaccttggaactgtgagaactctgaggacaaagcagcggatacaacctcaaaagacgtctgtctacattgaattgggatctgattcttctgaagataccgttaataaggcaacttattgcagtgtgggagatcaagaattgttacaaatcacccctcaaggaaccagggatgaaatcagtttggattctgcaaaaaaggctgcttgtgaattttctgagacggatgtaacaaatactgaacatcatcaacccagtaataatgatttgaacaccactgagaagcgtgcagctgagaggcatccagaaaagtatcagggtagttctgtttcaaacttgcatgtggagccatgtggcacaaatactcatgccagctcattacagcatgagaacagcagtttattactcactaaagacagaatgaatgtagaaaaggctgaattctgtaataaaagcaaacagcctggcttagcaaggagccaacataacagatgggctggaagtaaggaaacatgtaatgataggcggactcccagcacagaaaaaaaggtagatctgaatgctgatcccctgtgtgagagaaaagaatggaataagcagaaactgccatgctcagagaatcctagagatactgaagatgttccttggataacactaaatagcagcattcagaaagttaatgagtggttttccagaagtgatgaactgttaggttctgatgactcacatgatggggagtctgaatcaaatgccaaagtagctgatgtattggacgttctaaatgaggtagatgaatattctggttcttcagagaaaatagacttactggccagtgatcctcatgaggctttaatatgtaaaagtgaaagagttcactccaaatcagtagagagtaatattgaagacaaaatatttgggaaaacctatcggaagaaggcaagcctccccaacttaagccatgtaactgaaaatctaattataggagcatttgttactgagccacagataatacaagagcgtcccctcacaaataaattaaagcgtaaaaggagacctacatcaggccttcatcctgaggattttatcaagaaagcagatttggcagttcaaaagactcctgaaatgataaatcagggaactaaccaaacggagcagaatggtcaagtgatgaatattactaatagtggtcatgagaataaaacaaaaggtgattctattcagaatgagaaaaatcctaacccaatagaatcactcgaaaaagaatctgctttcaaaacgaaagctgaacctataagcagcagtataagcaatatggaactcgaattaaatatccacaattcaaaagcacctaaaaagaataggctgaggaggaagtcttctaccaggcatattcatgcgcttgaactagtagtcagtagaaatctaagcccacctaattgtactgaattgcaaattgatagttgttctagcagtgaagagataaagaaaaaaaagtacaaccaaatgccagtcaggcacagcagaaacctacaactcatggaaggtaaagaacctgcaactggagccaagaagagtaacaagccaaatgaacagacaagtaaaagacatgacagcgatactttcccagagctgaagttaacaaatgcacctggttcttttactaagtgttcaaataccagtgaacttaaagaatttgtcaatcctagccttccaagagaagaaaaagaagagaaactagaaacagttaaagtgtctaataatgctgaagaccccaaagatctcatgttaagtggagaaagggttttgcaaactgaaagatctgtagagagtagcagtatttcattggtacctggtactgattatggcactcaggaaagtatctcgttactggaagttagcactctagggaaggcaaaaacagaaccaaataaatgtgtgagtcagtgtgcagcatttgaaaaccccaagggactaattcatggttgttccaaagataatagaaatgacacagaaggctttaagtatccattgggacatgaagttaaccacagtcgggaaacaagcatagaaatggaagaaagtgaacttgatgctcagtatttgcagaatacattcaaggtttcaaagcgccagtcatttgctccgttttcaaatccaggaaatgcagaagaggaatgtgcaacattctctgcccactctgggtccttaaagaaacaaagtccaaaagtcacttttgaatgtgaacaaaaggaagaaaatcaaggaaagaatgagtctaatatcaagcctgtacagacagttaatatcactgcaggctttcctgtggttggtcagaaagataagccagttgataatgccaaatgtagtatcaaaggaggctctaggttttgtctatcatctcagttcagaggcaacgaaactggactcattactccaaataaacatggacttttacaaaacccatatcgtataccaccactttttcccatcaagtcatttgttaaaactaaatgtaagaaaaatctgctagaggaaaactttgaggaacattcaatgtcacctgaaagagaaatgggaaatgagaacattccaagtacagtgagcacaattagccgtaataacattagagaaaatgtttttaaagaagccagctcaagcaatattaatgaagtaggttccagtactaatgaagtgggctccagtattaatgaaataggttccagtgatgaaaacattcaagcagaactaggtagaaacagagggccaaaattgaatgctatgcttagattaggggttttgcaacctgaggtctataaacaaagtcttcctggaagtaattgtaagcatcctgaaataaaaaagcaagaatatgaagaagtagttcagactgttaatacagatttctctccatatctgatttcagataacttagaacagcctatgggaagtagtcatgcatctcaggtttgttctgagacacctgatgacctgttagatgatggtgaaataaaggaagatactagttttgctgaaaatgacattaaggaaagttctgctgtttttagcaaaagcgtccagaaaggagagcttagcaggagtcctagccctttcacccatacacatttggctcagggttaccgaagaggggccaagaaattagagtcctcagaagagaacttatctagtgaggatgaagagcttccctgcttccaacacttgttatttggtaaagtaaacaatataccttctcagtctactaggcatagcaccgttgctaccgagtgtctgtctaagaacacagaggagaatttattatcattgaagaatagcttaaatgactgcagtaaccaggtaatattggcaaaggcatctcaggaacatcaccttagtgaggaaacaaaatgttctgctagcttgttttcttcacagtgcagtgaattggaagacttgactgcaaatacaaacacccaggatcctttcttgattggttcttccaaacaaatgaggcatcagtctgaaagccagggagttggtctgagtgacaaggaattggtttcagatgatgaagaaagaggaacgggcttggaagaaaataatcaagaagagcaaagcatggattcaaacttaggtgaagcagcatctgggtgtgagagtgaaacaagcgtctctgaagactgctcagggctatcctctcagagtgacattttaaccactcagcagagggataccatgcaacataacctgataaagctccagcaggaaatggctgaactagaagctgtgttagaacagcatgggagccagccttctaacagctacccttccatcataagtgactcttctgcccttgaggacctgcgaaatccagaacaaagcacatcagaaaaagcagtattaacttcacagaaaagtagtgaataccctataagccagaatccagaaggcctttctgctgacaagtttgaggtgtctgcagatagttctaccagtaaaaataaagaaccaggagtggaaaggtcatccccttctaaatgcccatcattagatgataggtggtacatgcacagttgctctgggagtcttcagaatagaaactacccatctcaagaggagctcattaaggttgttgatgtggaggagcaacagctggaagagtctgggccacacgatttgacggaaacatcttacttgccaaggcaagatctagagggaaccccttacctggaatctggaatcagcctcttctctgatgaccctgaatctgatccttctgaagacagagccccagagtcagctcgtgttggcaacataccatcttcaacctctgcattgaaagttccccaattgaaagttgcagaatctgcccagagtccagctgctgctcatactactgatactgctgggtataatgcaatggaagaaagtgtgagcagggagaagccagaattgacagcttcaacagaaagggtcaacaaaagaatgtccatggtggtgtctggcctgaccccagaagaatttatgctcgtgtacaagtttgccagaaaacaccacatcactttaactaatctaattactgaagagactactcatgttgttatgaaaacagatgctgagtttgtgtgtgaacggacactgaaatattttctaggaattgcgggaggaaaatgggtagttagctatttctgggtgacccagtctattaaagaaagaaaaatgctgaatgagcatgattttgaagtcagaggagatgtggtcaatggaagaaaccaccaaggtccaaagcgagcaagagaatcccaggacagaaagatcttcagggggctagaaatctgttgctatgggcccttcaccaacatgcccacagatcaactggaatggatggtacagctgtgtggtgcttctgtggtgaaggagctttcatcattcacccttggcacaggtgtccacccaattgtggttgtgcagccagatgcctggacagaggacaatggcttccatgcaattgggcagatgtgtgaggcacctgtggtgacccgagagtgggtgttggacagtgtagcactctaccagtgccaggagctggacacctacctgataccccagatcccccacagccactactagtaatgaactagtccgtaacttgaaagtatttcgatttcttggctttatatatcttgtggaaaggacgaactgaactgatcttggcgttatac

SEQ ID NO: 1979 - DNA, 8030 bp, Homo sapiens
  source 1..8030: mol_type = genomic DNA
accgccaccatgtctggcggcgccgcagagaagcagagcagcactcccggttccctgttcctctcgccgccggctcctgcccccaagaatggctccagctccgattcctccgtgggggagaaactgggagccgcggccgccgacgctgtgaccggcaggaccgaggagtacaggcgccgccgccacactatggacaaggacagccgtggggcggccgcgaccactaccaccactgagcaccgcttcttccgccggagcgtcatctgtgactccaatgccactgcactggagcttcccggccttcctctttccctgccccagcccagcatccccgcggctgtcccgcagagtgctccaccggagccccaccgggaagagaccgtgaccgccaccgccacttcccaggtagcccagcagcctccagccgctgccgcccctggggaacaggccgtcgcgggccctgccccctcgactgtccccagcagtaccagcaaagaccgcccagtgtcccagcctagccttgtggggagcaaagaggagccgccgccggcgagaagtggcagcggcggcggcagcgccaaggagccacaggaggaacggagccagcagcaggatgatatcgaagagctggagaccaaggccgtgggaatgtctaacgatggccgctttctcaagtttgacatcgaaatcggcagaggctcctttaagacggtctacaaaggtctggacactgaaaccaccgtggaagtcgcctggtgtgaactgcaggatcgaaaattaacaaagtctgagaggcagagatttaaagaagaagctgaaatgttaaaaggtcttcagcatcccaatattgttagattttatgattcctgggaatccacagtaaaaggaaagaagtgcattgttttggtgactgaacttatgacgtctggaacacttaaaacgtatctgaaaaggtttaaagtgatgaagatcaaagttctaagaagctggtgccgtcagatccttaaaggtcttcagtttcttcatactcgaactccacctatcattcaccgcgatcttaaatgtgacaacatctttatcaccggccctactggctcagtcaagattggagacctcggtctggcaaccctgaagcgggcttcttttgccaagagtgtgataggtaccccagagttcatggcccctgagatgtatgaggagaaatatgatgaatccgttgacgtttatgcttttgggatgtgcatgcttgagatggctacatctgaatatccttactcggagtgccaaaatgctgcacagatctaccgtcgcgtgaccagtggggtgaagccagccagttttgacaaagtagcaattcctgaagtgaaggaaattattgaaggatgcatacgacaaaacaaagatgaaagatattccatcaaagaccttttgaaccatgccttcttccaagaggaaacaggagtacgggtagaattagcagaagaagatgatggagaaaaaatagccataaaattatggctacgtattgaagatattaagaaattaaagggaaaatacaaagataatgaagctattgagttttcttttgatttagagagagatgtcccagaagatgttgcacaagaaatggtagagtctgggtatgtctgtgaaggtgatcacaagaccatggctaaagctatcaaagacagagtatcattaattaagaggaaacgagagcagcggcagttggtacgggaggagcaagaaaaaaaaaagcaggaagagagcagtctcaaacagcaggtagaacaatccagtgcttcccagacaggaatcaagcagctcccttctgctagcaccggcatacctactgcttctaccacttcagcttcagtttctacacaagtagaacctgaagaacctgaggcagatcaacatcaacaactacagtaccagcaacccagtatatctgtgttatctgatgggacggttgacagtggtcagggatcctctgtcttcacagaatctcgagtgagcagccaacagacagtttcatatggttcccaacatgaacaggcacattctacaggcacagtcccagggcatataccttctactgtccaagcacagtctcagccccatggggtatatccaccctcaagtgtgcctcagtccatggcgcatccgtgtggggggaccccaacatacccagaatcacagatatttttcccaactattcatgaacgtccagtttctttttcaccacctcccacctgcccaccgaaagtagccatttcccagcggcgtaagagcacctccttcctggaagcccaaactcaccacttccaacccctgctgaggactgttggccaaagtcttcttccacctggtggcagcccaactaactggacaccagaggccgtagttatgttgggtactacagccagtagagtaactggagagtcatgtgagatacaggtccatcctatgtttgaaccatctcaagtttacagtgactatagacctggactagtacttccagaagaagctcactattttattcctcaggaagcagtgtatgtagctggggtacattaccaggcccgggtggcagaacagtatgagggcattccatacaactcatcagtactgtcaagtcctatgaaacagatacctgaacagaagccagtacaagggggccctacttcaagttctgtctttgaatttccatctggacaggctttcctggtaggacaccttcagaatctaagattagattctggattgggtccgggatctcccctctctagtatttctgcacctatcagtacagatgctacacgtttgaaatttcaccctgtctttgttcctcattctgcgcctgctgtgttaactcataacaatgagagcagaagcaactgtgtatttgaatttcatgttcacacaccaagctcctcttcaggagaaggaggtggaattttacctcagcgtgtttaccgaaatcggcaggttgcagtggacttgaatcaagaagaactgcctcctcaatcagttggattacatggctacttgcagcctgtgactgaagaaaagcataattaccatgccccagaattgaccgtttctgtggtagagcctatcggacagaactggccaataggaagcccagaatattccagtgattcctcacaaatcacttcttcagaccccagtgattttcagtcacctccccctacagggggagcagctgcaccttttggctctgacgtctcaatgccctttatccatctgcctcagacagtgttacaagaatccccacttttcttctgtttcccccaaggaaccacatctcagcaggtcttaactgcctcattttcttcaggaggatctgcacttcatccacaggcacaggggcagagccagggtcagccatcctcaagtagcttaacaggggtttcatcttcccaacccatacaacatcctcagcagcagcagggaatacagcagacagcccctcctcaacagacagtgcagtattcactttcacagacatcaacctccagtgaggccactactgcacagccagtgagtcagcctcaagctccacaagtcttgcctcaagtatcagctggaaaacagggcttcccacctcgactgccaccacagtacccaggagattcaaatattgctccctcttccaacgtggcttctgtttgcatccattctacagtcctatcccctcccatgccgacagaagtactggctacacctgggtactttcccacagtggtgcagccttatgtggaatcaaatcttttagttcctatgggtggtgtaggaggacaggttcaagtgtcccagccaggagggagtttagcacaagcccccactacatcctcccagcaagcagttttggagagtactcagggagtctctcaggttgctcctgcagagccagttgcagtagcacagacccaagctacccagccgaccactttggcttcctctgtagacagtgcacattcagatgttgcttcaggtatgagtgatggcaatgagaacgtcccatcttccagtggaaggcatgaaggaagaactacaaaacggcattaccgaaaatctgtaaggagtcgctctcgacatgaaaaaacttcacgcccaaaattaagaattttgaatgtttcaaataaaggagaccgagtagtagaatgtcaattagagactcataataggaaaatggttacattcaaatttgacctagatggtgacaaccccgaggagatagcaacaattatggtgaacaatgactttattctagcaatagagagagagtcgtttgtggatcaagtgcgagaaattattgaaaaagctgatgaaatgctcagtgaggatgtcagtgtggaaccagagggtgatcagggattggagagtctacaaggaaaggatgactatggcttttcaggttctcagaaattggaaggagagttcaaacaaccaattcctgcgtcttccatgccacagcaaataggcattcctaccagttctttaactcaagttgttcattctgcgggaaggcggtttatagtgagtcctgtgccagaaagccgattacgagaatcaaaagttttccccagtgaaataacagatacagttgctgcctctacagctcagagccctggaatgaacttgtctcactctgcatcatcccttagtctacaacaggccttttctgaacttagacgtgcccaaatgacagaaggacccaacacagcacctccaaactttagtcatacaggaccaacatttccagtagtacctcctttcttaagtagcattgctggagtcccaaccacagcagcagccacagcaccagtccctgcaacaagcagccctcctaatgacatttccacatcagtaattcagtctgaggttacagtgcccactgaagaggggattgctggagttgccaccagcacaggtgtggtaacttcaggtggtctccccataccacctgtgtctgaatcaccagtactttccagcgtagtttcaagtatcacaatacctgcagttgtctcaatatctactacatccccgtcacttcaagtccccacatccacatctgagatcgttgtttctagtacagcactgtatccttcagtaacagtttcagcaacttcagcctctgcagggggcagtactgctaccccaggtcctaagcctccagctgtagtatctcagcaggcagcaggcagcactactgtgggagccacattaacatcagtttctaccaccacttcattcccaagcacagcttcacagctgtgcattcagcttagcagcagtacttctactcctactttagctgaaaccgtggtagttagcgcacactcactagataagacatctcatagcagtacaactggattggctttctccctctctgcaccatcttcctcttcctctcctggagcaggagtgtctagttatatttctcagcctggtgggctgcatcctttggtcattccatcagtgatagcttctactcctattcttccccaagcagcaggacctacttctacacctttattaccccaagtacctagtatcccacccttggtacagcctgttgccaatgtgcctgctgtacagcagacactaattcatagtcagcctcaaccagctttgcttcccaaccagccccatactcattgtcctgaagtagattctgatacacaacccaaagctcctggaattgatgacataaagactctagaagaaaagctgcggtctctgttcagtgaacacagctcatctggagctcagcatgcctctgtctcactggagacctcactagtcatagagagcactgtcacaccaggcatcccaactactgctgttgcaccaagcaaactcctgacttctaccacaagtacttgcttaccaccaaccaatttaccactaggaacagttgctttgccagttacaccagtggtcacacctgggcaagtttctaccccagtcagcactactacatcaggagtgaaacctggaactgctccctccaagccacctctaactaaggctccggtgctgccagtgggtactgaacttccagcaggtactctacccagcgagcagctgccaccttttccaggaccttctctaacccagtcccagcaacctctagaggatcttgatgctcaattgagaagaacacttagtccagagatgatcacagtgacttctgcggttggtcctgtgtccatggcggctccaacagcaatcacagaagcaggaacacagcctcagaagggtgtttctcaagtcaaagaaggccctgtcctagcaactagttcaggagctggtgtttttaagatgggacgatttcaggtttctgttgcagcagacggtgcccagaaagagggtaaaaataagtcagaagatgcaaagtctgttcattttgaatccagcacctcagagtcctcagtgctatcaagtagtagtccagagagtaccttggtgaaaccagagccgaatggcataaccatccctggtatctcttcagatgtgccagagagtgcccacaaaactactgcctcagaggcaaagtcagacactgggcagcctaccaaggttggacgttttcaggtgacaactacagcaaacaaagtgggtcgtttctctgtatcaaaaactgaggacaagatcactgacacaaagaaagaaggaccagtggcatctcctccttttatggatttggaacaagctgttcttcctgctgtgataccaaagaaagagaagcctgaactgtcagagccttcacatctaaatgggccgtcttctgacccggaggccgcttttttaagtagggatgtggatgatggttccggtagtccacactcgccccatcagctgagctcaaagagccttcctagccagaatctaagtcaaagccttagtaattcatttaactcctcttacatgagtagcgacaatgagtcagatatcgaagatgaagacttaaagttagagctgcgacgactacgagataaacatctcaaagagattcaggacctgcagagtcgccagaagcatgaaattgaatctttgtataccaaactgggcaaggtgccccctgctgttattattcccccagctgctcccctttcagggagaagacgacgacccactaaaagcaaaggcagcaaatctagtcgaagcagttccttggggaataaaagcccccagctttcaggtaacctgtctggtcagagtgcagcttcagtcttgcacccccagcagaccctccaccctcctggcaacatcccagagtccgggcagaatcagctgttacagccccttaagccatctccctccagtgacaacctctattcagccttcaccagtgatggtgccatttcagtaccaagcctttctgctccaggtcaaggaaccagcagcacaaacactgttggggcaacagtgaacagccaagccgcccaagctcagcctcctgccatgacgtccagcaggaagggcacattcacagatgacttgcacaagttggtagacaattgggcccgagatgccatgaatctctcaggcaggagaggaagcaaagggcacatgaattacgagggccctggaatggcaaggaagttctctgcacctgggcaactgtgcatctccatgacctcgaacctgggtggctctgcccccatctctgcagcatcagctacctctctaggtcacttcaccaagtctatgtgccccccacagcagtatggctttccagctaccccatttggcgctcaatggagtgggacgggtggcccagcaccacagccacttggccagttccaacctgtgggaactgcctccttgcagaatttcaacatcagcaatttgcagaaatccatcagcaaccccccaggctccaacctgcggaccacttagtaatgaactagtccgtaacttgaaagtatttcgatttcttggctttatatatcttgtggaaaggacgaccgacggtgcgacgtctttcgttg

SEQ ID NO: 1980 - DNA, 6506 bp, Homo sapiens
  source 1..6506: mol_type = genomic DNA
accgccaccatgtctggcggcgccgcagagaagcagagcagcactcccggttccctgttcctctcgccgccggctcctgcccccaagaatggctccagctccgattcctccgtgggggagaaactgggagccgcggccgccgacgctgtgaccggcaggaccgaggagtacaggcgccgccgccacactatggacaaggacagccgtggggcggccgcgaccactaccaccactgagcaccgcttcttccgccggagcgtcatctgtgactccaatgccactgcactggagcttcccggccttcctctttccctgccccagcccagcatccccgcggctgtcccgcagagtgctccaccggagccccaccgggaagagaccgtgaccgccaccgccacttcccaggtagcccagcagcctccagccgctgccgcccctggggaacaggccgtcgcgggccctgccccctcgactgtccccagcagtaccagcaaagaccgcccagtgtcccagcctagccttgtggggagcaaagaggagccgccgccggcgagaagtggcagcggcggcggcagcgccaaggagccacaggaggaacggagccagcagcaggatgatatcgaagagctggagaccaaggccgtgggaatgtctaacgatggccgctttctcaagtttgacatcgaaatcggcagaggctcctttaagacggtctacaaaggtctggacactgaaaccaccgtggaagtcgcctggtgtgaactgcaggatcgaaaattaacaaagtctgagaggcagagatttaaagaagaagctgaaatgttaaaaggtcttcagcatcccaatattgttagattttatgattcctgggaatccacagtaaaaggaaagaagtgcattgttttggtgactgaacttatgacgtctggaacacttaaaacgtatctgaaaaggtttaaagtgatgaagatcaaagttctaagaagctggtgccgtcagatccttaaaggtcttcagtttcttcatactcgaactccacctatcattcaccgcgatcttaaatgtgacaacatctttatcaccggccctactggctcagtcaagattggagacctcggtctggcaaccctgaagcgggcttcttttgccaagagtgtgataggtaccccagagttcatggcccctgagatgtatgaggagaaatatgatgaatccgttgacgtttatgcttttgggatgtgcatgcttgagatggctacatctgaatatccttactcggagtgccaaaatgctgcacagatctaccgtcgcgtgaccagtggggtgaagccagccagttttgacaaagtagcaattcctgaagtgaaggaaattattgaaggatgcatacgacaaaacaaagatgaaagatattccatcaaagaccttttgaaccatgccttcttccaagaggaaacaggagtacgggtagaattagcagaagaagatgatggagaaaaaatagccataaaattatggctacgtattgaagatattaagaaattaaagggaaaatacaaagataatgaagctattgagttttcttttgatttagagagagatgtcccagaagatgttgcacaagaaatggtagagtctgggtatgtctgtgaaggtgatcacaagaccatggctaaagctatcaaagacagagtatcattaattaagaggaaacgagagcagcggcagttggtacgggaggagcaagaaaaaaaaaagcaggaagagagcagtctcaaacagcaggtagaacaatccagtgcttcccagacaggaatcaagcagctcccttctgctagcaccggcatacctactgcttctaccacttcagcttcagtttctacacaagtagaacctgaagaacctgaggcagatcaacatcaacaactacagtaccagcaacccagtatatctgtgttatctgatgggacggttgacagtggtcagggatcctctgtcttcacagaatctcgagtgagcagccaacagacagtttcatatggttcccaacatgaacaggcacattctacaggcacagtcccagggcatataccttctactgtccaagcacagtctcagccccatggggtatatccaccctcaagtgtggcacaggggcagagccagggtcagccatcctcaagtagcttaacaggggtttcatcttcccaacccatacaacatcctcagcagcagggaatacagcagacagcccctcctcaacagacagtgcagtattcactttcacagacatcaacctccagtgaggccactactgcacagccagtgagtcagcctcaagctccacaagtcttgcctcaagtatcagctggaaaacagagtactcagggagtctctcaggttgctcctgcagagccagttgcagtagcacagacccaagctacccagccgaccactttggcttcctctgtagacagtgcacattcagatgttgcttcaggtatgagtgatggcaatgagaacgtcccatcttccagtggaaggcatgaaggaagaactacaaaacggcattaccgaaaatctgtaaggagtcgctctcgacatgaaaaaacttcacgcccaaaattaagaattttgaatgtttcaaataaaggagaccgagtagtagaatgtcaattagagactcataataggaaaatggttacattcaaatttgacctagatggtgacaaccccgaggagatagcaacaattatggtgaacaatgactttattctagcaatagagagagagtcgtttgtggatcaagtgcgagaaattattgaaaaagctgatgaaatgctcagtgaggatgtcagtgtggaaccagagggtgatcagggattggagagtctacaaggaaaggatgactatggcttttcaggttctcagaaattggaaggagagttcaaacaaccaattcctgcgtcttccatgccacagcaaataggcattcctaccagttctttaactcaagttgttcattctgcgggaaggcggtttatagtgagtcctgtgccagaaagccgattacgagaatcaaaagttttccccagtgaaataacagatacagttgctgcctctacagctcagagccctggaatgaacttgtctcactctgcatcatcccttagtctacaacaggccttttctgaacttagacgtgcccaaatgacagaaggacccaacacagcacctccaaactttagtcatacaggaccaacatttccagtagtacctcctttcttaagtagcattgctggagtcccaaccacagcagcagccacagcaccagtccctgcaacaagcagccctcctaatgacatttccacatcagtaattcagtctgaggttacagtgcccactgaagaggggattgctggagttgccaccagcacaggtgtggtaacttcaggtggtctccccataccacctgtgtctgaatcaccagtactttccagcgtagtttcaagtatcacaatacctgcagttgtctcaatatctactacatccccgtcacttcaagtccccacatccacatctgagatcgttgtttctagtacagcactgtatccttcagtaacagtttcagcaacttcagcctctgcagggggcagtactgctaccccaggtcctaagcctccagctgtagtatctcagcaggcagcaggcagcactactgtgggagccacattaacatcagtttctaccaccacttcattcccaagcacagcttcacagctgtgcattcagcttagcagcagtacttctactcctactttagctgaaaccgtggtagttagcgcacactcactagataagacatctcatagcagtacaactggattggctttctccctctctgcaccatcttcctcttcctctcctggagcaggagtgtctagttatatttctcagcctggtgggctgcatcctttggtcattccatcagtgatagcttctactcctattcttccccaagcagcaggacctacttctacacctttattaccccaagtacctagtatcccacccttggtacagcctgttgccaatgtgcctgctgtacagcagacactaattcatagtcagcctcaaccagctttgcttcccaaccagccccatactcattgtcctgaagtagattctgatacacaacccaaagctcctggaattgatgacataaagactctagaagaaaagctgcggtctctgttcagtgaacacagctcatctggagctcagcatgcctctgtctcactggagacctcactagtcatagagagcactgtcacaccaggcatcccaactactgctgttgcaccaagcaaactcctgacttctaccacaagtacttgcttaccaccaaccaatttaccactaggaacagttgctttgccagttacaccagtggtcacacctgggcaagtttctaccccagtcagcactactacatcaggagtgaaacctggaactgctccctccaagccacctctaactaaggctccggtgctgccagtgggtactgaacttccagcaggtactctacccagcgagcagctgccaccttttccaggaccttctctaacccagtcccagcaacctctagaggatcttgatgctcaattgagaagaacacttagtccagagatgatcacagtgacttctgcggttggtcctgtgtccatggcggctccaacagcaatcacagaagcaggaacacagcctcagaaggtttctcaagtcaaagaaggccctgtcctagcaactagttcaggagctggtgtttttaagatgggacgatttcaggtttctgttgcagcagacggtgcccagaaagagggtaaaaataagtcagaagatgcaaagtctgttcattttgaatccagcacctcagagtcctcagtgctatcaagtagtagtccagagagtaccttggtgaaaccagagccgaatggcataaccatccctggtatctcttcagatgtgccagagagtgcccacaaaactactgcctcagaggcaaagtcagacactgggcagcctaccaaggttggacgttttcaggtgacaactacagcaaacaaagtgggtcgtttctctgtatcaaaaactgaggacaagatcactgacacaaagaaagaaggaccagtggcatctcctccttttatggatttggaacaagctgttcttcctgctgtgataccaaagaaagagaagcctgaactgtcagagccttcacatctaaatgggccgtcttctgacccggaggccgcttttttaagtagggatgtggatgatggttccggtagtccacactcgccccatcagctgagctcaaagagccttcctagccagaatctaagtcaaagccttagtaattcatttaactcctcttacatgagtagcgacaatgagtcagatatcgaagatgaagacttaaagttagagctgcgacgactacgagataaacatctcaaagagattcaggacctgcagagtcgccagaagcatgaaattgaatctttgtataccaaactgggcaaggtgccccctgctgttattattcccccagctgctcccctttcagggagaagacgacgacccactaaaagcaaaggcagcaaatctagtcgaagcagttccttggggaataaaagcccccagctttcaggtaacctgtctggtcagagtgcagcttcagtcttgcacccccagcagaccctccaccctcctggcaacatcccagagtccgggcagaatcagctgttacagccccttaagccatctccctccagtgacaacctctattcagccttcaccagtgatggtgccatttcagtaccaagcctttctgctccaggtcaaggaaccagcagcacaaacactgttggggcaacagtgaacagccaagccgcccaagctcagcctcctgccatgacgtccagcaggaagggcacattcacagatgacttgcacaagttggtagacaattgggcccgagatgccatgaatctctcaggcaggagaggaagcaaagggcacatgaattacgagggccctggaatggcaaggaagttctctgcacctgggcaactgtgcatctccatgacctcgaacctgggtggctctgcccccatctctgcagcatcagctacctctctaggtcacttcaccaagtctatgtgccccccacagcagtatggctttccagctaccccatttggcgctcaatggagtgggacgggtggcccagcaccacagccacttggccagttccaacctgtgggaactgcctccttgcagaatttcaacatcagcaatttgcagaaatccatcagcaaccccccaggctccaacctgcggaccacttagtaatgaactagtccgtaacttgaaagtatttcgatttcttggctttatatatcttgtggaaaggacgatcagttgctgtgcgccttatccgt

SEQ ID NO: 1981 - DNA, 7250 bp, Homo sapiens
  source 1..7250: mol_type = genomic DNA
accgccaccatgtctggcggcgccgcagagaagcagagcagcactcccggttccctgttcctctcgccgccggctcctgcccccaagaatggctccagctccgattcctccgtgggggagaaactgggagccgcggccgccgacgctgtgaccggcaggaccgaggagtacaggcgccgccgccacactatggacaaggacagccgtggggcggccgcgaccactaccaccactgagcaccgcttcttccgccggagcgtcatctgtgactccaatgccactgcactggagcttcccggccttcctctttccctgccccagcccagcatccccgcggctgtcccgcagagtgctccaccggagccccaccgggaagagaccgtgaccgccaccgccacttcccaggtagcccagcagcctccagccgctgccgcccctggggaacaggccgtcgcgggccctgccccctcgactgtccccagcagtaccagcaaagaccgcccagtgtcccagcctagccttgtggggagcaaagaggagccgccgccggcgagaagtggcagcggcggcggcagcgccaaggagccacaggaggaacggagccagcagcaggatgatatcgaagagctggagaccaaggccgtgggaatgtctaacgatggccgctttctcaagtttgacatcgaaatcggcagaggctcctttaagacggtctacaaaggtctggacactgaaaccaccgtggaagtcgcctggtgtgaactgcaggatcgaaaattaacaaagtctgagaggcagagatttaaagaagaagctgaaatgttaaaaggtcttcagcatcccaatattgttagattttatgattcctgggaatccacagtaaaaggaaagaagtgcattgttttggtgactgaacttatgacgtctggaacacttaaaacgtatctgaaaaggtttaaagtgatgaagatcaaagttctaagaagctggtgccgtcagatccttaaaggtcttcagtttcttcatactcgaactccacctatcattcaccgcgatcttaaatgtgacaacatctttatcaccggccctactggctcagtcaagattggagacctcggtctggcaaccctgaagcgggcttcttttgccaagagtgtgataggtaccccagagttcatggcccctgagatgtatgaggagaaatatgatgaatccgttgacgtttatgcttttgggatgtgcatgcttgagatggctacatctgaatatccttactcggagtgccaaaatgctgcacagatctaccgtcgcgtgaccagtggggtgaagccagccagttttgacaaagtagcaattcctgaagtgaaggaaattattgaaggatgcatacgacaaaacaaagatgaaagatattccatcaaagaccttttgaaccatgccttcttccaagaggaaacaggagtacgggtagaattagcagaagaagatgatggagaaaaaatagccataaaattatggctacgtattgaagatattaagaaattaaagggaaaatacaaagataatgaagctattgagttttcttttgatttagagagagatgtcccagaagatgttgcacaagaaatggtagagtctgggtatgtctgtgaaggtgatcacaagaccatggctaaagctatcaaagacagagtatcattaattaagaggaaacgagagcagcggcagttggtacgggaggagcaagaaaaaaaaaagcaggaagagagcagtctcaaacagcaggtagaacaatccagtgcttcccagacaggaatcaagcagctcccttctgctagcaccggcatacctactgcttctaccacttcagcttcagtttctacacaagtagaacctgaagaacctgaggcagatcaacatcaacaactacagtaccagcaacccagtatatctgtgttatctgatgggacggttgacagtggtcagggatcctctgtcttcacagaatctcgagtgagcagccaacagacagtttcatatggttcccaacatgaacaggcacattctacaggcacagtcccagggcatataccttctactgtccaagcacagtctcagccccatggggtatatccaccctcaagtgtggcacaggggcagagccagggtcagccatcctcaagtagcttaacaggggtttcatcttcccaacccatacaacatcctcagcagcagcagggaatacagcagacagcccctcctcaacagacagtgcagtattcactttcacagacatcaacctccagtgaggccactactgcacagccagtgagtcagcctcaagctccacaagtcttgcctcaagtatcagctggaaaacagcttccagtttcccagccagtaccaactatccaaggcgaacctcagatcccagttgcgacacaaccctcggttgttccagtccactctggtgctcatttccttccagtgggacagccgctccctactcccttgctccctcagtaccctgtctctcagattcccatatcaactcctcatgtgtctacggctcagacaggtttctcatcccttcccatcacaatggcagctggcattactcagcctctgctcacgttggcttcatctgctacaacagctgcgatcccgggggtatcaactgtggttcctagtcagcttccaacccttctgcagcctgtgactcagctgccaagtcaggttcacccacagctcctacaaccagcagttcagtccatgggaataccagctaaccttggacaagctgctgaggttccactttcctctggagatgttctgtaccagggcttcccacctcgactgccaccacagtacccaggagattcaaatattgctccctcttccaacgtggcttctgtttgcatccattctacagtcctatcccctcccatgccgacagaagtactggctacacctgggtactttcccacagtggtgcagccttatgtggaatcaaatcttttagttcctatgggtggtgtaggaggacaggttcaagtgtcccagccaggagggagtttagcacaagcccccactacatcctcccagcaagcagttttggagagtactcagggagtctctcaggttgctcctgcagagccagttgcagtagcacagacccaagctacccagccgaccactttggcttcctctgtagacagtgcacattcagatgttgcttcaggtatgagtgatggcaatgagaacgtcccatcttccagtggaaggcatgaaggaagaactacaaaacggcattaccgaaaatctgtaaggagtcgctctcgacatgaaaaaacttcacgcccaaaattaagaattttgaatgtttcaaataaaggagaccgagtagtagaatgtcaattagagactcataataggaaaatggttacattcaaatttgacctagatggtgacaaccccgaggagatagcaacaattatggtgaacaatgactttattctagcaatagagagagagtcgtttgtggatcaagtgcgagaaattattgaaaaagctgatgaaatgctcagtgaggatgtcagtgtggaaccagagggtgatcagggattggagagtctacaaggaaaggatgactatggcttttcaggttctcagaaattggaaggagagttcaaacaaccaattcctgcgtcttccatgccacagcaaataggcattcctaccagttctttaactcaagttgttcattctgcgggaaggcggtttatagtgagtcctgtgccagaaagccgattacgagaatcaaaagttttccccagtgaaataacagatacagttgctgcctctacagctcagagccctggaatgaacttgtctcactctgcatcatcccttagtctacaacaggccttttctgaacttagacgtgcccaaatgacagaaggacccaacacagcacctccaaactttagtcatacaggaccaacatttccagtagtacctcctttcttaagtagcattgctggagtcccaaccacagcagcagccacagcaccagtccctgcaacaagcagccctcctaatgacatttccacatcagtaattcagtctgaggttacagtgcccactgaagaggggattgctggagttgccaccagcacaggtgtggtaacttcaggtggtctccccataccacctgtgtctgaatcaccagtactttccagcgtagtttcaagtatcacaatacctgcagttgtctcaatatctactacatccccgtcacttcaagtccccacatccacatctgagatcgttgtttctagtacagcactgtatccttcagtaacagtttcagcaacttcagcctctgcagggggcagtactgctaccccaggtcctaagcctccagctgtagtatctcagcaggcagcaggcagcactactgtgggagccacattaacatcagtttctaccaccacttcattcccaagcacagcttcacagctgtgcattcagcttagcagcagtacttctactcctactttagctgaaaccgtggtagttagcgcacactcactagataagacatctcatagcagtacaactggattggctttctccctctctgcaccatcttcctcttcctctcctggagcaggagtgtctagttatatttctcagcctggtgggctgcatcctttggtcattccatcagtgatagcttctactcctattcttccccaagcagcaggacctacttctacacctttattaccccaagtacctagtatcccacccttggtacagcctgttgccaatgtgcctgctgtacagcagacactaattcatagtcagcctcaaccagctttgcttcccaaccagccccatactcattgtcctgaagtagattctgatacacaacccaaagctcctggaattgatgacataaagactctagaagaaaagctgcggtctctgttcagtgaacacagctcatctggagctcagcatgcctctgtctcactggagacctcactagtcatagagagcactgtcacaccaggcatcccaactactgctgttgcaccaagcaaactcctgacttctaccacaagtacttgcttaccaccaaccaatttaccactaggaacagttgctttgccagttacaccagtggtcacacctgggcaagtttctaccccagtcagcactactacatcaggagtgaaacctggaactgctccctccaagccacctctaactaaggctccggtgctgccagtgggtactgaacttccagcaggtactctacccagcgagcagctgccaccttttccaggaccttctctaacccagtcccagcaacctctagaggatcttgatgctcaattgagaagaacacttagtccagagatgatcacagtgacttctgcggttggtcctgtgtccatggcggctccaacagcaatcacagaagcaggaacacagcctcagaagggtgtttctcaagtcaaagaaggccctgtcctagcaactagttcaggagctggtgtttttaagatgggacgatttcaggtttctgttgcagcagacggtgcccagaaagagggtaaaaataagtcagaagatgcaaagtctgttcattttgaatccagcacctcagagtcctcagtgctatcaagtagtagtccagagagtaccttggtgaaaccagagccgaatggcataaccatccctggtatctcttcagatgtgccagagagtgcccacaaaactactgcctcagaggcaaagtcagacactgggcagcctaccaaggttggacgttttcaggtgacaactacagcaaacaaagtgggtcgtttctctgtatcaaaaactgaggacaagatcactgacacaaagaaagaaggaccagtggcatctcctccttttatggatttggaacaagctgttcttcctgctgtgataccaaagaaagagaagcctgaactgtcagagccttcacatctaaatgggccgtcttctgacccggaggccgcttttttaagtagggatgtggatgatggttccggtagtccacactcgccccatcagctgagctcaaagagccttcctagccagaatctaagtcaaagccttagtaattcatttaactcctcttacatgagtagcgacaatgagtcagatatcgaagatgaagacttaaagttagagctgcgacgactacgagataaacatctcaaagagattcaggacctgcagagtcgccagaagcatgaaattgaatctttgtataccaaactgggcaaggtgccccctgctgttattattcccccagctgctcccctttcagggagaagacgacgacccactaaaagcaaaggcagcaaatctagtcgaagcagttccttggggaataaaagcccccagctttcaggtaacctgtctggtcagagtgcagcttcagtcttgcacccccagcagaccctccaccctcctggcaacatcccagagtccgggcagaatcagctgttacagccccttaagccatctccctccagtgacaacctctattcagccttcaccagtgatggtgccatttcagtaccaagcctttctgctccaggtcaaggaaccagcagcacaaacactgttggggcaacagtgaacagccaagccgcccaagctcagcctcctgccatgacgtccagcaggaagggcacattcacagatgacttgcacaagttggtagacaattgggcccgagatgccatgaatctctcaggcaggagaggaagcaaagggcacatgaattacgagggccctggaatggcaaggaagttctctgcacctgggcaactgtgcatctccatgacctcgaacctgggtggctctgcccccatctctgcagcatcagctacctctctaggtcacttcaccaagtctatgtgccccccacagcagtatggctttccagctaccccatttggcgctcaatggagtgggacgggtggcccagcaccacagccacttggccagttccaacctgtgggaactgcctccttgcagaatttcaacatcagcaatttgcagaaatccatcagcaaccccccaggctccaacctgcggaccacttagtaatgaactagtccgtaacttgaaagtatttcgatttcttggctttatatatcttgtggaaaggacgaaccaacgagaaagagttgctgctt

SEQ ID NO: 1982 - DNA, 8006 bp, Homo sapiens
  source 1..8006: mol_type = genomic DNA
accgccaccatgtctggcggcgccgcagagaagcagagcagcactcccggttccctgttcctctcgccgccggctcctgcccccaagaatggctccagctccgattcctccgtgggggagaaactgggagccgcggccgccgacgctgtgaccggcaggaccgaggagtacaggcgccgccgccacactatggacaaggacagccgtggggcggccgcgaccactaccaccactgagcaccgcttcttccgccggagcgtcatctgtgactccaatgccactgcactggagcttcccggccttcctctttccctgccccagcccagcatccccgcggctgtcccgcagagtgctccaccggagccccaccgggaagagaccgtgaccgccaccgccacttcccaggtagcccagcagcctccagccgctgccgcccctggggaacaggccgtcgcgggccctgccccctcgactgtccccagcagtaccagcaaagaccgcccagtgtcccagcctagccttgtggggagcaaagaggagccgccgccggcgagaagtggcagcggcggcggcagcgccaaggagccacaggaggaacggagccagcagcaggatgatatcgaagagctggagaccaaggccgtgggaatgtctaacgatggccgctttctcaagtttgacatcgaaatcggcagaggctcctttaagacggtctacaaaggtctggacactgaaaccaccgtggaagtcgcctggtgtgaactgcaggatcgaaaattaacaaagtctgagaggcagagatttaaagaagaagctgaaatgttaaaaggtcttcagcatcccaatattgttagattttatgattcctgggaatccacagtaaaaggaaagaagtgcattgttttggtgactgaacttatgacgtctggaacacttaaaacgtatctgaaaaggtttaaagtgatgaagatcaaagttctaagaagctggtgccgtcagatccttaaaggtcttcagtttcttcatactcgaactccacctatcattcaccgcgatcttaaatgtgacaacatctttatcaccggccctactggctcagtcaagattggagacctcggtctggcaaccctgaagcgggcttcttttgccaagagtgtgataggtaccccagagttcatggcccctgagatgtatgaggagaaatatgatgaatccgttgacgtttatgcttttgggatgtgcatgcttgagatggctacatctgaatatccttactcggagtgccaaaatgctgcacagatctaccgtcgcgtgaccagtggggtgaagccagccagttttgacaaagtagcaattcctgaagtgaaggaaattattgaaggatgcatacgacaaaacaaagatgaaagatattccatcaaagaccttttgaaccatgccttcttccaagaggaaacaggagtacgggtagaattagcagaagaagatgatggagaaaaaatagccataaaattatggctacgtattgaagatattaagaaattaaagggaaaatacaaagataatgaagctattgagttttcttttgatttagagagagatgtcccagaagatgttgcacaagaaatggtagagtctgggtatgtctgtgaaggtgatcacaagaccatggctaaagctatcaaagacagagtatcattaattaagaggaaacgagagcagcggcagttggtacgggaggagcaagaaaaaaaaaagcaggaagagagcagtctcaaacagcaggtagaacaatccagtgcttcccagacaggaatcaagcagctcccttctgctagcaccggcatacctactgcttctaccacttcagcttcagtttctacacaagtagaacctgaagaacctgaggcagatcaacatcaacaactacagtaccagcaacccagtatatctgtgttatctgatgggacggttgacagtggtcagggatcctctgtcttcacagaatctcgagtgagcagccaacagacagtttcatatggttcccaacatgaacaggcacattctacaggcacagtcccagggcatataccttctactgtccaagcacagtctcagccccatggggtatatccaccctcaagtgtgcctcgtcgtggccgtagcatgtcggtttgtgttcccatctttctgctgttgcctctgtgtcccgcatctctcccagtgctcttccaccccaccgccagtactgtctgcacctctttctccttccctcctccggactgccccgaggaaacttttgccgaaaagctttctaaagcattggagagtgtcctgcctatgcactctgcctctcagcgcaagcaccgacgctccagcctgccttccctctttgtcagtactcctcagtccatggcgcatccgtgtggggggaccccaacatacccagaatcacagatatttttcccaactattcatgaacgtccagtttctttttcaccacctcccacctgcccaccgaaagtagccatttcccagcggcgtaagagcacctccttcctggaagcccaaactcaccacttccaacccctgctgaggactgttggccaaagtcttcttccacctggtggcagcccaactaactggacaccagaggccgtagttatgttgggtactacagccagtagagtaactggagagtcatgtgagatacaggtccatcctatgtttgaaccatctcaagtttacagtgactatagacctggactagtacttccagaagaagctcactattttattcctcaggaagcagtgtatgtagctggggtacattaccaggcccgggtggcagaacagtatgagggcattccatacaactcatcagtactgtcaagtcctatgaaacagatacctgaacagaagccagtacaagggggccctacttcaagttctgtctttgaatttccatctggacaggctttcctggtaggacaccttcagaatctaagattagattctggattgggtccgggatctcccctctctagtatttctgcacctatcagtacagatgctacacgtttgaaatttcaccctgtctttgttcctcattctgcgcctgctgtgttaactcataacaatgagagcagaagcaactgtgtatttgaatttcatgttcacacaccaagctcctcttcaggagaaggaggtggaattttacctcagcgtgtttaccgaaatcggcaggttgcagtggacttgaatcaagaagaactgcctcctcaatcagttggattacatggctacttgcagcctgtgactgaagaaaagcataattaccatgccccagaattgaccgtttctgtggtagagcctatcggacagaactggccaataggaagcccagaatattccagtgattcctcacaaatcacttcttcagaccccagtgattttcagtcacctccccctacagggggagcagctgcaccttttggctctgacgtctcaatgccctttatccatctgcctcagacagtgttacaagaatccccacttttcttctgtttcccccaaggaaccacatctcagcaggtcttaactgcctcattttcttcaggaggatctgcacttcatccacaggcacaggggcagagccagggtcagccatcctcaagtagcttaacaggggtttcatcttcccaacccatacaacatcctcagcagcagcagggaatacagcagacagcccctcctcaacagacagtgcagtattcactttcacagacatcaacctccagtgaggccactactgcacagccagtgagtcagcctcaagctccacaagtcttgcctcaagtatcagctggaaaacagagtactcagggagtctctcaggttgctcctgcagagccagttgcagtagcacagacccaagctacccagccgaccactttggcttcctctgtagacagtgcacattcagatgttgcttcaggtatgagtgatggcaatgagaacgtcccatcttccagtggaaggcatgaaggaagaactacaaaacggcattaccgaaaatctgtaaggagtcgctctcgacatgaaaaaacttcacgcccaaaattaagaattttgaatgtttcaaataaaggagaccgagtagtagaatgtcaattagagactcataataggaaaatggttacattcaaatttgacctagatggtgacaaccccgaggagatagcaacaattatggtgaacaatgactttattctagcaatagagagagagtcgtttgtggatcaagtgcgagaaattattgaaaaagctgatgaaatgctcagtgaggatgtcagtgtggaaccagagggtgatcagggattggagagtctacaaggaaaggatgactatggcttttcaggttctcagaaattggaaggagagttcaaacaaccaattcctgcgtcttccatgccacagcaaataggcattcctaccagttctttaactcaagttgttcattctgcgggaaggcggtttatagtgagtcctgtgccagaaagccgattacgagaatcaaaagttttccccagtgaaataacagatacagttgctgcctctacagctcagagccctggaatgaacttgtctcactctgcatcatcccttagtctacaacaggccttttctgaacttagacgtgcccaaatgacagaaggacccaacacagcacctccaaactttagtcatacaggaccaacatttccagtagtacctcctttcttaagtagcattgctggagtcccaaccacagcagcagccacagcaccagtccctgcaacaagcagccctcctaatgacatttccacatcagtaattcagtctgaggttacagtgcccactgaagaggggattgctggagttgccaccagcacaggtgtggtaacttcaggtggtctccccataccacctgtgtctgaatcaccagtactttccagcgtagtttcaagtatcacaatacctgcagttgtctcaatatctactacatccccgtcacttcaagtccccacatccacatctgagatcgttgtttctagtacagcactgtatccttcagtaacagtttcagcaacttcagcctctgcagggggcagtactgctaccccaggtcctaagcctccagctgtagtatctcagcaggcagcaggcagcactactgtgggagccacattaacatcagtttctaccaccacttcattcccaagcacagcttcacagctgtgcattcagcttagcagcagtacttctactcctactttagctgaaaccgtggtagttagcgcacactcactagataagacatctcatagcagtacaactggattggctttctccctctctgcaccatcttcctcttcctctcctggagcaggagtgtctagttatatttctcagcctggtgggctgcatcctttggtcattccatcagtgatagcttctactcctattcttccccaagcagcaggacctacttctacacctttattaccccaagtacctagtatcccacccttggtacagcctgttgccaatgtgcctgctgtacagcagacactaattcatagtcagcctcaaccagctttgcttcccaaccagccccatactcattgtcctgaagtagattctgatacacaacccaaagctcctggaattgatgacataaagactctagaagaaaagctgcggtctctgttcagtgaacacagctcatctggagctcagcatgcctctgtctcactggagacctcactagtcatagagagcactgtcacaccaggcatcccaactactgctgttgcaccaagcaaactcctgacttctaccacaagtacttgcttaccaccaaccaatttaccactaggaacagttgctttgccagttacaccagtggtcacacctgggcaagtttctaccccagtcagcactactacatcaggagtgaaacctggaactgctccctccaagccacctctaactaaggctccggtgctgccagtgggtactgaacttccagcaggtactctacccagcgagcagctgccaccttttccaggaccttctctaacccagtcccagcaacctctagaggatcttgatgctcaattgagaagaacacttagtccagagatgatcacagtgacttctgcggttggtcctgtgtccatggcggctccaacagcaatcacagaagcaggaacacagcctcagaagggtgtttctcaagtcaaagaaggccctgtcctagcaactagttcaggagctggtgtttttaagatgggacgatttcaggtttctgttgcagcagacggtgcccagaaagagggtaaaaataagtcagaagatgcaaagtctgttcattttgaatccagcacctcagagtcctcagtgctatcaagtagtagtccagagagtaccttggtgaaaccagagccgaatggcataaccatccctggtatctcttcagatgtgccagagagtgcccacaaaactactgcctcagaggcaaagtcagacactgggcagcctaccaaggttggacgttttcaggtgacaactacagcaaacaaagtgggtcgtttctctgtatcaaaaactgaggacaagatcactgacacaaagaaagaaggaccagtggcatctcctccttttatggatttggaacaagctgttcttcctgctgtgataccaaagaaagagaagcctgaactgtcagagccttcacatctaaatgggccgtcttctgacccggaggccgcttttttaagtagggatgtggatgatggttccggtagtccacactcgccccatcagctgagctcaaagagccttcctagccagaatctaagtcaaagccttagtaattcatttaactcctcttacatgagtagcgacaatgagtcagatatcgaagatgaagacttaaagttagagctgcgacgactacgagataaacatctcaaagagattcaggacctgcagagtcgccagaagcatgaaattgaatctttgtataccaaactgggcaaggtgccccctgctgttattattcccccagctgctcccctttcagggagaagacgacgacccactaaaagcaaaggcagcaaatctagtcgaagcagttccttggggaataaaagcccccagctttcaggtaacctgtctggtcagagtgcagcttcagtcttgcacccccagcagaccctccaccctcctggcaacatcccagagtccgggcagaatcagctgttacagccccttaagccatctccctccagtgacaacctctattcagccttcaccagtgatggtgccatttcagtaccaagcctttctgctccaggtcaaggaaccagcagcacaaacactgttggggcaacagtgaacagccaagccgcccaagctcagcctcctgccatgacgtccagcaggaagggcacattcacagatgacttgcacaagttggtagacaattgggcccgagatgccatgaatctctcaggcaggagaggaagcaaagggcacatgaattacgagggccctggaatggcaaggaagttctctgcacctgggcaactgtgcatctccatgacctcgaacctgggtggctctgcccccatctctgcagcatcagctacctctctaggtcacttcaccaagtctatgtgccccccacagcagtatggctttccagctaccccatttggcgctcaatggagtgggacgggtggcccagcaccacagccacttggccagttccaacctgtgggaactgcctccttgcagaatttcaacatcagcaatttgcagaaatccatcagcaaccccccaggctccaacctgcggaccacttagtaatgaactagtccgtaacttgaaagtatttcgatttcttggctttatatatcttgtggaaaggacgaggctgatgtcagggatggtgtgac

SEQ ID NO: 1983 - DNA, 2207 bp, Homo sapiens
  source 1..2207: mol_type = genomic DNA
accgccaccatgccgaggacgatgatcccgccgggggagtgcacgtacgcgggccggaagcggaggaggcccctgcagaaacagaggcccgccgtgggggcagagaagtccaacccctccaagcgacaccgggaccgcctcaacgccgagttggaccacctggccagcctgctgccgttcccgcctgacatcatctccaagctggacaagctttctgtcctgcgcctcagtgtcagttacctccgggtgaagagcttcttccaagtcgtgcaggagcagagctcacggcagcctgcggccggcgccccctcgcccggagacagctgtcctcttgcagggtctgccgtgctggagggaaggctgctgttggagtctcttaatggctttgctctggtcgtgagtgcagaagggacgatattttatgcatcagcaacgatcgtggactatctgggcttccatcagacggatgtaatgcaccagaacatttatgactacatccacgtggacgaccgccaggacttctgccggcagctccactgggccatggaccctccccaggtggtgtttgggcagcccccgcccttggagacaggagatgatgctatcctggggaggctgctcagggcccaggagtggggcacaggcacgcccaccgagtactcggccttcctgacccgctgcttcatctgccgtgtgcgctgcctgctggacagcacctcgggcttcctgacgatgcagtttcaaggaaaactaaaattcctgtttggacagaagaagaaggcgccgtcaggagccatgctcccgccgcggctgtcgctgttctgcattgcggcacccgttctcctcccctccgcagcggagatgaaaatgaggagcgcgctcctgagggcaaaacccagagcagacaccgcagccaccgcggatgcaaaagtaaaagccaccaccagtctgtgcgaatcggaactgcatggaaaacccaattactcagcaggaaggagcagcagagagagcggcgttttggtgctcagggaacagactgacgctggccgatgggcacaggttcccgccagggccccatgcctgtgcctccggggtggccctgaccttgtccttgaccccaaggggggctcaggggacagggaggaggagcagcacaggatgctgagcagggcctctggagtgacagggcggagggagactccaggacccacaaagcccctgccctggacagcgggaaagcacagtgaggatggtgccaggccgaggctgcagcccagcaagaatgacccgccctccctgcgccccatgccccgcggctcctgcctgccctgcccgtgtgtccagggcactttcaggaactcgcccatctctcacccgccgagcccgtcccccagtgcctactccagccggaccagcagacccatgcgggatgtcggtgaggaccaggtgcaccctcccctctgccactttccccagaggagcctgcagcaccagctccctcagcctggagctcagcgttttgccacgaggggctatcccatggaggacatgaagctgcaaggtgtaccgatgcctccgggggacctgtgtggtccgacgctgctgctagatgtgtccatcaagatggagaaggactctgggtgtgagggtgctgcagacggctgtgtgcccagccaggtgtggctgggggccagtgacaggagccacccagccaccttccctaccaggatgcacctgaaaacagagccagactctcggcaacaggtgtacatctcgcacctggggcacggcgtgcggggggctcagccccatgggagggccactgctgggcgcagcagggagctgacccctttccaccctgcacactgtgcctgcctggagcccacagacggccttccccagtcggagcctccccaccagctctgtgcacggggccgaggtgaacagtcctgcacctgcagagctgctgaggccgcccctgtggtcaagcgggagcccttggactcaccccagtgggctactcacagccagggaatggtgcccgggatgttgcccaaaagtgccttggccacgctggtcccgccccaagcttcggggtgcacattcctgccatagtaatgaactagtccgtaacttgaaagtatttcgatttcttggctttatatatcttgtggaaaggacgactcaaactactactcaacgtcacc

SEQ ID NO: 1984 - DNA, 2261 bp, Homo sapiens
  source 1..2261: mol_type = genomic DNA
accgccaccatgccgaggacgatgatcccgccgggggagtgcacgtacgcgggccggaagcggaggaggcccctgcagaaacagaggcccgccgtgggggcagagaagtccaacccctccaagcgacaccgggaccgcctcaacgccgagttggaccacctggccagcctgctgccgttcccgcctgacatcatctccaagctggacaagctttctgtcctgcgcctcagtgtcagttacctccgggtgaagagcttcttccaagtcgtgcaggagcagagctcacggcagcctgcggccggcgccccctcgcccggagacagctgtcctcttgcagggtctgccgtgctggagggaaggctgctgttggagtctcttaatggctttgctctggtcgtgagtgcagaagggacgatattttatgcatcagcaacgatcgtggactatctgggcttccatcagacggatgtaatgcaccagaacatttatgactacatccacgtggacgaccgccaggacttctgccggcagctccactgggccatggaccctccccaggtggtgtttgggcagcccccgcccttggagacaggagatgatgctatcctggggaggctgctcagggcccaggagtggggcacaggcacgcccaccgagtactcggccttcctgacccgctgcttcatctgccgtgtgcgctgcctgctggacagcacctcgggcttcctggcccgggggtcacaggcttggcagctgcggctctgctgtcccgagccactcatgacgatgcagtttcaaggaaaactaaaattcctgtttggacagaagaagaaggcgccgtcaggagccatgctcccgccgcggctgtcgctgttctgcattgcggcacccgttctcctcccctccgcagcggagatgaaaatgaggagcgcgctcctgagggcaaaacccagagcagacaccgcagccaccgcggatgcaaaagtaaaagccaccaccagtctgtgcgaatcggaactgcatggaaaacccaattactcagcaggaaggagcagcagagagagcggcgttttggtgctcagggaacagactgacgctggccgatgggcacaggttcccgccagggccccatgcctgtgcctccggggtggccctgaccttgtccttgaccccaaggggggctcaggggacagggaggaggagcagcacaggatgctgagcagggcctctggagtgacagggcggagggagactccaggacccacaaagcccctgccctggacagcgggaaagcacagtgaggatggtgccaggccgaggctgcagcccagcaagaatgacccgccctccctgcgccccatgccccgcggctcctgcctgccctgcccgtgtgtccagggcactttcaggaactcgcccatctctcacccgccgagcccgtcccccagtgcctactccagccggaccagcagacccatgcgggatgtcggtgaggaccaggtgcaccctcccctctgccactttccccagaggagcctgcagcaccagctccctcagcctggagctcagcgttttgccacgaggggctatcccatggaggacatgaagctgcaaggtgtaccgatgcctccgggggacctgtgtggtccgacgctgctgctagatgtgtccatcaagatggagaaggactctgggtgtgagggtgctgcagacggctgtgtgcccagccaggtgtggctgggggccagtgacaggagccacccagccaccttccctaccaggatgcacctgaaaacagagccagactctcggcaacaggtgtacatctcgcacctggggcacggcgtgcggggggctcagccccatgggagggccactgctgggcgcagcagggagctgacccctttccaccctgcacactgtgcctgcctggagcccacagacggccttccccagtcggagcctccccaccagctctgtgcacggggccgaggtgaacagtcctgcacctgcagagctgctgaggccgcccctgtggtcaagcgggagcccttggactcaccccagtgggctactcacagccagggaatggtgcccgggatgttgcccaaaagtgccttggccacgctggtcccgccccaagcttcggggtgcacattcctgccatagtaatgaactagtccgtaacttgaaagtatttcgatttcttggctttatatatcttgtggaaaggacgattaggccaaacgcttcccgtaaca

SEQ ID NO: 1985 - DNA, 1892 bp, Homo sapiens
  source 1..1892: mol_type = genomic DNA
accgccaccatgaccagcccctccccacgcatccagataatctccaccgactctgctgtagcctcacctcagcgcattcagattgtcacagaccagcagacaggacagaaaatccagatagtcaccgcagtggacgcctccggatcccccaaacagcagttcatcctgaccagcccagatggagctggaactgggaaggtgatcctggcttccccagagacatccagcgccaagcaactcatattcaccacctcagacaacctcgtccctggcaggatccagattgtcacggattctgcctctgtggagcgtttactggggaagacggacgtccagcggccccaggtggtagagtactgtgtggtctgtggcgacaaagcctccggccgtcactatggggctgtcagttgtgaaggttgcaaaggtttcttcaaaaggagtgtgaggaaaaatttgacctacagctgccggagcaaccaagactgcatcatcaataaacatcaccggaaccgctgtcagttttgccggctgaaaaaatgcttagagatgggcatgaaaatggaatctgtgcagagtgaacggaagcccttcgatgtgcaacgggagaaaccaagcaattgtgctgcttcaactgagaaaatctatatccggaaagacctgagaagtcccctgatagctactcccacgtttgtggcagacaaagatggagcaagacaaacaggtcttcttgatccagggatgcttgtgaacatccagcagcctttgatacgtgaggatggtacagttctcctggccacggattctaaggctgaaacaagccagggagctctgggcacactggcaaatgtagtgacctcccttgccaacctaagtgaatctttgaacaacggtgacacttcagaaatccagccagaggaccagtctgcaagtgagataactcgggcatttgataccttagctaaagcacttaataccacagacagctcctcttctccaagcttggcagatgggatagacaccagtggaggagggagcatccacgtcatcagcagagaccagtcgacacccatcattgaggttgaaggccccctcctttcagacacacacgtcacatttaagctaacaatgcccagtccaatgccagagtacctcaacgtgcactacatctgtgagtctgcatcccgtctgcttttcctctcaatgcactgggctcggtcaatcccagcctttcaggcacttgggcaggactgcaacaccagccttgtgcgggcctgctggaatgagctcttcaccctcggcctggcccagtgtgcccaggtcatgagtctctccaccatcctggctgccattgtcaaccacctgcagaacagcatccaggaagataaactttctggtgaccggataaagcaagtcatggagcacatctggaagctgcaggagttctgtaacagcatggcgaagctggatatagatggctatgagtatgcataccttaaagctatagttctctttagccccgatcatccaggtttgaccagcacaagccagattgaaaaattccaagaaaaggcacagatggagttgcaggactatgttcagaaaacctactcagaagacacctaccgattggcccggatcctcgttcgcctgccggcactcaggctgatgagctccaacataacagaagaacttttttttactggtctcattggcaatgtttcgatagacagcataatcccctacatcctcaagatggagacagcagagtataatggccagatcaccggagccagtctatagtaatgaactagtccgtaacttgaaagtatttcgatttcttggctttatatatcttgtggaaaggacgacgtgggtacaagtccgaacaggaa

SEQ ID NO: 1986 - DNA, 1913 bp, Homo sapiens
  source 1..1913: mol_type = genomic DNA
accgccaccatggcaaccatagaagaaattgcacatcaaattattgaacaacagatgggagagattgttacagagcagcaaactgggcagaaaatccagattgtgacagcacttgatcataatacccaaggcaagcagttcattctgacaaatcacgacggctctactccaagcaaagtcattctggccaggcaagattccactccgggaaaagttttccttacaactccagatgcagcaggtgtcaaccagttattttttaccactcctgatctgtctgcacaacacctgcagctcctaacagataattctccagaccaaggaccaaataaggtttttgatctttgcgtagtatgtggagacaaagcatcaggacgtcattatggagcagtaacttgtgaaggctgcaaaggattttttaaaagaagcatccgaaaaaatttagtatattcatgtcgaggatcaaaggattgtattattaataagcaccaccgaaaccgctgtcaatactgcaggttacagagatgtattgcgtttggaatgaagcaagactctgtccaatgtgaaagaaaacccattgaagtatcacgagaaaaatcttccaactgtgccgcttcaacagaaaaaatctatatccgaaaggaccttcgtagcccattaactgcaactccaacttttgtaacagatagtgaaagtacaaggtcaacaggactgttagattcaggaatgttcatgaatattcatccatctggagtaaaaactgagtcagctgtgctgatgacatcagataaggctgaatcatgtcagggagatttaagtacattggccaatgtggttacatcattagcgaatcttggaaaaactaaagatctttctcaaaatagtaatgaaatgtctatgattgaaagcttaagcaatgatgatacctctttgtgtgaatttcaagaaatgcagaccaacggtgatgtttcaagggcatttgacactcttgcaaaagcattgaatcctggagagagcacagcctgccagagctcagtagcgggcatggaaggaagtgtacacctaatcactggagattcaagcataaattacaccgaaaaagaggggccacttctcagcgattcacatgtagctttcaggctcaccatgccttctcctatgcctgagtacctgaatgtgcactacattggggagtctgcctccagactgctgttcttatcaatgcactgggcactttcgattccttctttccaggctctagggcaagaaaacagcatatcactggtgaaagcttactggaatgaactttttactcttggtcttgcccagtgctggcaagtgatgaatgtagcaactatattagcaacatttgtcaattgtcttcacaatagtcttcaacaagataaaatgtcaacagaaagaagaaaattattgatggagcacatcttcaaactacaggagttttgtaacagcatggttaaactctgcattgatggatacgaatatgcctacctgaaggcaatagtactcttcagtccagatcatccaagcctagaaaacatggaacagatagagaaatttcaggaaaaggcttatgtggaattccaagattatataaccaaaacatatccagatgacacctacaggttatccagactactactcagattgccagctttaagactgatgaatgctaccatcactgaagaattgtttttcaaaggtctcattggcaatatacgaattgacagtgttatcccacatattttgaaaatggagcctgcagattataactctcaaataattggtcacagcatttagtaatgaactagtccgtaacttgaaagtatttcgatttcttggctttatatatcttgtggaaaggacgatctggtcagaaagggtcacatccg

SEQ ID NO: 1987 - DNA, 1553 bp, Homo sapiens
  source 1..1553: mol_type = genomic DNA
accgccaccatggcaaccatagaagaaattgcacatcaaattattgaacaacagatgggagagattgttacagagcagcaaactgggcagaaaatccagattgtgacagcacttgatcataatacccaaggcaagcagttcattctgacaaatcacgacggctctactccaagcaaagtcattctggccaggcaagattccactccgggaaaagttttccttacaactccagatgcagcaggtgtcaaccagttattttttaccactcctgatctgtctgcacaacacctgcagctcctaacagataattctccagaccaaggaccaaataaggtttttgatctttgcgtagtatgtggagacaaagcatcaggacgtcattatggagcagtaacttgtgaaggctgcaaaggattttttaaaagaagcatccgaaaaaatttagtatattcatgtcgaggatcaaaggattgtattattaataagcaccaccgaaaccgctgtcaatactgcaggttacagagatgtattgcgtttggaatgaagcaagactctgtccaatgtgaaagaaaacccattgaagtatcacgagaaaaatcttccaactgtgccgcttcaacagaaaaaatctatatccgaaaggaccttcgtagcccattaactgcaactccaacttttgtaacagatagtgaaagtacaaggtcaacaggactgttagattcaggaatgttcatgaatattcatccatctggagtaaaaactgagtcagctgtgctgatgacatcagataaggctgaatcatgtcagggagatttaagtacattggccaatgtggttacatcattagcgaatcttggaaaaactaaagatctttctcaaaatagtaatgaaatgtctatgattgaaagcttaagcaatgatgatacctctttgtgtgaatttcaagaaatgcagaccaacggtgatgtttcaagggcatttgacactcttgcaaaagcattgaatcctggagagagcacagcctgccagagctcagtagcgggcatggaaggaagtgtacacctaatcactggagattcaagcataaattacaccgaaaaagaggggccacttctcagcgattcacatgtagctttcaggctcaccatgccttctcctatgcctgagtacctgaatgtgcactacattggggagtctgcctccagactgctgttcttatcaatgcactgggcactttcgattccttctttccaggctctagggcaagaaaacagcatatcactggtgaaagcttactggaatgaactttttactcttggtcttgcccagtgctggcaagtgatgaatgtagcaactatattagcaacatttgtcaattgtcttcacaatagtcttcaacaagatgccaaggtaattgcagccctcattcatttcacaagacgagcaatcactgatttatagtaatgaactagtccgtaacttgaaagtatttcgatttcttggctttatatatcttgtggaaaggacgacatgttgaacgtaccgttggtgaa

SEQ ID NO: 1988 - DNA, 2165 bp, Homo sapiens
  source 1..2165: mol_type = genomic DNA
accgccaccatggagcgggtgaacgacgcttcgtgcggcccgtctggctgctacacataccaggtgagcagacacagcacggagatgctgcacaacctgaaccagcagcgcaaaaacggcgggcgcttctgcgacgtgctcttgcgggtaggcgacgagagcttcccagcgcaccgcgccgtgctggccgcctgcagcgagtactttgagtcggtgttcagcgcccagttgggcgacggcggagctgcggacgggggtccggctgatgtagggggcgcgacggcagcaccaggcggcggggccgggggcagccgggagctggagatgcacactatcagctccaaggtatttggggacattctggacttcgcctacacttcccgcatcgtggtgcgcttggagagctttcccgaactcatgacggccgccaagttcctgctgatgaggtcggttatcgagatctgccaggaagtcatcaaacagtccaacgtacagatcctggtaccccctgcccgcgccgatataatgctctttcgcccccctgggacctcggacttgggcttccctttggacatgaccaacggggcagccttggcagccaacagcaatggcatcgccggcagcatgcagccagaggaggaggcagctcgggcggctggtgcagccattgcaggccaagcctctttgcctgtgttacctggggtggaccgcttgcccatggtggctggacccctatccccccaactgctgacttccccattccccagtgtggcatccagtgcccctcccctgactggcaagcgaggccggggccgcccaaggaaggccaacctgctggactcaatgtttgggtccccagggggcctgagggaggcaggcatccttccatgcggtctatgtggtaaggtgttcactgatgccaaccggctccggcagcacgaggcccagcacggtgtcaccagcctccagctgggctacatcgaccttcctcctccgaggctgggtgagaatgggctacccatctctgaagaccccgacggcccccgaaagaggagccggaccaggaagcaggtggcttgtgagatctgcggcaagatcttccgtgatgtgtatcatcttaaccggcacaagctgtcccactctggggagaagccctactcctgccctgtgtgtgggttgcggttcaagagaaaagaccgcatgtcctaccatgtgcggtcccatgatgggtccgtgggcaagccttacatctgccagagctgtgggaaaggcttctccaggcctgatcacttgaacggacatatcaagcaggtgcacacttctgagcggcctcacaagtgtcagacctgcaatgcttcttttgccacccgagaccgtctgcgctcccacctggcctgtcatgaagacaaggtgccctgccaggtgtgtgggaagtacttgcgggcagcatacatggcagaccacctgaagaagcacagcgaggggcccagcaacttctgcagtatctgtaaccgaggtttctcctctgcctcctacttaaaggtccatgttaaaacccaccacggtgttccccttccccaggtctccaggcaccaggagcccatcctgaatgggggagcagcgttccactgcgccaggacctatggcaacaaagaaggccagaaatgctcacatcaggatccgattgagagctctgactcctatggtgacctctcagatgccagcgacctgaagacgccagagaagcagagtgccaatggctctttctcctgcgacatggcagtccccaaaaacaaaatggagtctgatggggagaagaagtacccatgccctgaatgtgggagcttcttccgctctaagtcctacttgaacaaacacatccagaaggtgcatgtccgggctctcgggggccccctgggggacctgggccctgcccttggctcacctttctctcctcagcagaacatgtctctcctcgagtcctttgggtttcagattgttcagtcggcatttgcgtcatctttagtagatcctgaggttgaccagcagcccatggggcctgaagggaaatagtaatgaactagtccgtaacttgaaagtatttcgatttcttggctttatatatcttgtggaaaggacgacggttatgttctccaagatctgct

SEQ ID NO: 1989 - DNA, 2027 bp, Homo sapiens
  source 1..2027: mol_type = genomic DNA
accgccaccatggagcgggtgaacgacgcttcgtgcggcccgtctggctgctacacataccaggtgagcagacacagcacggagatgctgcacaacctgaaccagcagcgcaaaaacggcgggcgcttctgcgacgtgctcttgcgggtaggcgacgagagcttcccagcgcaccgcgccgtgctggccgcctgcagcgagtactttgagtcggtgttcagcgcccagttgggcgacggcggagctgcggacgggggtccggctgatgtagggggcgcgacggcagcaccaggcggcggggccgggggcagccgggagctggagatgcacactatcagctccaaggtatttggggacattctggacttcgcctacacttcccgcatcgtggtgcgcttggagagctttcccgaactcatgacggccgccaagttcctgctgatgaggtcggttatcgagatctgccaggaagtcatcaaacagtccaacgtacagatcctggtaccccctgcccgcgccgatataatgctctttcgcccccctgggacctcggacttgggcttccctttggacatgaccaacggggcagccttggcagccaacagcaatggcatcgccggcagcatgcagccagaggaggaggcagctcgggcggctggtgcagccattgcaggccaagcctctttgcctgtgttacctggggtggaccgcttgcccatggtggctggacccctatccccccaactgctgacttccccattccccagtgtggcatccagtgcccctcccctgactggcaagcgaggccggggccgcccaaggaaggccaacctgctggactcaatgtttgggtccccagggggcctgagggaggcaggcatccttccatgcggtctatgtggtaaggtgttcactgatgccaaccggctccggcagcacgaggcccagcacggtgtcaccagcctccagctgggctacatcgaccttcctcctccgaggctgggtgagaatgggctacccatctctgaagaccccgacggcccccgaaagaggagccggaccaggaagcaggtggcttgtgagatctgcggcaagatcttccgtgatgtgtatcatcttaaccggcacaagctgtcccactctggggagaagccctactcctgccctgtgtgtgggttgcggttcaagagaaaagaccgcatgtcctaccatgtgcggtcccatgatgggtccgtgggcaagccttacatctgccagagctgtgggaaaggcttctccaggcctgatcacttgaacggacatatcaagcaggtgcacacttctgagcggcctcacaagtgtcagacctgcaatgcttcttttgccacccgagaccgtctgcgctcccacctggcctgtcatgaagacaaggtgccctgccaggtgtgtgggaagtacttgcgggcagcatacatggcagaccacctgaagaagcacagcgaggggcccagcaacttctgcagtatctgtaaccgagaaggccagaaatgctcacatcaggatccgattgagagctctgactcctatggtgacctctcagatgccagcgacctgaagacgccagagaagcagagtgccaatggctctttctcctgcgacatggcagtccccaaaaacaaaatggagtctgatggggagaagaagtacccatgccctgaatgtgggagcttcttccgctctaagtcctacttgaacaaacacatccagaaggtgcatgtccgggctctcgggggccccctgggggacctgggccctgcccttggctcacctttctctcctcagcagaacatgtctctcctcgagtcctttgggtttcagattgttcagtcggcatttgcgtcatctttagtagatcctgaggttgaccagcagcccatggggcctgaagggaaatagtaatgaactagtccgtaacttgaaagtatttcgatttcttggctttatatatcttgtggaaaggacgagtatcgccaagcttaccacgtgtt

SEQ ID NO: 1990 - DNA, 1715 bp, Homo sapiens
  source 1..1715: mol_type = genomic DNA
accgccaccatggagcgggtgaacgacgcttcgtgcggcccgtctggctgctacacataccaggtgagcagacacagcacggagatgctgcacaacctgaaccagcagcgcaaaaacggcgggcgcttctgcgacgtgctcttgcgggtaggcgacgagagcttcccagcgcaccgcgccgtgctggccgcctgcagcgagtactttgagtcggtgttcagcgcccagttgggcgacggcggagctgcggacgggggtccggctgatgtagggggcgcgacggcagcaccaggcggcggggccgggggcagccgggagctggagatgcacactatcagctccaaggtatttggggacattctggacttcgcctacacttcccgcatcgtggtgcgcttggagagctttcccgaactcatgacggccgccaagttcctgctgatgaggtcggttatcgagatctgccaggaagtcatcaaacagtccaacgtacagatcctggtaccccctgcccgcgccgatataatgctctttcgcccccctgggacctcggacttgggcttccctttggacatgaccaacggggcagccttggcagccaacagcaatggcatcgccggcagcatgcagccagaggaggaggcagctcgggcggctggtgcagccattgcaggccaagcctctttgcctgtgttacctggggtggaccgcttgcccatggtggctggacccctatccccccaactgctgacttccccattccccagtgtggcatccagtgcccctcccctgactggcaagcgaggccggggccgcccaaggaaggccaacctgctggactcaatgtttgggtccccagggggcctgagggaggcaggcatccttccatgcggtctatgtggtaaggtgttcactgatgccaaccggctccggcagcacgaggcccagcacggtgtcaccagcctccagctgggctacatcgaccttcctcctccgaggctgggtgagaatgggctacccatctctgaagaccccgacggcccccgaaagaggagccggaccaggaagcaggtggcttgtgagatctgcggcaagatcttccgtgatgtgtatcatcttaaccggcacaagctgtcccactctggggagaagccctactcctgccctgtgtgtgggttgcggttcaagagaaaagaccgcatgtcctaccatgtgcggtcccatgatgggtccgtgggcaagccttacatctgccagagctgtgggaaaggcttctccaggcctgatcacttgaacggacatatcaagcaggtgcacacttctgagcggcctcacaagtgtcagacctgcaatgcttcttttgccacccgagaccgtctgcgctcccacctggcctgtcatgaagacaaggtgccctgccaggtgtgtgggaagtacttgcgggcagcatacatggcagaccacctgaagaagcacagcgaggggcccagcaacttctgcagtatctgtaaccgaggtctccaggcaccaggagcccatcctgaatgggggagcagcgttccactgcgccaggacctatggcaacaaagaaggccagaaatgctcacatcaggatccgattagtaatgaactagtccgtaacttgaaagtatttcgatttcttggctttatatatcttgtggaaaggacgagctgctagccaagtatatacgagg

SEQ ID NO: 1991 - DNA, 1868 bp, Homo sapiens
  source 1..1868: mol_type = genomic DNA
accgccaccatgccccagctcggcggcgggggcggcggcggcggcggcggcagcgggggaggcggcggctccagcgccggggcggccggcggaggggacgacctcggggcgaacgacgagctgatccccttccaggacgaggggggcgaggagcaggagccgagcagcgatagcgcctcggcgcagcgggacctagacgaggtcaagtcgtccctggtcaacgagtcggagaaccagagcagcagctcggactcggaggcggagaggcgcccgcagcccgtccgggacactttccagaagccgcgggactatttcgccgaagtgagaaggcctcaggacagcgcgttctttaaaggacccccgtaccctgggtaccccttcctgatgatcccggacctgagcagcccgtacctctccaacggacccctgtctcccggaggagcgcgcacctacctgcagatgaaatggcccctcctcgatgtcccctccagcgccacagtcaaggacacgaggtcaccatctccagcacacttgtctaataaagttcctgtcgttcagcacccgcatcacatgcatccgctgactcccctcatcacctacagcaatgaccacttctcccccggctcccctcccacccacctctccccagagatcgatccaaagacaggaatcccccggccccctcacccatccgagctgtcaccgtattacccactctctcccggagctgtcggacaaatcccccaccccctcggctggctcgtcccacagcaaggccagcccatgtactcccttcctcccggtggcttccggcacccttaccccgccctcgccatgaacgcctcgatgtccagcctggtctccagtcggttctctcctcacatggtggctcctgcccaccctggcctgcccacctcagggatcccccaccctgccatcgtctcccccatcgtcaagcaggaaccggcaccccccagcctgagccctgcagtgagcgtgaaatcaccagtcaccgtgaaaaaggaggaggaaaagaagccccacgtgaagaagcctctgaatgccttcatgttgtatatgaaggagatgagggccaaggtggtggctgagtgcaccctgaaggaaagtgcagccattaaccagatccttggaagaaagtggcacaacctgtctcgagaagaacaggccaagtactacgagctggcccggaaggagcggcagcttcactcgcagctctacccaacctggtcagcccgggacaactatggtaagaaaaagaagaggaagagagaaaagcagctgtcccagacacagtcacagcagcaagtccaggaggcagagggtgccctggcctccaagagcaagaagccatgtgttcagtacctgccccccgagaagccctgtgacagccctgcctcctcccacgggagcatgctggactccccggccactccctctgcagctttggcctcaccagctgcccctgctgccacccattcggagcaagcccagcccctctccctcaccaccaaaccagaaacccgggcccagctggctctccactctgccgccttcctgtcggctaaggctgcagcctcctcctctgggcagatgggcagccagcctcccctcctgtcccggcccctcccccttgggtccatgcccacagctctgctggcctctcccccgtccttccccgccacgctccatgcccaccaggccctcccggtgctacaggcccagcctctttccctggtcaccaagtctgcccactagtaatgaactagtccgtaacttgaaagtatttcgatttcttggctttatatatcttgtggaaaggacgattataacgtacgtctatgtgttcg

SEQ ID NO: 1992 - DNA, 1481 bp, Homo sapiens
  source 1..1481: mol_type = genomic DNA
accgccaccatgccgcagctgaacggcggtggaggggatgacctaggcgccaacgacgaactgatttccttcaaagacgagggcgaacaggaggagaagagctccgaaaactcctcggcagagagggatttagctgatgtcaaatcgtctctagtcaatgaatcagaaacgaatcaaaacagctcctccgattccgaggcggaaagacggcctccgcctcgctccgaaagtttccgagacaaatcccgggaaagtttggaagaagcggccaagaggcaagatggagggctctttaaggggccaccgtatcccggctaccccttcatcatgatccccgacctgacgagcccctacctccccaacggatcgctctcgcccaccgcccgaacctatctccagatgaaatggccactgcttgatgtccaggcagggagcctccagagtagacaagccctcaaggatgcccggtccccatcaccggcacacattgtctctaacaaagtgccagtggtgcagcaccctcaccatgtccaccccctcacgcctcttatcacgtacagcaatgaacacttcacgccgggaaacccacctccacacttaccagccgacgtagaccccaaaacaggaatcccacggcctccgcaccctccagatatatccccgtattacccactatcgcctggcaccgtaggacaaatcccccatccgctaggatggttagtaccacagcaaggtcaaccagtgtacccaatcacgacaggaggattcagacacccctaccccacagctctgaccgtcaatgcttccatgtccaggttccctccccatatggtcccaccacatcatacgctacacacgacgggcattccgcatccggccatagtcacaccaacagtcaaacaggaatcgtcccagagtgatgtcggctcactccatagttcaaagcatcaggactccaaaaaggaagaagaaaagaagaagccccacataaagaaacctcttaatgcattcatgttgtatatgaaggaaatgagagcaaaggtcgtagctgagtgcacgttgaaagaaagcgcggccatcaaccagatccttgggcggaggtggcatgcactgtccagagaagagcaagcgaaatactacgagctggcccggaaggagcgacagcttcatatgcaactgtaccccggctggtccgcgcgggataactatggaaagaagaagaagaggaaaagggacaagcagccgggagagaccaatgaacacagcgaatgtttcctaaatccttgcctttcacttcctccgattacagacctgagcgctcctaagaaatgccgagcgcgctttggccttgatcaacagaataactggtgcggcccttgcagtctttagtaatgaactagtccgtaacttgaaagtatttcgatttcttggctttatatatcttgtggaaaggacgagtgggcgcaagtagaagtgttggt

SEQ ID NO: 1993 - DNA, 1550 bp, Homo sapiens
  source 1..1550: mol_type = genomic DNA
accgccaccatgccgcagctgaacggcggtggaggggatgacctaggcgccaacgacgaactgatttccttcaaagacgagggcgaacaggaggagaagagctccgaaaactcctcggcagagagggatttagctgatgtcaaatcgtctctagtcaatgaatcagaaacgaatcaaaacagctcctccgattccgaggcggaaagacggcctccgcctcgctccgaaagtttccgagacaaatcccgggaaagtttggaagaagcggccaagaggcaagatggagggctctttaaggggccaccgtatcccggctaccccttcatcatgatccccgacctgacgagcccctacctccccaacggatcgctctcgcccaccgcccgaaccctccattttcagtccggcagcacacattactctgcgtacaaaacgattgaacaccagattgcagttcagtatctccagatgaaatggccactgcttgatgtccaggcagggagcctccagagtagacaagccctcaaggatgcccggtccccatcaccggcacacattgtctctaacaaagtgccagtggtgcagcaccctcaccatgtccaccccctcacgcctcttatcacgtacagcaatgaacacttcacgccgggaaacccacctccacacttaccagccgacgtagaccccaaaacaggaatcccacggcctccgcaccctccagatatatccccgtattacccactatcgcctggcaccgtaggacaaatcccccatccgctaggatggttagtaccacagcaaggtcaaccagtgtacccaatcacgacaggaggattcagacacccctaccccacagctctgaccgtcaatgcttccatgtccaggttccctccccatatggtcccaccacatcatacgctacacacgacgggcattccgcatccggccatagtcacaccaacagtcaaacaggaatcgtcccagagtgatgtcggctcactccatagttcaaagcatcaggactccaaaaaggaagaagaaaagaagaagccccacataaagaaacctcttaatgcattcatgttgtatatgaaggaaatgagagcaaaggtcgtagctgagtgcacgttgaaagaaagcgcggccatcaaccagatccttgggcggaggtggcatgcactgtccagagaagagcaagcgaaatactacgagctggcccggaaggagcgacagcttcatatgcaactgtaccccggctggtccgcgcgggataactatggaaagaagaagaagaggaaaagggacaagcagccgggagagaccaatgaacacagcgaatgtttcctaaatccttgcctttcacttcctccgattacaggagaaaaaaaaagtgcgttcgctacatacaaggtgaaggcagctgcctcagcccaccctcttcagatggaagcttactagtaatgaactagtccgtaacttgaaagtatttcgatttcttggctttatatatcttgtggaaaggacgatcgaaccagccggcttgcactaaa

SEQ ID NO: 1994 - DNA, 1328 bp, Homo sapiens
  source 1..1328: mol_type = genomic DNA
accgccaccatgccgcagctgaacggcggtggaggggatgacctaggcgccaacgacgaactgatttccttcaaagacgagggcgaacaggaggagaagagctccgaaaactcctcggcagagagggatttagctgatgtcaaatcgtctctagtcaatgaatcagaaacgaatcaaaacagctcctccgattccgaggcggaaagacggcctccgcctcgctccgaaagtttccgagacaaatcccgggaaagtttggaagaagcggccaagaggcaagatggagggctctttaaggggccaccgtatcccggctaccccttcatcatgatccccgacctgacgagcccctacctccccaacggatcgctctcgcccaccgcccgaacctctaacaaagtgccagtggtgcagcaccctcaccatgtccaccccctcacgcctcttatcacgtacagcaatgaacacttcacgccgggaaacccacctccacacttaccagccgacgtagaccccaaaacaggaatcccacggcctccgcaccctccagatatatccccgtattacccactatcgcctggcaccgtaggacaaatcccccatccgctaggatggttagtaccacagcaaggtcaaccagtgtacccaatcacgacaggaggattcagacacccctaccccacagctctgaccgtcaatgcttccatgtccaggttccctccccatatggtcccaccacatcatacgctacacacgacgggcattccgcatccggccatagtcacaccaacagtcaaacaggaatcgtcccagagtgatgtcggctcactccatagttcaaagcatcaggactccaaaaaggaagaagaaaagaagaagccccacataaagaaacctcttaatgcattcatgttgtatatgaaggaaatgagagcaaaggtcgtagctgagtgcacgttgaaagaaagcgcggccatcaaccagatccttgggcggaggtggcatgcactgtccagagaagagcaagcgaaatactacgagctggcccggaaggagcgacagcttcatatgcaactgtaccccggctggtccgcgcgggataactatggaaagaagaagaagaggaaaagggacaagcagccgggagagaccaatggagaaaaaaaaagtgcgttcgctacatacaaggtgaaggcagctgcctcagcccaccctcttcagatggaagcttactagtaatgaactagtccgtaacttgaaagtatttcgatttcttggctttatatatcttgtggaaaggacgagcaccagcaattgtgtaccgaatt

SEQ ID NO: 1995 - DNA, 1961 bp, Homo sapiens
  source 1..1961: mol_type = genomic DNA
accgccaccatgccgcagctgaacggcggtggaggggatgacctaggcgccaacgacgaactgatttccttcaaagacgagggcgaacaggaggagaagagctccgaaaactcctcggcagagagggatttagctgatgtcaaatcgtctctagtcaatgaatcagaaacgaatcaaaacagctcctccgattccgaggcggaaagacggcctccgcctcgctccgaaagtttccgagacaaatcccgggaaagtttggaagaagcggccaagaggcaagatggagggctctttaaggggccaccgtatcccggctaccccttcatcatgatccccgacctgacgagcccctacctccccaacggatcgctctcgcccaccgcccgaaccctccattttcagtccggcagcacacattactctgcgtacaaaacgattgaacaccagattgcagttcagtatctccagatgaaatggccactgcttgatgtccaggcagggagcctccagagtagacaagccctcaaggatgcccggtccccatcaccggcacacattgtctctaacaaagtgccagtggtgcagcaccctcaccatgtccaccccctcacgcctcttatcacgtacagcaatgaacacttcacgccgggaaacccacctccacacttaccagccgacgtagaccccaaaacaggaatcccacggcctccgcaccctccagatatatccccgtattacccactatcgcctggcaccgtaggacaaatcccccatccgctaggatggttagtaccacagcaaggtcaaccagtgtacccaatcacgacaggaggattcagacacccctaccccacagctctgaccgtcaatgcttccatgtccaggttccctccccatatggtcccaccacatcatacgctacacacgacgggcattccgcatccggccatagtcacaccaacagtcaaacaggaatcgtcccagagtgatgtcggctcactccatagttcaaagcatcaggactccaaaaaggaagaagaaaagaagaagccccacataaagaaacctcttaatgcattcatgttgtatatgaaggaaatgagagcaaaggtcgtagctgagtgcacgttgaaagaaagcgcggccatcaaccagatccttgggcggaggtggcatgcactgtccagagaagagcaagcgaaatactacgagctggcccggaaggagcgacagcttcatatgcaactgtaccccggctggtccgcgcgggataactatggaaagaagaagaagaggaaaagggacaagcagccgggagagaccaatgaacacagcgaatgtttcctaaatccttgcctttcacttcctccgattacagacctgagcgctcctaagaaatgccgagcgcgctttggccttgatcaacagaataactggtgcggcccttgcaggagaaaaaaaaagtgcgttcgctacatacaaggtgaaggcagctgcctcagcccaccctcttcagatggaagcttactagattcgcctcccccctccccgaacctgctaggctcccctccccgagacgccaagtcacagactgagcagacccagcctctgtcgctgtccctgaagcccgaccccctggcccacctgtccatgatgcctccgccacccgccctcctgctcgctgaggccacccacaaggcctccgccctctgtcccaacggggccctggacctgcccccagccgctttgcagcctgccgccccctcctcatcaattgcacagccgtcgacttcttccttacattcccacagctccctggccgggacccagccccagccgctgtcgctcgtcaccaagtctttagaatagtaatgaactagtccgtaacttgaaagtatttcgatttcttggctttatatatcttgtggaaaggacgatcatataccacgtagagaagtact

SEQ ID NO: 1996 - DNA, 1910 bp, Homo sapiens
  source 1..1910: mol_type = genomic DNA
accgccaccatgccgcagctgaacggcggtggaggggatgacctaggcgccaacgacgaactgatttccttcaaagacgagggcgaacaggaggagaagagctccgaaaactcctcggcagagagggatttagctgatgtcaaatcgtctctagtcaatgaatcagaaacgaatcaaaacagctcctccgattccgaggcggaaagacggcctccgcctcgctccgaaagtttccgagacaaatcccgggaaagtttggaagaagcggccaagaggcaagatggagggctctttaaggggccaccgtatcccggctaccccttcatcatgatccccgacctgacgagcccctacctccccaacggatcgctctcgcccaccgcccgaaccctccattttcagtccggcagcacacattactctgcgtacaaaacgattgaacaccagattgcagttcagtatctccagatgaaatggccactgcttgatgtccaggcagggagcctccagagtagacaagccctcaaggatgcccggtccccatcaccggcacacattgtctctaacaaagtgccagtggtgcagcaccctcaccatgtccaccccctcacgcctcttatcacgtacagcaatgaacacttcacgccgggaaacccacctccacacttaccagccgacgtagaccccaaaacaggaatcccacggcctccgcaccctccagatatatccccgtattacccactatcgcctggcaccgtaggacaaatcccccatccgctaggatggttagtaccacagcaaggtcaaccagtgtacccaatcacgacaggaggattcagacacccctaccccacagctctgaccgtcaatgcttccatgtccaggttccctccccatatggtcccaccacatcatacgctacacacgacgggcattccgcatccggccatagtcacaccaacagtcaaacaggaatcgtcccagagtgatgtcggctcactccatagttcaaagcatcaggactccaaaaaggaagaagaaaagaagaagccccacataaagaaacctcttaatgcattcatgttgtatatgaaggaaatgagagcaaaggtcgtagctgagtgcacgttgaaagaaagcgcggccatcaaccagatccttgggcggaggtggcatgcactgtccagagaagagcaagcgaaatactacgagctggcccggaaggagcgacagcttcatatgcaactgtaccccggctggtccgcgcgggataactatggaaagaagaagaagaggaaaagggacaagcagccgggagagaccaatgatgcaaatactccaaagaagtgtcgggcactgttcgggcttgaccgacagactttatggtgcaaaccgtgcaggagaaaaaaaaagtgcgttcgctacatacaaggtgaaggcagctgcctcagcccaccctcttcagatggaagcttactagattcgcctcccccctccccgaacctgctaggctcccctccccgagacgccaagtcacagactgagcagacccagcctctgtcgctgtccctgaagcccgaccccctggcccacctgtccatgatgcctccgccacccgccctcctgctcgctgaggccacccacaaggcctccgccctctgtcccaacggggccctggacctgcccccagccgctttgcagcctgccgccccctcctcatcaattgcacagccgtcgacttcttccttacattcccacagctccctggccgggacccagccccagccgctgtcgctcgtcaccaagtctttagaatagtaatgaactagtccgtaacttgaaagtatttcgatttcttggctttatatatcttgtggaaaggacgatgcccagaaggaacacactaatgg

SEQ ID NO: 1997 - DNA, 1892 bp, Homo sapiens
  source 1..1892: mol_type = genomic DNA
accgccaccatgccgcagctgaacggcggtggaggggatgacctaggcgccaacgacgaactgatttccttcaaagacgagggcgaacaggaggagaagagctccgaaaactcctcggcagagagggatttagctgatgtcaaatcgtctctagtcaatgaatcagaaacgaatcaaaacagctcctccgattccgaggcggaaagacggcctccgcctcgctccgaaagtttccgagacaaatcccgggaaagtttggaagaagcggccaagaggcaagatggagggctctttaaggggccaccgtatcccggctaccccttcatcatgatccccgacctgacgagcccctacctccccaacggatcgctctcgcccaccgcccgaacctatctccagatgaaatggccactgcttgatgtccaggcagggagcctccagagtagacaagccctcaaggatgcccggtccccatcaccggcacacattgtctctaacaaagtgccagtggtgcagcaccctcaccatgtccaccccctcacgcctcttatcacgtacagcaatgaacacttcacgccgggaaacccacctccacacttaccagccgacgtagaccccaaaacaggaatcccacggcctccgcaccctccagatatatccccgtattacccactatcgcctggcaccgtaggacaaatcccccatccgctaggatggttagtaccacagcaaggtcaaccagtgtacccaatcacgacaggaggattcagacacccctaccccacagctctgaccgtcaatgcttccatgtccaggttccctccccatatggtcccaccacatcatacgctacacacgacgggcattccgcatccggccatagtcacaccaacagtcaaacaggaatcgtcccagagtgatgtcggctcactccatagttcaaagcatcaggactccaaaaaggaagaagaaaagaagaagccccacataaagaaacctcttaatgcattcatgttgtatatgaaggaaatgagagcaaaggtcgtagctgagtgcacgttgaaagaaagcgcggccatcaaccagatccttgggcggaggtggcatgcactgtccagagaagagcaagcgaaatactacgagctggcccggaaggagcgacagcttcatatgcaactgtaccccggctggtccgcgcgggataactatggaaagaagaagaagaggaaaagggacaagcagccgggagagaccaatgaacacagcgaatgtttcctaaatccttgcctttcacttcctccgattacagacctgagcgctcctaagaaatgccgagcgcgctttggccttgatcaacagaataactggtgcggcccttgcaggagaaaaaaaaagtgcgttcgctacatacaaggtgaaggcagctgcctcagcccaccctcttcagatggaagcttactagattcgcctcccccctccccgaacctgctaggctcccctccccgagacgccaagtcacagactgagcagacccagcctctgtcgctgtccctgaagcccgaccccctggcccacctgtccatgatgcctccgccacccgccctcctgctcgctgaggccacccacaaggcctccgccctctgtcccaacggggccctggacctgcccccagccgctttgcagcctgccgccccctcctcatcaattgcacagccgtcgacttcttccttacattcccacagctccctggccgggacccagccccagccgctgtcgctcgtcaccaagtctttagaatagtaatgaactagtccgtaacttgaaagtatttcgatttcttggctttatatatcttgtggaaaggacgaacgcatgggttgatgcgcggtagc

SEQ ID NO: 1998 - DNA, 1571 bp, Homo sapiens
  source 1..1571: mol_type = genomic DNA
accgccaccatgccgcagctgaacggcggtggaggggatgacctaggcgccaacgacgaactgatttccttcaaagacgagggcgaacaggaggagaagagctccgaaaactcctcggcagagagggatttagctgatgtcaaatcgtctctagtcaatgaatcagaaacgaatcaaaacagctcctccgattccgaggcggaaagacggcctccgcctcgctccgaaagtttccgagacaaatcccgggaaagtttggaagaagcggccaagaggcaagatggagggctctttaaggggccaccgtatcccggctaccccttcatcatgatccccgacctgacgagcccctacctccccaacggatcgctctcgcccaccgcccgaacctatctccagatgaaatggccactgcttgatgtccaggcagggagcctccagagtagacaagccctcaaggatgcccggtccccatcaccggcacacattgtcagccccctcccttgctgcactcagggacatgactgtcagcacttctaccccccctcagacttcactgtcagcactcaagtcttcagggacatgaaaaggagccactccttacaaaaagttggggagccctggtgtattgagtctaacaaagtgccagtggtgcagcaccctcaccatgtccaccccctcacgcctcttatcacgtacagcaatgaacacttcacgccgggaaacccacctccacacttaccagccgacgtagaccccaaaacaggaatcccacggcctccgcaccctccagatatatccccgtattacccactatcgcctggcaccgtaggacaaatcccccatccgctaggatggttagtaccacagcaaggtcaaccagtgtacccaatcacgacaggaggattcagacacccctaccccacagctctgaccgtcaatgcttccatgtccaggttccctccccatatggtcccaccacatcatacgctacacacgacgggcattccgcatccggccatagtcacaccaacagtcaaacaggaatcgtcccagagtgatgtcggctcactccatagttcaaagcatcaggactccaaaaaggaagaagaaaagaagaagccccacataaagaaacctcttaatgcattcatgttgtatatgaaggaaatgagagcaaaggtcgtagctgagtgcacgttgaaagaaagcgcggccatcaaccagatccttgggcggaggtggcatgcactgtccagagaagagcaagcgaaatactacgagctggcccggaaggagcgacagcttcatatgcaactgtaccccggctggtccgcgcgggataactatggaaagaagaagaagaggaaaagggacaagcagccgggagagaccaatggagaaaaaaaaagtgcgttcgctacatacaaggtgaaggcagctgcctcagcccaccctcttcagatggaagcttactagtaatgaactagtccgtaacttgaaagtatttcgatttcttggctttatatatcttgtggaaaggacgagcggaacgacacaccaatccagtc

SEQ ID NO: 1999 - DNA, 1841 bp, Homo sapiens
  source 1..1841: mol_type = genomic DNA
accgccaccatgccgcagctgaacggcggtggaggggatgacctaggcgccaacgacgaactgatttccttcaaagacgagggcgaacaggaggagaagagctccgaaaactcctcggcagagagggatttagctgatgtcaaatcgtctctagtcaatgaatcagaaacgaatcaaaacagctcctccgattccgaggcggaaagacggcctccgcctcgctccgaaagtttccgagacaaatcccgggaaagtttggaagaagcggccaagaggcaagatggagggctctttaaggggccaccgtatcccggctaccccttcatcatgatccccgacctgacgagcccctacctccccaacggatcgctctcgcccaccgcccgaacctatctccagatgaaatggccactgcttgatgtccaggcagggagcctccagagtagacaagccctcaaggatgcccggtccccatcaccggcacacattgtctctaacaaagtgccagtggtgcagcaccctcaccatgtccaccccctcacgcctcttatcacgtacagcaatgaacacttcacgccgggaaacccacctccacacttaccagccgacgtagaccccaaaacaggaatcccacggcctccgcaccctccagatatatccccgtattacccactatcgcctggcaccgtaggacaaatcccccatccgctaggatggttagtaccacagcaaggtcaaccagtgtacccaatcacgacaggaggattcagacacccctaccccacagctctgaccgtcaatgcttccatgtccaggttccctccccatatggtcccaccacatcatacgctacacacgacgggcattccgcatccggccatagtcacaccaacagtcaaacaggaatcgtcccagagtgatgtcggctcactccatagttcaaagcatcaggactccaaaaaggaagaagaaaagaagaagccccacataaagaaacctcttaatgcattcatgttgtatatgaaggaaatgagagcaaaggtcgtagctgagtgcacgttgaaagaaagcgcggccatcaaccagatccttgggcggaggtggcatgcactgtccagagaagagcaagcgaaatactacgagctggcccggaaggagcgacagcttcatatgcaactgtaccccggctggtccgcgcgggataactatggaaagaagaagaagaggaaaagggacaagcagccgggagagaccaatgacctgagcgctcctaagaaatgccgagcgcgctttggccttgatcaacagaataactggtgcggcccttgcaggagaaaaaaaaagtgcgttcgctacatacaaggtgaaggcagctgcctcagcccaccctcttcagatggaagcttactagattcgcctcccccctccccgaacctgctaggctcccctccccgagacgccaagtcacagactgagcagacccagcctctgtcgctgtccctgaagcccgaccccctggcccacctgtccatgatgcctccgccacccgccctcctgctcgctgaggccacccacaaggcctccgccctctgtcccaacggggccctggacctgcccccagccgctttgcagcctgccgccccctcctcatcaattgcacagccgtcgacttcttccttacattcccacagctccctggccgggacccagccccagccgctgtcgctcgtcaccaagtctttagaatagtaatgaactagtccgtaacttgaaagtatttcgatttcttggctttatatatcttgtggaaaggacgagcatgtcgcttggaggcttctcgt

SEQ ID NO: 2000 - DNA, 1856 bp, Homo sapiens
  source 1..1856: mol_type = genomic DNA
accgccaccatgccgcagctgaacggcggtggaggggatgacctaggcgccaacgacgaactgatttccttcaaagacgagggcgaacaggaggagaagagctccgaaaactcctcggcagagagggatttagctgatgtcaaatcgtctctagtcaatgaatcagaaacgaatcaaaacagctcctccgattccgaggcggaaagacggcctccgcctcgctccgaaagtttccgagacaaatcccgggaaagtttggaagaagcggccaagaggcaagatggagggctctttaaggggccaccgtatcccggctaccccttcatcatgatccccgacctgacgagcccctacctccccaacggatcgctctcgcccaccgcccgaacctatctccagatgaaatggccactgcttgatgtccaggcagggagcctccagagtagacaagccctcaaggatgcccggtccccatcaccggcacacattgtctctaacaaagtgccagtggtgcagcaccctcaccatgtccaccccctcacgcctcttatcacgtacagcaatgaacacttcacgccgggaaacccacctccacacttaccagccgacgtagaccccaaaacaggaatcccacggcctccgcaccctccagatatatccccgtattacccactatcgcctggcaccgtaggacaaatcccccatccgctaggatggttagtaccacagcaaggtcaaccagtgtacccaatcacgacaggaggattcagacacccctaccccacagctctgaccgtcaatgcttccatgtccagctttctgtcttctaggttccctccccatatggtcccaccacatcatacgctacacacgacgggcattccgcatccggccatagtcacaccaacagtcaaacaggaatcgtcccagagtgatgtcggctcactccatagttcaaagcatcaggactccaaaaaggaagaagaaaagaagaagccccacataaagaaacctcttaatgcattcatgttgtatatgaaggaaatgagagcaaaggtcgtagctgagtgcacgttgaaagaaagcgcggccatcaaccagatccttgggcggaggtggcatgcactgtccagagaagagcaagcgaaatactacgagctggcccggaaggagcgacagcttcatatgcaactgtaccccggctggtccgcgcgggataactatggaaagaagaagaagaggaaaagggacaagcagccgggagagaccaatgatgcaaatactccaaagaagtgtcgggcactgttcgggcttgaccgacagactttatggtgcaaaccgtgcaggagaaaaaaaaagtgcgttcgctacatacaaggtgaaggcagctgcctcagcccaccctcttcagatggaagcttactagattcgcctcccccctccccgaacctgctaggctcccctccccgagacgccaagtcacagactgagcagacccagcctctgtcgctgtccctgaagcccgaccccctggcccacctgtccatgatgcctccgccacccgccctcctgctcgctgaggccacccacaaggcctccgccctctgtcccaacggggccctggacctgcccccagccgctttgcagcctgccgccccctcctcatcaattgcacagccgtcgacttcttccttacattcccacagctccctggccgggacccagccccagccgctgtcgctcgtcaccaagtctttagaatagtaatgaactagtccgtaacttgaaagtatttcgatttcttggctttatatatcttgtggaaaggacgagttgtaggtccgcgggcttgatag

SEQ ID NO: 2001 - DNA, 1469 bp, Homo sapiens
  source 1..1469: mol_type = genomic DNA
accgccaccatgccgcagctgaacggcggtggaggggatgacctaggcgccaacgacgaactgatttccttcaaagacgagggcgaacaggaggagaagagctccgaaaactcctcggcagagagggatttagctgatgtcaaatcgtctctagtcaatgaatcagaaacgaatcaaaacagctcctccgattccgaggcggaaagacggcctccgcctcgctccgaaagtttccgagacaaatcccgggaaagtttggaagaagcggccaagaggcaagatggagggctctttaaggggccaccgtatcccggctaccccttcatcatgatccccgacctgacgagcccctacctccccaacggatcgctctcgcccaccgcccgaacctatctccagatgaaatggccactgcttgatgtccaggcagggagcctccagagtagacaagccctcaaggatgcccggtccccatcaccggcacacattgtctctaacaaagtgccagtggtgcagcaccctcaccatgtccaccccctcacgcctcttatcacgtacagcaatgaacacttcacgccgggaaacccacctccacacttaccagccgacgtagaccccaaaacaggaatcccacggcctccgcaccctccagatatatccccgtattacccactatcgcctggcaccgtaggacaaatcccccatccgctaggatggcaaggtcaaccagtgtacccaatcacgacaggaggattcagacacccctaccccacagctctgaccgtcaatgcttccatgtccaggttccctccccatatggtcccaccacatcatacgctacacacgacgggcattccgcatccggccatagtcacaccaacagtcaaacaggaatcgtcccagagtgatgtcggctcactccatagttcaaagcatcaggactccaaaaaggaagaagaaaagaagaagccccacataaagaaacctcttaatgcattcatgttgtatatgaaggaaatgagagcaaaggtcgtagctgagtgcacgttgaaagaaagcgcggccatcaaccagatccttgggcggaggtggcatgcactgtccagagaagagcaagcgaaatactacgagctggcccggaaggagcgacagcttcatatgcaactgtaccccggctggtccgcgcgggataactatggaaagaagaagaagaggaaaagggacaagcagccgggagagaccaatgaacacagcgaatgtttcctaaatccttgcctttcacttcctccgattacagacctgagcgctcctaagaaatgccgagcgcgctttggccttgatcaacagaataactggtgcggcccttgcagtctttagtaatgaactagtccgtaacttgaaagtatttcgatttcttggctttatatatcttgtggaaaggacgaaccataaactccttctcaacggtg

SEQ ID NO: 2002 - DNA, 1532 bp, Homo sapiens
  source 1..1532: mol_type = genomic DNA
accgccaccatgccgcagctgaacggcggtggaggggatgacctaggcgccaacgacgaactgatttccttcaaagacgagggcgaacaggaggagaagagctccgaaaactcctcggcagagagggatttagctgatgtcaaatcgtctctagtcaatgaatcagaaacgaatcaaaacagctcctccgattccgaggcggaaagacggcctccgcctcgctccgaaagtttccgagacaaatcccgggaaagtttggaagaagcggccaagaggcaagatggagggctctttaaggggccaccgtatcccggctaccccttcatcatgatccccgacctgacgagcccctacctccccaacggatcgctctcgcccaccgcccgaacctatctccagatgaaatggccactgcttgatgtccaggcagggagcctccagagtagacaagccctcaaggatgcccggtccccatcaccggcacacattgtctctaacaaagtgccagtggtgcagcaccctcaccatgtccaccccctcacgcctcttatcacgtacagcaatgaacacttcacgccgggaaacccacctccacacttaccagccgacgtagaccccaaaacaggaatcccacggcctccgcaccctccagatatatccccgtattacccactatcgcctggcaccgtaggacaaatcccccatccgctaggatggttagtaccacagcaaggtcaaccagtgtacccaatcacgacaggaggattcagacacccctaccccacagctctgaccgtcaatgcttccatgtccagctttctgtcttctaggttccctccccatatggtcccaccacatcatacgctacacacgacgggcattccgcatccggccatagtcacaccaacagtcaaacaggaatcgtcccagagtgatgtcggctcactccatagttcaaagcatcaggactccaaaaaggaagaagaaaagaagaagccccacataaagaaacctcttaatgcattcatgttgtatatgaaggaaatgagagcaaaggtcgtagctgagtgcacgttgaaagaaagcgcggccatcaaccagatccttgggcggaggtggcatgcactgtccagagaagagcaagcgaaatactacgagctggcccggaaggagcgacagcttcatatgcaactgtaccccggctggtccgcgcgggataactatggaaagaagaagaagaggaaaagggacaagcagccgggagagaccaatgaacacagcgaatgtttcctaaatccttgcctttcacttcctccgattacagacctgagcgctcctaagaaatgccgagcgcgctttggccttgatcaacagaataactggtgcggcccttgcagatgcaaatactccaaagaagtgtcgggcactgttcgggcttagtaatgaactagtccgtaacttgaaagtatttcgatttcttggctttatatatcttgtggaaaggacgacgggcttgcgctgcctgacctatc

SEQ ID NO: 2003 - DNA, 1925 bp, Homo sapiens
  source 1..1925: mol_type = genomic DNA
accgccaccatgccgcagctgaacggcggtggaggggatgacctaggcgccaacgacgaactgatttccttcaaagacgagggcgaacaggaggagaagagctccgaaaactcctcggcagagagggatttagctgatgtcaaatcgtctctagtcaatgaatcagaaacgaatcaaaacagctcctccgattccgaggcggaaagacggcctccgcctcgctccgaaagtttccgagacaaatcccgggaaagtttggaagaagcggccaagaggcaagatggagggctctttaaggggccaccgtatcccggctaccccttcatcatgatccccgacctgacgagcccctacctccccaacggatcgctctcgcccaccgcccgaaccctccattttcagtccggcagcacacattactctgcgtacaaaacgattgaacaccagattgcagttcagtatctccagatgaaatggccactgcttgatgtccaggcagggagcctccagagtagacaagccctcaaggatgcccggtccccatcaccggcacacattgtctctaacaaagtgccagtggtgcagcaccctcaccatgtccaccccctcacgcctcttatcacgtacagcaatgaacacttcacgccgggaaacccacctccacacttaccagccgacgtagaccccaaaacaggaatcccacggcctccgcaccctccagatatatccccgtattacccactatcgcctggcaccgtaggacaaatcccccatccgctaggatggttagtaccacagcaaggtcaaccagtgtacccaatcacgacaggaggattcagacacccctaccccacagctctgaccgtcaatgcttccatgtccagctttctgtcttctaggttccctccccatatggtcccaccacatcatacgctacacacgacgggcattccgcatccggccatagtcacaccaacagtcaaacaggaatcgtcccagagtgatgtcggctcactccatagttcaaagcatcaggactccaaaaaggaagaagaaaagaagaagccccacataaagaaacctcttaatgcattcatgttgtatatgaaggaaatgagagcaaaggtcgtagctgagtgcacgttgaaagaaagcgcggccatcaaccagatccttgggcggaggtggcatgcactgtccagagaagagcaagcgaaatactacgagctggcccggaaggagcgacagcttcatatgcaactgtaccccggctggtccgcgcgggataactatggaaagaagaagaagaggaaaagggacaagcagccgggagagaccaatgatgcaaatactccaaagaagtgtcgggcactgttcgggcttgaccgacagactttatggtgcaaaccgtgcaggagaaaaaaaaagtgcgttcgctacatacaaggtgaaggcagctgcctcagcccaccctcttcagatggaagcttactagattcgcctcccccctccccgaacctgctaggctcccctccccgagacgccaagtcacagactgagcagacccagcctctgtcgctgtccctgaagcccgaccccctggcccacctgtccatgatgcctccgccacccgccctcctgctcgctgaggccacccacaaggcctccgccctctgtcccaacggggccctggacctgcccccagccgctttgcagcctgccgccccctcctcatcaattgcacagccgtcgacttcttccttacattcccacagctccctggccgggacccagccccagccgctgtcgctcgtcaccaagtctttagaatagtaatgaactagtccgtaacttgaaagtatttcgatttcttggctttatatatcttgtggaaaggacgagtcagatttgtcgttgcgactggt

SEQ ID NO: 2004 - DNA, 1667 bp, Homo sapiens
  source 1..1667: mol_type = genomic DNA
accgccaccatggcatcaaacagcctcttcagcacagtgacaccatgtcagcaaaacttcttttgggatccgagcaccagccggcgcttcagccccccctccagcagcctgcagcccggcaaaatgagcgacgtgagcccggtggtggctgcgcaacagcagcagcaacagcagcagcagcaacagcagcagcagcagcagcaacagcagcagcagcagcaggaggcggcggcggcggctgcggcggcggcggcggctgcggcggcggcagctgcagtgccccggttgcggccgccccacgacaaccgcaccatggtggagatcatcgccgaccacccggccgaactcgtccgcaccgacagccccaacttcctgtgctcggtgctgccctcgcactggcgctgcaacaagaccctgcccgtggccttcaaggtggtagccctcggagaggtaccagatgggactgtggttactgtcatggcgggtaacgatgaaaattattctgctgagctccggaatgcctctgctgttatgaaaaaccaagtagcaaggttcaacgatctgagatttgtgggccggagtggacgaggcaagagtttcaccttgaccataaccgtcttcacaaatcctccccaagtagctacctatcacagagcaattaaagttacagtagatggacctcgggaacccagaaggcacagacagaagcttgatgactctaaacctagtttgttctctgaccgcctcagtgatttagggcgcattcctcatcccagtatgagagtaggtgtcccgcctcagaacccacggccctccctgaactctgcaccaagtccttttaatccacaaggacagagtcagattacagaccccaggcaggcacagtcttccccgccgtggtcctatgaccagtcttacccctcctacctgagccagatgacgtccccgtccatccactctaccaccccgctgtcttccacacggggcactgggcttcctgccatcaccgatgtgcctaggcgcatttcagatgatgacactgccacctctgacttctgcctctggccttccactctcagtaagaagagccaggcaggtgcttcagaactgggccctttttcagaccccaggcagttcccaagcatttcatccctcactgagagccgcttctccaacccacgaatgcactatccagccacctttacttacaccccgccagtcacctcaggcatgtccctcggtatgtccgccaccactcactaccacacctacctgccaccaccctaccccggctcttcccaaagccagagtggacccttccagaccagcagcactccatatctctactatggcacttcgtcaggatcctatcagtttcccatggtgccggggggagaccggtctccttccagaatgcttccgccatgcaccaccacctcgaatggcagcacgctattaaatccaaatttgcctaaccagaatgatggtgttgacgctgatggaagccacagcagttccccaactgttttgaattctagtggcagaatggatgaatctgtttggcgaccatattagtaatgaactagtccgtaacttgaaagtatttcgatttcttggctttatatatcttgtggaaaggacgattgagtacgtacgagggttatgct

SEQ ID NO: 2005 - DNA, 932 bp, Homo sapiens
  source 1..932: mol_type = genomic DNA
accgccaccatgcgtattcccgtagatccgagcaccagccggcgcttcagccccccctccagcagcctgcagcccggcaaaatgagcgacgtgagcccggtggtggctgcgcaacagcagcagcaacagcagcagcagcaacagcagcagcagcagcagcaacagcagcagcagcagcaggaggcggcggcggcggctgcggcggcggcggcggctgcggcggcggcagctgcagtgccccggttgcggccgccccacgacaaccgcaccatggtggagatcatcgccgaccacccggccgaactcgtccgcaccgacagccccaacttcctgtgctcggtgctgccctcgcactggcgctgcaacaagaccctgcccgtggccttcaaggtggtagccctcggagaggtaccagatgggactgtggttactgtcatggcgggtaacgatgaaaattattctgctgagctccggaatgcctctgctgttatgaaaaaccaagtagcaaggttcaacgatctgagatttgtgggccggagtggacgaggcaagagtttcaccttgaccataaccgtcttcacaaatcctccccaagtagctacctatcacagagcaattaaagttacagtagatggacctcgggaacccagaaaccccaggcaggcacagtcttccccgccgtggtcctatgaccagtcttacccctcctacctgagccagatgacgtccccgtccatccactctaccaccccgctgtcttccacacggggcactgggcttcctgccatcaccgatgtgcctaggcgcatttcagctcgaagccgttactcactccgctagtaatgaactagtccgtaacttgaaagtatttcgatttcttggctttatatatcttgtggaaaggacgattgcgggcccgctcaaagtaagtc

SEQ ID NO: 2006 - DNA, 1559 bp, Homo sapiens
  source 1..1559: mol_type = genomic DNA
accgccaccatgcgtattcccgtagatccgagcaccagccggcgcttcagccccccctccagcagcctgcagcccggcaaaatgagcgacgtgagcccggtggtggctgcgcaacagcagcagcaacagcagcagcagcaacagcagcagcagcagcagcaacagcagcagcagcagcaggaggcggcggcggcggctgcggcggcggcggcggctgcggcggcggcagctgcagtgccccggttgcggccgccccacgacaaccgcaccatggtggagatcatcgccgaccacccggccgaactcgtccgcaccgacagccccaacttcctgtgctcggtgctgccctcgcactggcgctgcaacaagaccctgcccgtggccttcaaggtggtagccctcggagaggtaccagatgggactgtggttactgtcatggcgggtaacgatgaaaattattctgctgagctccggaatgcctctgctgttatgaaaaaccaagtagcaaggttcaacgatctgagatttgtgggccggagtggacgaggcaagagtttcaccttgaccataaccgtcttcacaaatcctccccaagtagctacctatcacagagcaattaaagttacagtagatggacctcgggaacccagaaggcacagacagaagcttgatgactctaaacctagtttgttctctgaccgcctcagtgatttagggcgcattcctcatcccagtatgagagtaggtgtcccgcctcagaacccacggccctccctgaactctgcaccaagtccttttaatccacaaggacagagtcagattacagaccccaggcaggcacagtcttccccgccgtggtcctatgaccagtcttacccctcctacctgagccagatgacgtccccgtccatccactctaccaccccgctgtcttccacacggggcactgggcttcctgccatcaccgatgtgcctaggcgcatttcaggtgcttcagaactgggccctttttcagaccccaggcagttcccaagcatttcatccctcactgagagccgcttctccaacccacgaatgcactatccagccacctttacttacaccccgccagtcacctcaggcatgtccctcggtatgtccgccaccactcactaccacacctacctgccaccaccctaccccggctcttcccaaagccagagtggacccttccagaccagcagcactccatatctctactatggcacttcgtcaggatcctatcagtttcccatggtgccggggggagaccggtctccttccagaatgcttccgccatgcaccaccacctcgaatggcagcacgctattaaatccaaatttgcctaaccagaatgatggtgttgacgctgatggaagccacagcagttccccaactgttttgaattctagtggcagaatggatgaatctgtttggcgaccatattagtaatgaactagtccgtaacttgaaagtatttcgatttcttggctttatatatcttgtggaaaggacgacggacgtagggcgtacggtccctt

SEQ ID NO: 2007 - DNA, 1601 bp, Homo sapiens
  source 1..1601: mol_type = genomic DNA
accgccaccatggcatcaaacagcctcttcagcacagtgacaccatgtcagcaaaacttcttttgggatccgagcaccagccggcgcttcagccccccctccagcagcctgcagcccggcaaaatgagcgacgtgagcccggtggtggctgcgcaacagcagcagcaacagcagcagcagcaacagcagcagcagcagcagcaacagcagcagcagcagcaggaggcggcggcggcggctgcggcggcggcggcggctgcggcggcggcagctgcagtgccccggttgcggccgccccacgacaaccgcaccatggtggagatcatcgccgaccacccggccgaactcgtccgcaccgacagccccaacttcctgtgctcggtgctgccctcgcactggcgctgcaacaagaccctgcccgtggccttcaaggtggtagccctcggagaggtaccagatgggactgtggttactgtcatggcgggtaacgatgaaaattattctgctgagctccggaatgcctctgctgttatgaaaaaccaagtagcaaggttcaacgatctgagatttgtgggccggagtggacgaggcaagagtttcaccttgaccataaccgtcttcacaaatcctccccaagtagctacctatcacagagcaattaaagttacagtagatggacctcgggaacccagaaggcacagacagaagcttgatgactctaaacctagtttgttctctgaccgcctcagtgatttagggcgcattcctcatcccagtatgagagtaggtgtcccgcctcagaacccacggccctccctgaactctgcaccaagtccttttaatccacaaggacagagtcagattacagaccccaggcaggcacagtcttccccgccgtggtcctatgaccagtcttacccctcctacctgagccagatgacgtccccgtccatccactctaccaccccgctgtcttccacacggggcactgggcttcctgccatcaccgatgtgcctaggcgcatttcaggtgcttcagaactgggccctttttcagaccccaggcagttcccaagcatttcatccctcactgagagccgcttctccaacccacgaatgcactatccagccacctttacttacaccccgccagtcacctcaggcatgtccctcggtatgtccgccaccactcactaccacacctacctgccaccaccctaccccggctcttcccaaagccagagtggacccttccagaccagcagcactccatatctctactatggcacttcgtcaggatcctatcagtttcccatggtgccggggggagaccggtctccttccagaatgcttccgccatgcaccaccacctcgaatggcagcacgctattaaatccaaatttgcctaaccagaatgatggtgttgacgctgatggaagccacagcagttccccaactgttttgaattctagtggcagaatggatgaatctgtttggcgaccatattagtaatgaactagtccgtaacttgaaagtatttcgatttcttggctttatatatcttgtggaaaggacgatcggaggtaaagattaggttacaa

SEQ ID NO: 2008 - DNA, 1349 bp, Homo sapiens
  source 1..1349: mol_type = genomic DNA
accgccaccatgcgtattcccgtagacccaagcaccagccgccgcttcacacctccctccccggccttcccctgcggcggcggcggcggcaagatgggcgagaacagcggcgcgctgagcgcgcaggcggccgtggggcccggagggcgcgcccggcccgaggtgcgctcgatggtggacgtgctggcggaccacgcaggcgagctcgtgcgcaccgacagccccaacttcctctgctccgtgctgccctcgcactggcgctgcaacaagacgctgcccgtcgccttcaaggtggtggcattgggggacgtgccggatggtacggtggtgactgtgatggcaggcaatgacgagaactactccgctgagctgcgcaatgcctcggccgtcatgaagaaccaggtggccaggttcaacgaccttcgcttcgtgggccgcagtgggcgagggaagagtttcaccctgaccatcactgtgttcaccaaccccacccaagtggcgacctaccaccgagccatcaaggtgaccgtggacggaccccgggagcccagacggcaccggcagaagctggaggaccagaccaagccgttccctgaccgctttggggacctggaacggctgcgcatgcgggtgacaccgagcacacccagcccccgaggctcactcagcaccacaagccacttcagcagccagccccagaccccaatccaaggcacctcggaactgaacccattctccgacccccgccagtttgaccgctccttccccacgctgccaaccctcacggagagccgcttcccagaccccaggatgcattatcccggggccatgtcagctgccttcccctacagcgccacgccctcgggcacgagcatcagcagcctcagcgtggcgggcatgccggccaccagccgcttccaccatacctacctcccgccaccctacccgggggccccgcagaaccagagcgggcccttccaggccaacccgtccccctaccacctctactacgggacatcctctggctcctaccagttctccatggtggccggcagcagcagtgggggcgaccgctcacctacccgcatgctggcctcttgcaccagcagcgctgcctctgtcgccgccggcaacctcatgaaccccagcctgggcggccagagtgatggcgtggaggccgacggcagccacagcaactcacccacggccctgagcacgccaggccgcatggatgaggccgtgtggcggccctactagtaatgaactagtccgtaacttgaaagtatttcgatttcttggctttatatatcttgtggaaaggacgaatcttatctccacctggcagagcc

SEQ ID NO: 2009 - DNA, 854 bp, Homo sapiens
  source 1..854: mol_type = genomic DNA
accgccaccatgcgtatccccgtagatgccagcacgagccgccgcttcacgccgccttccaccgcgctgagcccaggcaagatgagcgaggcgttgccgctgggcgccccggacgccggcgctgccctggccggcaagctgaggagcggcgaccgcagcatggtggaggtgctggccgaccacccgggcgagctggtgcgcaccgacagccccaacttcctctgctccgtgctgcctacgcactggcgctgcaacaagaccctgcccatcgctttcaaggtggtggccctaggggatgttccagatggcactctggtcactgtgatggctggcaatgatgaaaactactcggctgagctgagaaatgctaccgcagccatgaagaaccaggttgcaagatttaatgacctcaggtttgtcggtcgaagtggaagagggaaaagcttcactctgaccatcactgtcttcacaaacccaccgcaagtcgccacctaccacagagccatcaaaatcacagtggatgggccccgagaacctcgaagacatcggcagaaactagatgatcagaccaagcccgggagcttgtccttttccgagcggctcagtgaactggagcagctgcggcgcacagccatgagggtcagcccacaccacccagcccccacgcccaaccctcgtgcctccctgaaccactccactgcctttaaccctcagcctcagagtcagatgcaggaggaagacacagcaccctggagatgttagtaatgaactagtccgtaacttgaaagtatttcgatttcttggctttatatatcttgtggaaaggacgactgtcgtagtccagtaaagaaggg

SEQ ID NO: 2010 - DNA, 1463 bp, Homo sapiens
  source 1..1463: mol_type = genomic DNA
accgccaccatgcgtatccccgtagatgccagcacgagccgccgcttcacgccgccttccaccgcgctgagcccaggcaagatgagcgaggcgttgccgctgggcgccccggacgccggcgctgccctggccggcaagctgaggagcggcgaccgcagcatggtggaggtgctggccgaccacccgggcgagctggtgcgcaccgacagccccaacttcctctgctccgtgctgcctacgcactggcgctgcaacaagaccctgcccatcgctttcaaggtggtggccctaggggatgttccagatggcactctggtcactgtgatggctggcaatgatgaaaactactcggctgagctgagaaatgctaccgcagccatgaagaaccaggttgcaagatttaatgacctcaggtttgtcggtcgaagtggaagagggaaaagcttcactctgaccatcactgtcttcacaaacccaccgcaagtcgccacctaccacagagccatcaaaatcacagtggatgggccccgagaacctcgaagacatcggcagaaactagatgatcagaccaagcccgggagcttgtccttttccgagcggctcagtgaactggagcagctgcggcgcacagccatgagggtcagcccacaccacccagcccccacgcccaaccctcgtgcctccctgaaccactccactgcctttaaccctcagcctcagagtcagatgcaggatacaaggcagatccaaccatccccaccgtggtcctacgatcagtcctaccaatacctgggatccattgcctctccttctgtgcacccagcaacgcccatttcacctggacgtgccagcggcatgacaaccctctctgcagaactttccagtcgactctcaacggcacccgacctgacagcgttcagcgacccgcgccagttccccgcgctgccctccatctccgacccccgcatgcactatccaggcgccttcacctactccccgacgccggtcacctcgggcatcggcatcggcatgtcggccatgggctcggccacgcgctaccacacctacctgccgccgccctaccccggctcgtcgcaagcgcagggaggcccgttccaagccagctcgccctcctaccacctgtactacggcgcctcggccggctcctaccagttctccatggtgggcggcgagcgctcgccgccgcgcatcctgccgccctgcaccaacgcctccaccggctccgcgctgctcaaccccagcctcccgaaccagagcgacgtggtggaggccgagggcagccacagcaactcccccaccaacatggcgccctccgcgcgcctggaggaggccgtgtggaggccctactagtaatgaactagtccgtaacttgaaagtatttcgatttcttggctttatatatcttgtggaaaggacgactcccgcgcgaactttgttctccg

SEQ ID NO: 2011 - DNA, 2006 bp, Homo sapiens
  source 1..2006: mol_type = genomic DNA
accgccaccatggagccatctcctctgtctcccagtggggcagcacttcccctgccgctgtcgctggctccgcccccactacccctgccagcagctgcagtggtacatgtgtccttccctgaggtgaccagtgccctcttggagtccctcaatcagcagcgtctgcagggccagctctgcgatgtatctatcagagtgcagggccgggagttccgggctcatcgggctgtcctggctgcctcctccccttacttccatgatcaggtcctactcaaaggcatgacctccatctcgctgcccagtgtcatggacccaggcgcctttgagactgtcctagcctccgcttacactggccgcctcagcatggctgctgctgacattgtcaacttccttacagtggggtctgtgctccaaatgtggcacattgtggacaagtgcactgaactactccgagaaggccgggcctcagctaccaccaccatcactactgctgcagccacctctgtcactgtccctggtgctggggtgccatccgggagtgggggcactgtggcccctgctaccatgggctctgcgcgctcccatgcctccagccgggccagtgagaatcaatctcccagcagcagcaactacttcagccccagggagtccactgatttctcatcttcctcccaagaggcatttgcagcttctgcagtgggcagtggggagcgtcgaggaggtggccctgtattcccagcccctgtcgttggcagtggaggggccacatctggaaagctgctgctggaggcagatgagctgtgcgatgatggtggggatgggaggggggcagtggttcctggggctgggctccggagacccacctacacaccccctagcatcatgccacagaaacactgggtatacgtgaagcgaggtggtaattgcccagcgccaacacccctggttccccaagacccagatctggaggaggaagaggaggaggaagatctggtgttgacctgtgaggatgatgaagatgaagaactagggggtagctccagggttccagtggggggagggcctgaggctaccctcagcataagtgatgtccgtaccctgagtgagcccccagacaagggggaggagcaggtcaacttctgtgagtcctccaatgactttggcccatatgagggtgggggtcctgtggcaggtcttgatgactcaggggggccaactccctcttcctatgccccctcccaccctcctcgaccgctccttcccttggacatgcagggcaaccagatcctggtcttcccgtcgtcgtcttcatcctcatcctcacaggctcctggccaaccaccagggaaccaagcagaacacggggcagtgaccgtggggggcacgtcggtggggagcctgggtgtgccgggtagcgttggtggggtccctggagggactggcagtggggacgggaataagatctttctgtgccattgtgggaaggccttctcccacaagagcatgcgggaccggcacgtgaacatgcacctcaatctgcggccgtttgactgccccgtgtgcaacaaaaagttcaagatgaagcaccatctgactgagcacatgaagacgcacacaggtctcaagccctacgagtgcggagtctgcgccaagaagttcatgtggcgagacagcttcatgcgccaccgaggacactgtgagcgccggcaccgcctgggcggggtcggggccgtacctgggcctgggactcccacggggccatccttgccgtccaagagagagtctcccggagtgggcgggggcagcggcgacgaagcgagtgcggccacgcccccgtccagcagacgtgtctggtccccacccagagtccacaaggtggagatgggcttcggtggaggtggaggagcaaactagtaatgaactagtccgtaacttgaaagtatttcgatttcttggctttatatatcttgtggaaaggacgacgacgctatagttcaacgactctc

SEQ ID NO: 2012 - DNA, 2327 bp, Homo sapiens
  source 1..2327: mol_type = genomic DNA
accgccaccatgctagaacggaagaaacccaagacagctgaaaaccagaaggcatctgaggagaatgagattactcagccgggtggatccagcgccaagccgggccttccctgcctgaactttgaagctgttttgtctccagacccagccctcatccactcaacacattcactgacaaactctcacgctcacaccgggtcatctgattgtgacatcagttgcaaggggatgaccgagcgcattcacagcatcaaccttcacaacttcagcaattccgtgctcgagaccctcaacgagcagcgcaaccgtggccacttctgtgacgtaacggtgcgcatccacgggagcatgctgcgcgcacaccgctgcgtgctggcagccggcagccccttcttccaggacaaactgctgcttggctacagcgacatcgagatcccgtcggtggtgtcagtgcagtcagtgcaaaagctcattgacttcatgtacagcggcgtgctacgggtctcgcagtcggaagctctgcagatcctcacggccgccagcatcctgcagatcaaaacagtcatcgacgagtgcacgcgcatcgtgtcacagaacgtgggcgatgtgttcccggggatccaggactcgggccaggacacgccgcggggcactcccgagtcaggcacgtcaggccagagcagcgacacggagtcgggctacctgcagagccacccacagcacagcgtggacaggatctactcggcactctacgcgtgctccatgcagaatggcagcggcgagcgctctttttacagcggcgcagtggtcagccaccacgagactgcgctcggcctgccccgcgaccaccacatggaagaccccagctggatcacacgcatccatgagcgctcgcagcagatggagcgctacctgtccaccacccccgagaccacgcactgccgcaagcagccccggcctgtgcgcatccagaccctagtgggcaacatccacatcaagcaggagatggaggacgattacgactactacgggcagcaaagggtgcagatcctggaacgcaacgaatccgaggagtgcacggaagacacagaccaggccgagggcaccgagagtgagcccaaaggtgaaagcttcgactcgggcgtcagctcctccataggcaccgagcctgactcggtggagcagcagtttgggcctggggcggcgcgggacagccaggctgaacccacccaacccgagcaggctgcagaagcccccgctgagggtggtccgcagacaaaccagctagaaacaggtgcttcctctccggagagaagcaatgaagtggagatggacagcactgttatcactgtcagcaacagctccgacaagagcgtcctacaacagccttcggtcaacacgtccatcgggcagccattgccaagtacccagctctacttacgccagacagaaaccctcaccagcaacctgaggatgcctctgaccttgaccagcaacacgcaggtcattggcacagctggcaacacctacctgccagccctcttcactacccagcccgcgggcagtggccccaagcctttcctcttcagcctgccacagcccctggcaggccagcagacccagtttgtgacagtgtcccagcccggtctgtcgacctttactgcacagctgccagcgccacagcccctggcctcatccgcaggccacagcacagccagtgggcaaggcgaaaaaaagccttatgagtgcactctctgcaacaagactttcaccgccaaacagaactacgtcaagcacatgttcgtacacacaggtgagaagccccaccaatgcagcatctgttggcgctccttctccttaaaggattaccttatcaagcacatggtgacacacacaggagtgagggcataccagtgtagtatctgcaacaagcgcttcacccagaagagctccctcaacgtgcacatgcgcctccaccggggagagaagtcctacgagtgctacatctgcaaaaagaagttctctcacaagaccctcctggagcgacacgtggccctgcacagtgccagcaatgggaccccccctgcaggcacacccccaggtgcccgcgctggccccccaggcgtggtggcctgcacggaggggaccacttacgtctgctccgtctgcccagcaaagtttgaccaaatcgagcagttcaacgaccacatgaggatgcatgtgtctgacggatagtaatgaactagtccgtaacttgaaagtatttcgatttcttggctttatatatcttgtggaaaggacgacgagacggacgtaggaccatgcag

SEQ ID NO: 2013 - DNA, 2108 bp, Homo sapiens
  source 1..2108: mol_type = genomic DNA
accgccaccatgaccgagcgcattcacagcatcaaccttcacaacttcagcaattccgtgctcgagaccctcaacgagcagcgcaaccgtggccacttctgtgacgtaacggtgcgcatccacgggagcatgctgcgcgcacaccgctgcgtgctggcagccggcagccccttcttccaggacaaactgctgcttggctacagcgacatcgagatcccgtcggtggtgtcagtgcagtcagtgcaaaagctcattgacttcatgtacagcggcgtgctacgggtctcgcagtcggaagctctgcagatcctcacggccgccagcatcctgcagatcaaaacagtcatcgacgagtgcacgcgcatcgtgtcacagaacgtgggcgatgtgttcccggggatccaggactcgggccaggacacgccgcggggcactcccgagtcaggcacgtcaggccagagcagcgacacggagtcgggctacctgcagagccacccacagcacagcgtggacaggatctactcggcactctacgcgtgctccatgcagaatggcagcggcgagcgctctttttacagcggcgcagtggtcagccaccacgagactgcgctcggcctgccccgcgaccaccacatggaagaccccagctggatcacacgcatccatgagcgctcgcagcagatggagcgctacctgtccaccacccccgagaccacgcactgccgcaagcagccccggcctgtgcgcatccagaccctagtgggcaacatccacatcaagcaggagatggaggacgattacgactactacgggcagcaaagggtgcagatcctggaacgcaacgaatccgaggagtgcacggaagacacagaccaggccgagggcaccgagagtgagcccaaaggtgaaagcttcgactcgggcgtcagctcctccataggcaccgagcctgactcggtggagcagcagtttgggcctggggcggcgcgggacagccaggctgaacccacccaacccgagcaggctgcagaagcccccgctgagggtggtccgcagacaaaccagctagaaacaggtgcttcctctccggagagaagcaatgaagtggagatggacagcactgttatcactgtcagcaacagctccgacaagagcgtcctacaacagccttcggtcaacacgtccatcgggcagccattgccaagtacccagctctacttacgccagacagaaaccctcaccagcaacctgaggatgcctctgaccttgaccagcaacacgcaggtcattggcacagctggcaacacctacctgccagccctcttcactacccagcccgcgggcagtggccccaagcctttcctcttcagcctgccacagcccctggcaggccagcagacccagtttgtgacagtgtcccagcccggtctgtcgacctttactgcacagctgccagcgccacagcccctggcctcatccgcaggccacagcacagccagtgggcaaggcgaaaaaaagccttatgagtgcactctctgcaacaagactttcaccgccaaacagaactacgtcaagcacatgttcgtacacacaggtgagaagccccaccaatgcagcatctgttggcgctccttctccttaaaggattaccttatcaagcacatggtgacacacacaggagtgagggcataccagtgtagtatctgcaacaagcgcttcacccagaagagctccctcaacgtgcacatgcgcctccaccggggagagaagtcctacgagtgctacatctgcaaaaagaagttctctcacaagaccctcctggagcgacacgtggccctgcacagtgccagcaatgggaccccccctgcaggcacacccccaggtgcccgcgctggccccccaggcgtggtggcctgcacggaggggaccacttacgtctgctccgtctgcccagcaaagtttgaccaaatcgagcagttcaacgaccacatgaggatgcatgtgtctgacggatagtaatgaactagtccgtaacttgaaagtatttcgatttcttggctttatatatcttgtggaaaggacgagcatatatacagatccggatcgtc

SEQ ID NO: 2014 - DNA, 3302 bp, Homo sapiens
  source 1..3302: mol_type = genomic DNA
accgccaccatggagggattactgcattacatcaaccctgcacacgccatttctctcctaagtgccctgaatgaggagcgtctcaaaggacagctgtgtgatgtgctgctgattgttggagaccaaaagttccgagctcataaaaacgtcttggctgccagcagcgaatactttcagagtttattcacaaataaggaaaatgagtcacaaactgtatttcagcttgacttctgtgagccagatgcttttgataatgttttaaactacatttattcttcctctctatttgttgagaagagcagccttgctgctgtgcaagaacttggctatagtcttgggatttcctttctgactaacatcgtttctaaaacacctcaagccccctttccaacgtgtcctaatagaaaaaaagtgtttgtagaagatgatgaaaacagttctcaaaagagaagtgtcattgtttgtcaaagtagaaacgaagcgcaaggaaaaactgttagtcaaaatcaacccgatgtaagccatacttcccggccctctcctagcattgcagtcaaggccaataccaataagccacatgtcccaaaaccaatagaaccacttcataatttgtcattaactgaaaagagttggccgaaagatagttctgtggtatatgcaaagtctcttgagcattctggatctttggatgatcctaatagaatcagtttggtgaaaagaaatgcagtgttgccttcaaagcctctgcaagacagagaagctatggatgataaaccaggtgtgagtggtcagcttccaaaaggaaaagctctagagctggctttgaagagaccacggccacctgttttgtctgtttgtagctcatcagagactccctatctattaaaagaaactaacaaaggaaatggtcaaggtgaagatagaaacttgttgtactattcaaagttaggcttagtgatcccatccagtggatctggttctggaaaccaaagcattgacaggagtggcccacttgttaagagtctcctcagacggtcattgtcgatggatagccaggttcctgtctattcaccttccatagatttgaaatcttcccagggatcatcttcggtgtccagtgatgcaccagggaatgtgttgtgtgctttatctcagaagtcatctttaaaagattgtagtgaaaaaacagccctagatgacaggcctcaagtgctacaaccgcatcgcctcaggtcctttagtgcttctcagtcaacagacagggagggagcttcccctgtgactgaggtgcgcataaagactgagcccagcagcccgctgtcggacccctcggacatcatccgcgtcactgtgggagatgcggcaacaacagcagctgcctcatcttcgtcggtcacaagagacctgtctctgaaaacagaagatgaccaaaaagacatgagcagactcccagcaaaaaggaggttccaagcggaccgaagattgccgtttaagaagttaaaggtgaatgagcacgggtctcctgtgtcagaagataattttgaggaaggctcaagccctactctccttgatgcagattttccagattctgatttgaataaagacgaatttggtgagttggaggggacgagaccaaacaaaaaatttaaatgcaaacattgccttaagatctttagatcaacagcaggtcttcaccgtcatgttaacatgtaccataacccagaaaagccctacgcttgtgacatctgtcacaagaggtttcacaccaacttcaaagtgtggacacactgtcagacccaacacggcatagtgaagaacccatcaccagcctctagttcacatgctgttttggatgaaaaattccaaagaaagctgattgacatagtgagagagagagaaattaagaaggccctgatcattaagttaaggcgcggcaagcctggttttcagggacagagtagctcccaagcacagcaagtcatcaagaggaacttgagatctcgagccaaaggagcttacatttgtacttactgcggaaaagcgtaccgctttctctctcaatttaagcagcatataaaaatgcatccaggagaaaaaccccttggagtaaataaagttgctaaaccaaaagagcatgctcctcttgcaagtccagtagaaaacaaggaggtttaccagtgccgcctctgtaatgctaagctctcttctctcctagagcaaggaagccacgagcggctgtgccggaacgcggccgtctgcccttactgcagcctcaggtttttctcgcccgagctgaagcaagaacacgagagcaagtgtgagtataagaagctgacctgcctcgagtgcatgcgcaccttcaagtcctctttcagcatctggcggcaccaggttgaagtccataatcagaacaacatggcacccaccgaaaacttttctttgcccgttttggaccacaatggtgatgtgactggttcttcaaggccccaatcccagcctgagcccaacaaagtaaaccacatcgtcaccacaaaagacgacaacgtgttcagtgattcttcagaacaagttaacttcgactcggaagattcctcttgtcttcccgaagaccttagtctttccaagcaactgaaaatccaagtcaaagaggagcctgtggaggaggctgaagaagaggcacccgaggccagcacagcccccaaagaagcgggtcctagcaaagaagccagcctgtggccctgcgagaagtgtgggaagatgttcacggtgcataagcagctggagcgtcaccaggagcttctgtgctctgtgaaaccatttatttgtcacgtgtgcaacaaagcttttcgcactaattttcgactctggagtcacttccaatcgcacatgtctcaggcttcagaggaatcggcacataaggaatctgaggtgtgccctgttcccacaaactctccctctccaccacctctgccaccgccaccaccactgcccaagatccagcctctggagcctgacagccccacaggcctgtccgaaaacccaactccagccacagaaaaactgtttgtgccccaagaatcagacacccttttttaccatgccccacccctttcagcaatcacatttaaaagacagtttatgtgtaaactttgccacaggacattcaagactgcatttagtctttggagtcacgaacaaacacacaattagtaatgaactagtccgtaacttgaaagtatttcgatttcttggctttatatatcttgtggaaaggacgagtcgaaccgtcgaaaggcgaggat

SEQ ID NO: 2015 - DNA, 2699 bp, Homo sapiens
  source 1..2699: mol_type = genomic DNA
accgccaccatggagggattactgcattacatcaaccctgcacacgccatttctctcctaagtgccctgaatgaggagcgtctcaaaggacagctgtgtgatgtgctgctgattgttggagaccaaaagttccgagctcataaaaacgtcttggctgccagcagcgaatactttcagagtttattcacaaataaggaaaatgagtcacaaactgtatttcagcttgacttctgtgagccagatgcttttgataatgttttaaactacatttattcttcctctctatttgttgagaagagcagccttgctgctgtgcaagaacttggctatagtcttgggatttcctttctgactaacatcgtttctaaaacacctcaagccccctttccaacgtgtcctaatagaaaaaaagtgtttgtagaagatgatgaaaacagttctcaaaagagaagtgtcattgtttgtcaaagtagaaacgaagcgcaaggaaaaactgttagtcaaaatcaacccgatgtaagccatacttcccggccctctcctagcattgcagtcaaggccaataccaataagccacatgtcccaaaaccaatagaaccacttcataatttgtcattaactgaaaagagttggccgaaagatagttctgtggtatatgcaaagtctcttgagcattctggatctttggatgatcctaatagaatcagtttggtgaaaagaaatgcagtgttgccttcaaagcctctgcaagacagagaagctatggatgataaaccaggtgtgagtggtcagcttccaaaaggaaaagctctagagctggctttgaagagaccacggccacctgttttgtctgtttgtagctcatcagagactccctatctattaaaagaaactaacaaaggaaatggtcaaggtgaagatagaaacttgttgtactattcaaagttaggcttagtgatcccatccagtggatctggttctggaaaccaaagcattgacaggagtggcccacttgttaagagtctcctcagacggtcattgtcgatggatagccaggttcctgtctattcaccttccatagatttgaaatcttcccagggatcatcttcggtgtccagtgatgcaccagggaatgtgttgtgtgctttatctcagaagtcatctttaaaagattgtagtgaaaaaacagccctagatgacaggcctcaagtgctacaaccgcatcgcctcaggtcctttagtgcttctcagtcaacagacagggagggagcttcccctgtgactgaggtgcgcataaagactgagcccagcagcccgctgtcggacccctcggacatcatccgcgtcactgtgggagatgcggcaacaacagcagctgcctcatcttcgtcggtcacaagagacctgtctctgaaaacagaagatgaccaaaaagacatgagcagactcccagcaaaaaggaggttccaagcggaccgaagattgccgtttaagaagttaaaggtgaatgagcacgggtctcctgtgtcagaagataattttgaggaaggctcaagccctactctccttgatgcagattttccagattctgatttgaataaagacgaatttgagcaaggaagccacgagcggctgtgccggaacgcggccgtctgcccttactgcagcctcaggtttttctcgcccgagctgaagcaagaacacgagagcaagtgtgagtataagaagctgacctgcctcgagtgcatgcgcaccttcaagtcctctttcagcatctggcggcaccaggttgaagtccataatcagaacaacatggcacccaccgaaaacttttctttgcccgttttggaccacaatggtgatgtgactggttcttcaaggccccaatcccagcctgagcccaacaaagtaaaccacatcgtcaccacaaaagacgacaacgtgttcagtgattcttcagaacaagttaacttcgactcggaagattcctcttgtcttcccgaagaccttagtctttccaagcaactgaaaatccaagtcaaagaggagcctgtggaggaggctgaagaagaggcacccgaggccagcacagcccccaaagaagcgggtcctagcaaagaagccagcctgtggccctgcgagaagtgtgggaagatgttcacggtgcataagcagctggagcgtcaccaggagcttctgtgctctgtgaaaccatttatttgtcacgtgtgcaacaaagcttttcgcactaattttcgactctggagtcacttccaatcgcacatgtctcaggcttcagaggaatcggcacataaggaatctgaggtgtgccctgttcccacaaactctccctctccaccacctctgccaccgccaccaccactgcccaagatccagcctctggagcctgacagccccacaggcctgtccgaaaacccaactccagccacagaaaaactgtttgtgccccaagaatcagacacccttttttaccatgccccacccctttcagcaatcacatttaaaagacagtttatgtgtaaactttgccacaggacattcaagactgcatttagtctttggagtcacgaacaaacacacaattagtaatgaactagtccgtaacttgaaagtatttcgatttcttggctttatatatcttgtggaaaggacgacaagatatgggttaagcctgtccc

SEQ ID NO: 2016 - DNA, 362 bp, Homo sapiens
  source 1..362: mol_type = genomic DNA
accgccaccatggacactgccagccatagccttgttcttctccagcagctgaacatgcagcgagaatttggttttctgtgtgattgcacagttgcaattggagatgtttacttcaaagcccacagagcagtgcttgctgctttttctaactatttcaagatgatatttattcaccaaacaagacagcaaatcacccaccttgaggtcataaaggagctggaagctgctgggtgcttgtgctgctctctggacggcctgagccagggctagtaatgaactagtccgtaacttgaaagtatttcgatttcttggctttatatatcttgtggaaaggacgagagttggatgtggcagagctagtc

SEQ ID NO: 2017 - DNA, 1349 bp, Homo sapiens
  source 1..1349: mol_type = genomic DNA
accgccaccatggcgatgagagagctgaacgcggattcatgctcaagcccccagatgggggctatgtgggagactagtgggtctgtgaaagagaactccagtcagagtaagaaatacagcacaaaaatagagaatcttggtcctgagagcgcttgcaggcacttctggagcttccgttatcatgaagcaaccggaccgcttgagactatcagccaacttcagaaattgtgccatcagtggctgaggccagagatccactcaaaagagcagatcttggaaatgctggtgttagagcagttcctgagcattctgcccaaggagacccagaactgggtgcagaagcatcatccacagaatgtcaaacaggctctggtcctggtggaattcttgcagagggagcctgatggaacaaagaatgagagtttgttgacatttgaagatgtggctgtgtatttttctgaggaagagtggcaattattgaatcctcttgagaagactctctacaatgatgtaatgcaggatatctatgagactgtcatctctctagggttaaagctaaaaaatgacactggaaatgatcatcctatatctgtttctacatcagaaatacaaacatcaggatgcgaagtatcaaaaaagaccagaatgaaaattgcccagaaaacaatgggcagggaaaatcctggtgatacacacagtgtacagaaatggcatcgagcttttccaaggaagaaaagaaagaaacctgcaacttgtaaacaagagcttccaaaacttatggatcttcatgggaaaggccccacaggggagaaaccttttaagtgtcaggaatgtgggaaaagcttcagagttagctctgatcttattaaacaccacagaattcacactggagagaaaccctataaatgtcaacaatgtgacaggaggtttagatggagttcagatcttaataagcacttcatgacccatcaaggaataaaaccatatagatgctcatggtgtgggaaaagctttagtcataacacaaatctacacacacaccaaagaattcacacaggagagaagccctttaaatgtgatgaatgtggaaaaagattcattcagaactcccaccttattaaacaccagagaactcacacaggtgagcagccttatacgtgtagcttatgcaagagaaactttagtaggcgatcgagccttcttagacaccagaaactccacagaagaagggaagcatgtctagtgtctccaaactagtaatgaactagtccgtaacttgaaagtatttcgatttcttggctttatatatcttgtggaaaggacgatcacgactctcgtttcagcagtcc

SEQ ID NO: 2018 - DNA, 2300 bp, Homo sapiens
  source 1..2300: mol_type = genomic DNA
accgccaccatggtgcggtcggggaataaggcagctgttgtgctgtgtatggacgtgggctttaccatgagtaactccattcctggtatagaatccccatttgaacaagcaaagaaggtgataaccatgtttgtacagcgacaggtgtttgctgagaacaaggatgagattgctttagtcctgtttggtacagatggcactgacaatcccctttctggtggggatcagtatcagaacatcacagtgcacagacatctgatgctaccagattttgatttgctggaggacattgaaagcaaaatccaaccaggttctcaacaggctgacttcctggatgcactaatcgtgagcatggatgtgattcaacatgaaacaataggaaagaagtttgagaagaggcatattgaaatattcactgacctcagcagccgattcagcaaaagtcagctggatattataattcatagcttgaagaaatgtgacatctccctgcaattcttcttgcctttctcacttggcaaggaagatggaagtggggacagaggagatggcccctttcgcttaggtggccatgggccttcctttccactaaaaggaattaccgaacagcaaaaagaaggtcttgagatagtgaaaatggtgatgatatctttagaaggtgaagatgggttggatgaaatttattcattcagtgagagtctgagaaaactgtgcgtcttcaagaaaattgagaggcattccattcactggccctgccgactgaccattggctccaatttgtctataaggattgcagcctataaatcgattctacaggagagagttaaaaagacttggacagttgtggatgcaaaaaccctaaaaaaagaagatatacaaaaagaaacagtttattgcttaaatgatgatgatgaaactgaagttttaaaagaggatattattcaagggttccgctatggaagtgatatagttcctttctctaaagtggatgaggaacaaatgaaatataaatcggaggggaagtgcttctctgttttgggattttgtaaatcttctcaggttcagagaagattcttcatgggaaatcaagttctaaaggtctttgcagcaagagatgatgaggcagctgcagttgcactttcctccctgattcatgctttggatgacttagacatggtggccatagttcgatatgcttatgacaaaagagctaatcctcaagtcggcgtggcttttcctcatatcaagcataactatgagtgtttagtgtatgtgcagctgcctttcatggaagacttgcggcaatacatgttttcatccttgaaaaacagtaagaaatatgctcccaccgaggcacagttgaatgctgttgatgctttgattgactccatgagcttggcaaagaaagatgagaagacagacacccttgaagacttgtttccaaccaccaaaatcccaaatcctcgatttcagagattatttcagtgtctgctgcacagagctttacatccccgggagcctctacccccaattcagcagcatatttggaatatgctgaatcctcccgctgaggtgacaacaaaaagtcagattcctctctctaaaataaagaccctttttcctctgattgaagccaagaaaaaggatcaagtgactgctcaggaaattttccaagacaaccatgaagatggacctacagctaaaaaattaaagactgagcaagggggagcccacttcagcgtctccagtctggctgaaggcagtgtcacctctgttggaagtgtgaatcctgctgaaaacttccgtgttctagtgaaacagaagaaggccagctttgaggaagcgagtaaccagctcataaatcacatcgaacagtttttggatactaatgaaacaccgtattttatgaagagcatagactgcatccgagccttccgggaagaagccattaagttttcagaagagcagcgctttaacaacttcctgaaagcccttcaagagaaagtggaaattaaacaattaaatcatttctgggaaattgttgtccaggatggaattactctgatcaccaaagaggaagcctctggaagttctgtcacagctgaggaagccaaaaagtttctggcccccaaagacaaaccaagtggagacacagcagctgtatttgaagaaggtggtgatgtggacgatttattggacatgatatagtaatgaactagtccgtaacttgaaagtatttcgatttcttggctttatatatcttgtggaaaggacgacgggtatgtccatatggcgcctga

SEQ ID NO: 2019 - DNA, 1106 bp, Homo sapiens
  source 1..1106: mol_type = genomic DNA
accgccaccatggagagaaaaataagcagaatccaccttgtttctgaacccagtataactcattttctacaagtatcttgggagaaaacactggaatctggttttgttattacacttactgatggtcattcagcatggactgggacagtttctgaatcagagatttcccaagaagctgatgacatggcaatggaaaaagggaaatatgttggtgaactgagaaaagcattgttgtcaggagcaggaccagctgatgtatacacgtttaatttttctaaagagtcttgttatttcttctttgagaaaaacctgaaagatgtctcattcagacttggttccttcaacctagagaaagttgaaaacccagctgaagtcattagagaacttatttgttattgcttggacaccattgcagaaaatcaagccaaaaatgagcacctgcagaaagaaaatgaaaggcttctgagagattggaatgatgttcaaggacgatttgaaaaatgtgtgagtgctaaggaagctttggagactgatctttataagcggtttattctggtgttgaatgagaagaaaacaaaaatcagaagtttgcataataaattattaaatgcagctcaagaacgagaaaaggacatcaaacaagaaggggaaactgcaatctgttctgaaatgactgctgaccgagatccagtctatgatgagagtactgatgaggaaagtgaaaaccaaactgatctctctgggttggcttcagctgctgtaagtaaagatgattccattatttcaagtcttgatgtcactgatattgcaccaagtagaaaaaggagacagcgaatgcaaagaaatcttgggacagaacctaaaatggctcctcaggagaatcagcttcaagaaaaggaaaagcctgattcttcactacctgagacgtctaaaaaggagcacatctcagctgaaaacatgtctttagaaactctgagaaacagcagcccagaagacctctttgatgagatttagtaatgaactagtccgtaacttgaaagtatttcgatttcttggctttatatatcttgtggaaaggacgacaacacaagctagctgtggcggcg

SEQ ID NO: 2020 - DNA, 1808 bp, Homo sapiens
  source 1..1808: mol_type = genomic DNA
accgccaccatgtcagggtgggagtcatattacaaaaccgagggcgatgaagaagcagaggaagaacaagaagagaaccttgaagcaagtggagactataaatattcaggaagagatagtttgatttttttggttgatgcctccaaggctatgtttgaatctcagagtgaagatgagttgacaccttttgacatgagcatccaggagctggataatccaggtgcaaaacgaattctagagcttgaccagtttaaggggcagcagggacaaaaacgtttccaagacatgatgggccacggatctgactactcactcagtgaagtgctgtgggtctgtgccaacctctttagtgatgtccaattcaagatgagtcataagaggatcatgctgttcaccaatgaagacaacccccatggcaatgacagtgccaaagccagccgggccaggaccaaagccggtgatctccgagatacaggcatcttccttgacttgatgcacctgaagaaacctgggggctttgacatatccttgttctacagagatatcatcagcatagcagaggatgaggacctcagggttcactttgaggaatccagcaagctagaagacctgttgcggaaggttcgcgccaaggagaccaggaagcgagcactcagcaggttaaagctgaagctcaacaaagatatagtgatctctgtgggcatttataatctggtccagaaggctctcaagcctcctccaataaagctctatcgggaaacaaatgaaccagtgaaaaccaagacccggacctttaatacaagtacaggcggtttgcttctgcctagcgataccaagaggtctcagatctatgggagtcgtcagattatactggagaaagaggaaacagaagagctaaaacggtttgatgatccaggtttgatgctcatgggtttcaagccgttggtactgctgaagaaacaccattacctgaggccctccctgttcgtgtacccagaggagtcgctggtgattgggagctcaaccctgttcagtgctctgctcatcaagtgtctggagaaggaggttgcagcattgtgcagatacacaccccgcaggaacatccctccttattttgtggctttggtgccacaggaagaagagttggatgaccagaaaattcaggtgactcctccaggcttccagctggtctttttaccctttgctgatgataaaaggaagatgccctttactgaaaaaatcatggcaactccagagcaggtgggcaagatgaaggctatcgttgagaagcttcgcttcacatacagaagtgacagctttgagaaccccgtgctgcagcagcacttcaggaacctggaggccttggccttggatttgatggagccggaacaagcagtggacctgacattgcccaaggttgaagcaatgaataaaagactgggctccttggtggatgagtttaaggagcttgtttacccaccagattacaatcctgaagggaaagttaccaagagaaaacacgataatgaaggttctggaagcaaaaggcccaaggtggagtattcagaagaggagctgaagacccacatcagcaagggtacgctgggcaagttcactgtgcccatgctgaaagaggcctgccgggcttacgggctgaagagtgggctgaagaagcaggagctgctggaagccctcaccaagcacttccaggactagtaatgaactagtccgtaacttgaaagtatttcgatttcttggctttatatatcttgtggaaaggacgaacttatacgagtgtgtagcatatt

SEQ ID NO: 2021 - DNA, 1781 bp, Homo sapiens
  source 1..1781: mol_type = genomic DNA
accgccaccatgaagaagcagaggaagaacaagaagagaaccttgaagcaagtgtgtatccaaagtgtgtacatcagtaagatcataagcagtgatcgagatctcttggctgtggtgttctatggtaccgagaaagacaaaaattcagtgaattttaaaaatatttacgtcttacaggagctggataatccaggtgcaaaacgaattctagagcttgaccagtttaaggggcagcagggacaaaaacgtttccaagacatgatgggccacggatctgactactcactcagtgaagtgctgtgggtctgtgccaacctctttagtgatgtccaattcaagatgagtcataagaggatcatgctgttcaccaatgaagacaacccccatggcaatgacagtgccaaagccagccgggccaggaccaaagccggtgatctccgagatacaggcatcttccttgacttgatgcacctgaagaaacctgggggctttgacatatccttgttctacagagatatcatcagcatagcagaggatgaggacctcagggttcactttgaggaatccagcaagctagaagacctgttgcggaaggttcgcgccaaggagaccaggaagcgagcactcagcaggttaaagctgaagctcaacaaagatatagtgatctctgtgggcatttataatctggtccagaaggctctcaagcctcctccaataaagctctatcgggaaacaaatgaaccagtgaaaaccaagacccggacctttaatacaagtacaggcggtttgcttctgcctagcgataccaagaggtctcagatctatgggagtcgtcagattatactggagaaagaggaaacagaagagctaaaacggtttgatgatccaggtttgatgctcatgggtttcaagccgttggtactgctgaagaaacaccattacctgaggccctccctgttcgtgtacccagaggagtcgctggtgattgggagctcaaccctgttcagtgctctgctcatcaagtgtctggagaaggaggttgcagcattgtgcagatacacaccccgcaggaacatccctccttattttgtggctttggtgccacaggaagaagagttggatgaccagaaaattcaggtgactcctccaggcttccagctggtctttttaccctttgctgatgataaaaggaagatgccctttactgaaaaaatcatggcaactccagagcaggtgggcaagatgaaggctatcgttgagaagcttcgcttcacatacagaagtgacagctttgagaaccccgtgctgcagcagcacttcaggaacctggaggccttggccttggatttgatggagccggaacaagcagtggacctgacattgcccaaggttgaagcaatgaataaaagactgggctccttggtggatgagtttaaggagcttgtttacccaccagattacaatcctgaagggaaagttaccaagagaaaacacgataatgaaggttctggaagcaaaaggcccaaggtggagtattcagaagaggagctgaagacccacatcagcaagggtacgctgggcaagttcactgtgcccatgctgaaagaggcctgccgggcttacgggctgaagagtgggctgaagaagcaggagctgctggaagccctcaccaagcacttccaggactagtaatgaactagtccgtaacttgaaagtatttcgatttcttggctttatatatcttgtggaaaggacgaaatgttggccttactagttgctcg

SEQ ID NO: 2022 - DNA, 1097 bp, Homo sapiens
  source 1..1097: mol_type = genomic DNA
accgccaccatgactgcaaagatggaaacgaccttctatgacgatgccctcaacgcctcgttcctcccgtccgagagcggaccttatggctacagtaaccccaagatcctgaaacagagcatgaccctgaacctggccgacccagtggggagcctgaagccgcacctccgcgccaagaactcggacctcctcacctcgcccgacgtggggctgctcaagctggcgtcgcccgagctggagcgcctgataatccagtccagcaacgggcacatcaccaccacgccgacccccacccagttcctgtgccccaagaacgtgacagatgagcaggagggcttcgccgagggcttcgtgcgcgccctggccgaactgcacagccagaacacgctgcccagcgtcacgtcggcggcgcagccggtcaacggggcaggcatggtggctcccgcggtagcctcggtggcagggggcagcggcagcggcggcttcagcgccagcctgcacagcgagccgccggtctacgcaaacctcagcaacttcaacccaggcgcgctgagcagcggcggcggggcgccctcctacggcgcggccggcctggcctttcccgcgcaaccccagcagcagcagcagccgccgcaccacctgccccagcagatgcccgtgcagcacccgcggctgcaggccctgaaggaggagcctcagacagtgcccgagatgcccggcgagacaccgcccctgtcccccatcgacatggagtcccaggagcggatcaaggcggagaggaagcgcatgaggaaccgcatcgctgcctccaagtgccgaaaaaggaagctggagagaatcgcccggctggaggaaaaagtgaaaaccttgaaagctcagaactcggagctggcgtccacggccaacatgctcagggaacaggtggcacagcttaaacagaaagtcatgaaccacgttaacagtgggtgccaactcatgctaacgcagcagttgcaaacattttagtaatgaactagtccgtaacttgaaagtatttcgatttcttggctttatatatcttgtggaaaggacgagacgacacaccgcgctgccgcgac

SEQ ID NO: 2023 - DNA, 1307 bp, Homo sapiens
  source 1..1307: mol_type = genomic DNA
accgccaccatggcgcaaaggtacgatgagctgccccattacggcgggatggacggagtaggggttcccgcttccatgtacggagaccctcacgcgccgcggccgatccccccggttcaccacctgaaccacgggccgccgctccacgccacacagcactacggcgcgcacgccccgcaccccaatgtcatgccggccagtatgggatccgctgtcaacgacgccttgaagcgggacaaggacgcgatctatgggcacccgttgtttcctctgttagctctggtctttgagaagtgcgagctggcgacctgcactccccgggaacctggagtggctggcggagacgtctgctcctccgactccttcaacgaggacatcgcggtcttcgccaagcaggttcgcgccgaaaagccacttttttcctcaaatccagagctggacaatttgatgatacaagcaatacaagtactaaggtttcatcttttggagttagaaaaggtccacgaactgtgcgataacttctgccaccgatacattagctgtttgaaggggaaaatgcccatcgacctcgtcattgatgaaagagacggcagctccaagtcagatcatgaagaactttcaggctcctccacaaatctcgctgaccataacccttcttcttggcgagaccacgatgatgcaacctcaacccactcagcaggcaccccagggccctccagtgggggccatgcttcccagagcggagacaacagcagtgagcaaggggatggtttagacaacagtgtagcttcacctggtacaggtgacgatgatgatccggataaggacaaaaaacgccagaagaaaagaggcattttccccaaagtagcaacaaatatcatgagagcatggctcttccagcatctcacacatccgtacccttccgaagagcagaagaaacagttagcgcaagacacaggacttacaattctccaagtaaacaactggtttattaatgccagaagaagaatagtacagcccatgattgaccagtcaaatcgagcaggttttcttcttgatccttcagtgagccaaggagcagcatatagtccagagggtcagcccatggggagctttgtgttggatggtcagcaacacatggggatccggcctgcaggacctatgagtggaatgggcatgaatatgggcatggatgggcaatggcactacatgtagtaatgaactagtccgtaacttgaaagtatttcgatttcttggctttatatatcttgtggaaaggacgatggtgagcaacgagcctccagtaa

SEQ ID NO: 2024 - DNA, 1286 bp, Homo sapiens
  source 1..1286: mol_type = genomic DNA
accgccaccatggcgcaaaggtacgatgagctgccccattacggcgggatggacggagtaggggttcccgcttccatgtacggagaccctcacgcgccgcggccgatccccccggttcaccacctgaaccacgggccgccgctccacgccacacagcactacggcgcgcacgccccgcaccccaatgtcatgccggccagtatgggatccgctgtcaacgacgccttgaagcgggacaaggacgcgatctatgggcacccgttgtttcctctgttagctctggtctttgagaagtgcgagctggcgacctgcactccccgggaacctggagtggctggcggagacgtctgctcctccgactccttcaacgaggacatcgcggtcttcgccaagcaggttcgcgccgaaaagccacttttttcctcaaatccagagctggacaatttgatgatacaagcaatacaagtactaaggtttcatcttttggagttagaaaaggtccacgaactgtgcgataacttctgccaccgatacattagctgtttgaaggggaaaatgcccatcgacctcgtcattgatgaaagagacggcagctccaagtcagatcatgaagaactttcaggctcctccacaaatctcgctgaccataacccttcttcttggcgagaccacgatgatgcaacctcaacccactcagcaggcaccccagggccctccagtgggggccatgcttcccagagcggagacaacagcagtgagcaaggggatggtttagacaacagtgtagcttcacctggtacaggtgacgatgatgatccggataaggacaaaaaacgccagaagaaaagaggcattttccccaaagtagcaacaaatatcatgagagcatggctcttccagcatctcacacatccgtacccttccgaagagcagaagaaacagttagcgcaagacacaggacttacaattctccaagtaaacaactggtttattaatgccagaagaagaatagtacagcccatgattgaccagtcaaatcgagcagtgagccaaggagcagcatatagtccagagggtcagcccatggggagctttgtgttggatggtcagcaacacatggggatccggcctgcaggacctatgagtggaatgggcatgaatatgggcatggatgggcaatggcactacatgtagtaatgaactagtccgtaacttgaaagtatttcgatttcttggctttatatatcttgtggaaaggacgatttctccatggcttctatctatgc

SEQ ID NO: 2025 - DNA, 1535 bp, Homo sapiens
  source 1..1535: mol_type = genomic DNA
accgccaccatggcgcaaaggtacgatgagctgccccattacggcgggatggacggagtaggggttcccgcttccatgtacggagaccctcacgcgccgcggccgatccccccggttcaccacctgaaccacgggccgccgctccacgccacacagcactacggcgcgcacgccccgcaccccaatgtcatgccggccagtatgggatccgctgtcaacgacgccttgaagcgggacaaggacgcgatctatgggcacccgttgtttcctctgttagctctggtctttgagaagtgcgagctggcgacctgcactccccgggaacctggagtggctggcggagacgtctgctcctccgactccttcaacgaggacatcgcggtcttcgccaagcaggttcgcgccgaaaagccacttttttcctcaaatccagagctggacaatttgatgatacaagcaatacaagtactaaggtttcatcttttggagttagaaaaggtccacgaactgtgcgataacttctgccaccgatacattagctgtttgaaggggaaaatgcccatcgacctcgtcattgatgaaagagacggcagctccaagtcagatcatgaagaactttcaggctcctccacaaatctcgctgaccataacccttcttcttggcgagaccacgatgatgcaacctcaacccactcagcaggcaccccagggccctccagtgggggccatgcttcccagagcggagacaacagcagtgagcaaggggatggtttagacaacagtgtagcttcacctggtacaggtgacgatgatgatccggataaggacaaaaaacgccagaagaaaagaggcattttccccaaagtagcaacaaatatcatgagagcatggctcttccagcatctcacacatccgtacccttccgaagagcagaagaaacagttagcgcaagacacaggacttacaattctccaagtaaacaactggtttattaatgccagaagaagaatagtacagcccatgattgaccagtcaaatcgagcaggttttcttcttgatccttcagtgagccaaggagcagcatatagtccagagggtcagcccatggggagctttgtgttggatggtcagcaacacatggggatccggcctgcaggtttgcagagcatgccaggggactacgtttctcagggtggtcctatgggaatgagtatggcacagccaagttacactcctccccagatgaccccacaccctactcaattaagacatggacccccaatgcattcatatttgccaagccatccccaccacccagccatgatgatgcacggaggaccccctacccaccctggaatgactatgtcagcacagagccccacaatgttaaattctgtagatcccaatgttggcggacaggttatggacattcatgcccaatagtaatgaactagtccgtaacttgaaagtatttcgatttcttggctttatatatcttgtggaaaggacgatacgtcacgccgcagctcctttct

SEQ ID NO: 2026 - DNA, 1022 bp, Homo sapiens
  source 1..1022: mol_type = genomic DNA
accgccaccatggctctggtctttgagaagtgcgagctggcgacctgcactccccgggaacctggagtggctggcggagacgtctgctcctccgactccttcaacgaggacatcgcggtcttcgccaagcaggttcgcgccgaaaagccacttttttcctcaaatccagagctggacaatttgatgatacaagcaatacaagtactaaggtttcatcttttggagttagaaaaggtccacgaactgtgcgataacttctgccaccgatacattagctgtttgaaggggaaaatgcccatcgacctcgtcattgatgaaagagacggcagctccaagtcagatcatgaagaactttcaggctcctccacaaatctcgctgaccataacccttcttcttggcgagaccacgatgatgcaacctcaacccactcagcaggcaccccagggccctccagtgggggccatgcttcccagagcggagacaacagcagtgagcaaggggatggtttagacaacagtgtagcttcacctggtacaggtgacgatgatgatccggataaggacaaaaaacgccagaagaaaagaggcattttccccaaagtagcaacaaatatcatgagagcatggctcttccagcatctcacacatccgtacccttccgaagagcagaagaaacagttagcgcaagacacaggacttacaattctccaagtaaacaactggtttattaatgccagaagaagaatagtacagcccatgattgaccagtcaaatcgagcagtgagccaaggagcagcatatagtccagagggtcagcccatggggagctttgtgttggatggtcagcaacacatggggatccggcctgcaggacctatgagtggaatgggcatgaatatgggcatggatgggcaatggcactacatgtagtaatgaactagtccgtaacttgaaagtatttcgatttcttggctttatatatcttgtggaaaggacgataacgcgggagtgcgggtgttgat

SEQ ID NO: 2027 - DNA, 1268 bp, Homo sapiens
  source 1..1268: mol_type = genomic DNA
accgccaccatggacggagtaggggttcccgcttccatgtacggagaccctcacgcgccgcggccgatccccccggttcaccacctgaaccacgggccgccgctccacgccacacagcactacggcgcgcacgccccgcaccccaatgtcatgccggccagtatgggatccgctgtcaacgacgccttgaagcgggacaaggacgcgatctatgggcacccgttgtttcctctgttagctctggtctttgagaagtgcgagctggcgacctgcactccccgggaacctggagtggctggcggagacgtctgctcctccgactccttcaacgaggacatcgcggtcttcgccaagcaggttcgcgccgaaaagccacttttttcctcaaatccagagctggacaatttgatgatacaagcaatacaagtactaaggtttcatcttttggagttagaaaaggtccacgaactgtgcgataacttctgccaccgatacattagctgtttgaaggggaaaatgcccatcgacctcgtcattgatgaaagagacggcagctccaagtcagatcatgaagaactttcaggctcctccacaaatctcgctgaccataacccttcttcttggcgagaccacgatgatgcaacctcaacccactcagcaggcaccccagggccctccagtgggggccatgcttcccagagcggagacaacagcagtgagcaaggggatggtttagacaacagtgtagcttcacctggtacaggtgacgatgatgatccggataaggacaaaaaacgccagaagaaaagaggcattttccccaaagtagcaacaaatatcatgagagcatggctcttccagcatctcacacatccgtacccttccgaagagcagaagaaacagttagcgcaagacacaggacttacaattctccaagtaaacaactggtttattaatgccagaagaagaatagtacagcccatgattgaccagtcaaatcgagcaggttttcttcttgatccttcagtgagccaaggagcagcatatagtccagagggtcagcccatggggagctttgtgttggatggtcagcaacacatggggatccggcctgcaggacctatgagtggaatgggcatgaatatgggcatggatgggcaatggcactacatgtagtaatgaactagtccgtaacttgaaagtatttcgatttcttggctttatatatcttgtggaaaggacgacacgcgtggcatgtggatacagtg

SEQ ID NO: 2028 - DNA, 1274 bp, Homo sapiens
  source 1..1274: mol_type = genomic DNA
accgccaccatggcgcaaaggtacgacgatctaccccattacgggggcatggatggagtaggcatcccctccacgatgtatggggacccgcatgcagccaggtccatgcagccggtccaccacctgaaccacgggcctcctctgcactcgcatcagtacccgcacacagctcataccaacgccatggcccccagcatgggctcctctgtcaatgacgctttaaagagagataaagatgccatttatggacaccccctcttccctctcttagcactgatttttgagaaatgtgaattagctacttgtaccccccgcgagccgggggtggcgggcggggacgtctgctcgtcagagtcattcaatgaagatatagccgtgttcgccaaacagattcgcgcagaaaaacctctattttcttctaatccagaactggataacttgatgattcaagccatacaagtattaaggtttcatctattggaattagagaaggtacacgaattatgtgacaatttctgccaccggtatattagctgtttgaaagggaaaatgcctatcgatttggtgatagacgatagagaaggaggatcaaaatcagacagtgaagatataacaagatcagcaaatctaactgaccagccctcttggaacagagatcatgatgacacggcatctactcgttcaggaggaaccccaggcccttccagcggtggccacacgtcacacagtggggacaacagcagtgagcaaggtgatggcttggacaacagtgtagcttcccccagcacaggtgacgatgatgaccctgataaggacaaaaagcgtcacaaaaagcgtggcatctttcccaaagtagccacaaatatcatgagggcgtggctgttccagcatctaacacacccttacccttctgaagaacagaaaaagcagttggcacaagacacgggactcaccatccttcaagtgaacaattggtttattaatgcccggagaagaatagtgcagcccatgatagaccagtccaaccgagcagtaagtcaaggaacaccttataatcctgatggacagcccatgggaggtttcgtaatggacggtcagcaacatatgggaattagagcaccaggacctatgagtggaatgggcatgaatatgggcatggaggggcagtggcactacatgtagtaatgaactagtccgtaacttgaaagtatttcgatttcttggctttatatatcttgtggaaaggacgagtacattcggcctgtgggctcatt

SEQ ID NO: 2029 - DNA, 1079 bp, Homo sapiens
  source 1..1079: mol_type = genomic DNA
accgccaccatggctcagggcctccgacttcagggctccaggaggaaggggagacaccccctcttccctctcttagcactgatttttgagaaatgtgaattagctacttgtaccccccgcgagccgggggtggcgggcggggacgtctgctcgtcagagtcattcaatgaagatatagccgtgttcgccaaacagattcgcgcagaaaaacctctattttcttctaatccagaactggataacttgatgattcaagccatacaagtattaaggtttcatctattggaattagagaaggtacacgaattatgtgacaatttctgccaccggtatattagctgtttgaaagggaaaatgcctatcgatttggtgatagacgatagagaaggaggatcaaaatcagacagtgaagatataacaagatcagcaaatctaactgaccagccctcttggaacagagatcatgatgacacggcatctactcgttcaggaggaaccccaggcccttccagcggtggccacacgtcacacagtggggacaacagcagtgagcaaggtgatggcttggacaacagtgtagcttcccccagcacaggtgacgatgatgaccctgataaggacaaaaagcgtcacaaaaagcgtggcatctttcccaaagtagccacaaatatcatgagggcgtggctgttccagcatctaacacacccttacccttctgaagaacagaaaaagcagttggcacaagacacgggactcaccatccttcaagtgaacaattggtttattaatgcccggagaagaatagtgcagcccatgatagaccagtccaaccgagcagtaagtcaaggaacaccttataatcctgatggacagcccatgggaggtttcgtaatggacggtcagcaacatatgggaattagagcaccaggacctatgagtggaatgggcatgaatatgggcatggaggggcagtggcactacatgtagtaatgaactagtccgtaacttgaaagtatttcgatttcttggctttatatatcttgtggaaaggacgagcctcgacgtcgggcgctcatatt

SEQ ID NO: 2030 - DNA, 2339 bp, Homo sapiens
  source 1..2339: mol_type = genomic DNA
accgccaccatggaggtgatgaacctgatggagcagcctatcaaggtgactgagtggcagcagacatacacctacgactcgggtatccactcgggcgccaacacctgcgtgccctccgtcagcagcaagggcatcatggaggaggatgaggcctgcgggcgccagtacacgctcaagaaaaccaccacttacacccagggggtgccccccagccaaggtgatctggagtaccagatgtccacaacagccagggccaaacgggtgcgggaggccatgtgccctggtgtgtcaggcgaggacagctcgcttctgctggccacccaggtggaggggcaggccaccaacctgcagcgactggccgagccgtcccagctgctcaagtcggccattgtgcatctcatcaactaccaggacgatgccgagctggccactcgcgccctgcccgagctcaccaaactgctcaacgacgaggacccggtggtggtgaccaaggcggccatgattgtgaaccagctgtcgaagaaggaggcgtcgcggcgggccctgatgggctcgccccagctggtggccgctgtcgtgcgtaccatgcagaataccagcgacctggacacagcccgctgcaccaccagcatcctgcacaacctctcccaccaccgggaggggctgctcgccatcttcaagtcgggtggcatccctgctctggtccgcatgctcagctcccctgtggagtcggtcctgttctatgccatcaccacgctgcacaacctgctcctgtaccaggagggcgccaagatggccgtgcgcctggccgacgggctgcaaaagatggtgcccctgctcaacaagaacaaccccaagttcctggccatcaccaccgactgcctgcagctcctggcctacggcaaccaggagagcaagctgatcatcctggccaatggtgggccccaggccctcgtgcagatcatgcgtaactacagttatgaaaagctgctctggaccaccagtcgtgtgctcaaggtgctatccgtgtgtcccagcaataagcctgccattgtggaggctggtgggatgcaggccctgggcaagcacctgaccagcaacagcccccgcctggtgcagaactgcctgtggaccctgcgcaacctctcagatgtggccaccaagcaggagggcctggagagtgtgctgaagattctggtgaatcagctgagtgtggatgacgtcaacgtcctcacctgtgccacgggcacactctccaacctgacatgcaacaacagcaagaacaagacgctggtgacacagaacagcggtgtggaggctctcatccatgccatcctgcgtgctggtgacaaggacgacatcacggagcctgccgtctgcgctctgcgccacctcactagccgccaccctgaggccgagatggcccagaactctgtgcgtctcaactatggcatcccagccatcgtgaagctgctcaaccagcccaaccagtggccactggtcaaggcaaccatcggcttgatcaggaatctggccctgtgcccagccaaccatgccccgctgcaggaggcagcggtcatcccccgcctcgtccaactgctggtgaaggcccaccaggatgcccagcgccacgtagctgcaggcacacagcagccctacacggatggtgtgaggatggaggagattgtggagggctgcaccggagcactgcacatcctcgcccgggaccccatgaaccgcatggagatcttccggctcaacaccattcccctgtttgtgcagctcctgtactcgtcggtggagaacatccagcgcgtggctgccggggtgctgtgtgagctggcccaggacaaggaggcggccgacgccattgatgcagagggggcctcggccccactcatggagttgctgcactcccgcaacgagggcactgccacctacgctgctgccgtcctgttccgcatctccgaggacaagaacccagactaccggaagcgcgtgtccgtggagctcaccaactccctcttcaagcatgacccggctgcctgggaggctgcccagagcatgattcccatcaatgagccctatggagatgacatggatgccacctaccgccccatgtactccagcgatgtgccccttgacccgctggagatgcacatggacatggatggagactaccccatcgacacctacagcgacggcctcaggcccccgtaccccactgcagaccacatgctggcctagtaatgaactagtccgtaacttgaaagtatttcgatttcttggctttatatatcttgtggaaaggacgagtgcacctcgacatctagttatac

SEQ ID NO: 2031 - DNA, 1454 bp, Homo sapiens
  source 1..1454: mol_type = genomic DNA
accgccaccatgtttatgtttaattggtttacagactgtctgtggactcttttcctgtcaaattaccagccatctgttgaatcttcaagtccaggaggttcagcaacatcagatgaccatgaatttgatccatcagctgacatgctggttcatgattttgatgatgaacgaacattagaagaggaagaaatgatggaaggagaaacaaacttcagctctgaaatagaagatcttgcaagggaaggcgacatgccaattcatgaacttctcagcctttatggttatggtagtactgttcgactacctgaagaagatgaggaagaggaagaagaggaagaagaaggtgaagatgatgaagatgctgataatgatgacaacagtggctgtagtggggaaaataaagaggagaatataaaggattcatcaggtcaggaggatgaaactcagtcttccaatgatgatccatcacaatctgttgcttctcaagatgcccaggaaataatccgcccacgtcgatgtaaatattttgatacaaatagtgaagtagaagaagaatctgaagaagatgaagattatattccatcagaagactggaaaaaggagattatggtgggctccatgtttcaagcagaaattccagttggcatttgtagatacaaagaaaatgaaaaagtatatgaaaatgatgatcagctcctgtgggaccctgagtacttaccagaagataaagtgattatatttcttaaagatgcatctagaagaacaggtgatgagaagggtgtagaagcaattcctgaaggatctcacataaaagacaatgaacaggctttatatgaattggttaaatgcaattttgatacagaagaagcattgagaagattaagatttaatgtaaaagcagctagagaggaattatctgtttggacagaggaagagtgtagaaattttgaacaagggctgaaggcctatggaaaggattttcatttgattcaggctaataaagtccgaacaaggtcagttggtgaatgtgtagcattctattacatgtggaaaaaatctgaacgttatgatttctttgctcagcaaacacgatttggaaagaagaaatataatcttcatcctggtgtaacggattacatggatcgtcttctagacgaaagtgaaagtgctgcatctagtcgagcaccatcccctcccccaactgcatcaaacagtagtaacagccagtctgagaaagaagatggcactgtaagcactgctaatcaaaatggagtgtcatctaatggaccaggcatactccaaatgcttcttccagttcatttttcagccatcagttcaagagccaatgcctttttaaaatagtaatgaactagtccgtaacttgaaagtatttcgatttcttggctttatatatcttgtggaaaggacgaccgaacgggcgttgcatagtaaag

SEQ ID NO: 2032 - DNA, 1691 bp, Homo sapiens
  source 1..1691: mol_type = genomic DNA
accgccaccatgtttatgtttaattggtttacagactgtctgtggactcttttcctgtcaaattaccagccatctgttgaatcttcaagtccaggaggttcagcaacatcagatgaccatgaatttgatccatcagctgacatgctggttcatgattttgatgatgaacgaacattagaagaggaagaaatgatggaaggagaaacaaacttcagctctgaaatagaagatcttgcaagggaaggcgacatgccaattcatgaacttctcagcctttatggttatggtagtactgttcgactacctgaagaagatgaggaagaggaagaagaggaagaagaaggtgaagatgatgaagatgctgataatgatgacaacagtggctgtagtggggaaaataaagaggagaatataaaggattcatcaggtcaggaggatgaaactcagtcttccaatgatgatccatcacaatctgttgcttctcaagatgcccaggaaataatccgcccacgtcgatgtaaatattttgatacaaatagtgaagtagaagaagaatctgaagaagatgaagattatattccatcagaagactggaaaaaggagattatggtgggctccatgtttcaagcagaaattccagttggcatttgtagatacaaagaaaatgaaaaagtatatgaaaatgatgatcagctcctgtgggaccctgagtacttaccagaagataaagtgattatatttcttaaagatgcatctagaagaacaggtgatgagaagggtgtagaagcaattcctgaaggatctcacataaaagacaatgaacaggctttatatgaattggttaaatgcaattttgatacagaagaagcattgagaagattaagatttaatgtaaaagcagctagagaggaattatctgtttggacagaggaagagtgtagaaattttgaacaagggctgaaggcctatggaaaggattttcatttgattcaggctaataaagtccgaacaaggtcagttggtgaatgtgtagcattctattacatgtggaaaaaatctgaacgttatgatttctttgctcagcaaacacgatttggaaagaagaaatataatcttcatcctggtgtaacggattacatggatcgtcttctagacgaaagtgaaagtgctgcatctagtcgagcaccatcccctcccccaactgcatcaaacagtagtaacagccagtctgagaaagaagatggcactgtaagcactgctaatcaaaatggagtgtcatctaatggaccaggtgaaatattaaacaaagaggaagtaaaagttgaagggttacacattaatggaccaacaggtggaaataagaaaccacttcatgcagatatggatactaatggttatgaaacagataaccttaccactgacccaaaacttgcccatatgactgcaagaaatgaaaatgattttgatgaaaaaagtgagagacctgccaaaaggcgaagggtaaacagcaatggaaaagaaagtccaggttcttctgaatttttccaagaagcagtctcacatgggaaatttgaagaacttgaaaacacagatgactagtaatgaactagtccgtaacttgaaagtatttcgatttcttggctttatatatcttgtggaaaggacgacgatttcaccgggcactgccactt

SEQ ID NO: 2033 - DNA, 1403 bp, Homo sapiens
  source 1..1403: mol_type = genomic DNA
accgccaccatggcggagccatctgttgaatcttcaagtccaggaggttcagcaacatcagatgaccatgaatttgatccatcagctgacatgctggttcatgattttgatgatgaacgaacattagaagaggaagaaatgatggaaggagaaacaaacttcagctctgaaatagaagatcttgcaagggaaggcgacatgccaattcatgaacttctcagcctttatggttatggtagtactgttcgactacctgaagaagatgaggaagaggaagaagaggaagaagaaggtgaagatgatgaagatgctgataatgatgacaacagtggctgtagtggggaaaataaagaggagaatataaaggattcatcaggtcaggaggatgaaactcagtcttccaatgatgatccatcacaatctgttgcttctcaagatgcccaggaaataatccgcccacgtcgatgtaaatattttgatacaaatagtgaagtagaagaagaatctgaagaagatgaagattatattccatcagaagactggaaaaaggagattatggtgggctccatgtttcaagcagaaattccagttggcatttgtagatacaaagaaaatgaaaaagtatatgaaaatgatgatcagctcctgtgggaccctgagtacttaccagaagataaagtgattatatttcttaaagatgcatctagaagaacaggtgatgagaagggtgtagaagcaattcctgaaggatctcacataaaagacaatgaacaggctttatatgaattggttaaatgcaattttgatacagaagaagcattgagaagattaagatttaatgtaaaagcagctagagaggaattatctgtttggacagaggaagagtgtagaaattttgaacaagggctgaaggcctatggaaaggattttcatttgattcaggctaataaagtccgaacaaggtcagttggtgaatgtgtagcattctattacatgtggaaaaaatctgaacgttatgatttctttgctcagcaaacacgatttggaaagaagaaatataatcttcatcctggtgtaacggattacatggatcgtcttctagacgaaagtgaaagtgctgcatctagtcgagcaccatcccctcccccaactgcatcaaacagtagtaacagccagtctgagaaagaagatggcactgtaagcactgctaatcaaaatggagtgtcatctaatggaccaggcatactccaaatgcttcttccagttcatttttcagccatcagttcaagagccaatgcctttttaaaatagtaatgaactagtccgtaacttgaaagtatttcgatttcttggctttatatatcttgtggaaaggacgaactttgggccgatttctgacgagt

SEQ ID NO: 2034 - DNA, 1514 bp, Homo sapiens
  source 1..1514: mol_type = genomic DNA
accgccaccatgtttatgtttaattggtttacagactgtctgtggactcttttcctgtcaaattaccagccatctgttgaatcttcaagtccaggaggttcagcaacatcagatgaccatgaatttgatccatcagctgacatgctggttcatgattttgatgatgaacgaacattagaagaggaagaaatgatggaaggagaaacaaacttcagctctgaaatagaagatcttgcaagggaaggcgacatgccaattcatgaacttctcagcctttatggttatggtagtactgttcgactacctgaagaagatgaggaagaggaagaagaggaagaagaaggtgaagatgatgaagatgctgataatgatgacaacagtggctgtagtggggaaaataaagaggagaatataaaggattcatcaggtcaggaggatgaaactcagtcttccaatgatgatccatcacaatctgttgcttctcaagatgcccaggaaataatccgcccacgtcgatgtaaatattttgatacaaatagtgaagtagaagaagaatctgaagaagatgaagattatattccatcagaagactggaaaaaggagattatggtgggctccatgtttcaagcagaaattccagttggcatttgtagatacaaagaaaatgaaaaagtatatgaaaatgatgatcagctcctgtgggaccctgagtacttaccagaagataaagtgattatatttcttaaagatgcatctagaagaacaggtgatgagaagggtgtagaagcaattcctgaaggatctcacataaaagacaatgaacaggctttatatgaattggttaaatgcaattttgatacagaagaagcattgagaagattaagatttaatgtaaaagcagctagagaggaattatctgtttggacagaggaagagtgtagaaattttgaacaagggctgaaggcctatggaaaggattttcatttgattcaggctaataaagtccgaacaaggtcagttggtgaatgtgtagcattctattacatgtggaaaaaatctgaacgttatgatttctttgctcagcaaacacgatttggaaagaagaaatataatcttcatcctggtgtaacggattacatggatcgtcttctagacgaaagtgaaagtgctgcatctagtcgagcaccatcccctcccccaactgcatcaaacagtagtaacagccagtctgagaaagaagatggcactgtaagcactgctaatcaaaatggagtgtcatctaatggaccaggtgaaatattaaacaaagaggaagtaaaagttgaagggttacacattaatggaccaacaggcatactccaaatgcttcttccagttcatttttcagccatcagttcaagagccaatgcctttttaaaatagtaatgaactagtccgtaacttgaaagtatttcgatttcttggctttatatatcttgtggaaaggacgagtgtccgtttagtactgtttcacc

SEQ ID NO: 2035 - DNA, 1640 bp, Homo sapiens
  source 1..1640: mol_type = genomic DNA
accgccaccatggcggagccatctgttgaatcttcaagtccaggaggttcagcaacatcagatgaccatgaatttgatccatcagctgacatgctggttcatgattttgatgatgaacgaacattagaagaggaagaaatgatggaaggagaaacaaacttcagctctgaaatagaagatcttgcaagggaaggcgacatgccaattcatgaacttctcagcctttatggttatggtagtactgttcgactacctgaagaagatgaggaagaggaagaagaggaagaagaaggtgaagatgatgaagatgctgataatgatgacaacagtggctgtagtggggaaaataaagaggagaatataaaggattcatcaggtcaggaggatgaaactcagtcttccaatgatgatccatcacaatctgttgcttctcaagatgcccaggaaataatccgcccacgtcgatgtaaatattttgatacaaatagtgaagtagaagaagaatctgaagaagatgaagattatattccatcagaagactggaaaaaggagattatggtgggctccatgtttcaagcagaaattccagttggcatttgtagatacaaagaaaatgaaaaagtatatgaaaatgatgatcagctcctgtgggaccctgagtacttaccagaagataaagtgattatatttcttaaagatgcatctagaagaacaggtgatgagaagggtgtagaagcaattcctgaaggatctcacataaaagacaatgaacaggctttatatgaattggttaaatgcaattttgatacagaagaagcattgagaagattaagatttaatgtaaaagcagctagagaggaattatctgtttggacagaggaagagtgtagaaattttgaacaagggctgaaggcctatggaaaggattttcatttgattcaggctaataaagtccgaacaaggtcagttggtgaatgtgtagcattctattacatgtggaaaaaatctgaacgttatgatttctttgctcagcaaacacgatttggaaagaagaaatataatcttcatcctggtgtaacggattacatggatcgtcttctagacgaaagtgaaagtgctgcatctagtcgagcaccatcccctcccccaactgcatcaaacagtagtaacagccagtctgagaaagaagatggcactgtaagcactgctaatcaaaatggagtgtcatctaatggaccaggtgaaatattaaacaaagaggaagtaaaagttgaagggttacacattaatggaccaacaggtggaaataagaaaccacttcatgcagatatggatactaatggttatgaaacagataaccttaccactgacccaaaacttgcccatatgactgcaagaaatgaaaatgattttgatgaaaaaagtgagagacctgccaaaaggcgaagggtaaacagcaatggaaaagaaagtccaggttcttctgaatttttccaagaagcagtctcacatgggaaatttgaagaacttgaaaacacagatgactagtaatgaactagtccgtaacttgaaagtatttcgatttcttggctttatatatcttgtggaaaggacgagttatctttaatgaggcctccatg

SEQ ID NO: 2036 - DNA, 1562 bp, Homo sapiens
  source 1..1562: mol_type = genomic DNA
accgccaccatggatggggcttcttcaggcggtggcggcagcagcgaaggtggcggcggcagcagcggcagcggctatggtgtggtcgctcgattctcccagtgcctggctgagtttcggacgtggttaagaaccaactggttgaggttcaatgcagacaagacggatgtgatgctgccatctgttgaatcttcaagtccaggaggttcagcaacatcagatgaccatgaatttgatccatcagctgacatgctggttcatgattttgatgatgaacgaacattagaagaggaagaaatgatggaaggagaaacaaacttcagctctgaaatagaagatcttgcaagggaaggcgacatgccaattcatgaacttctcagcctttatggttatggtagtactgttcgactacctgaagaagatgaggaagaggaagaagaggaagaagaaggtgaagatgatgaagatgctgataatgatgacaacagtggctgtagtggggaaaataaagaggagaatataaaggattcatcaggtcaggaggatgaaactcagtcttccaatgatgatccatcacaatctgttgcttctcaagatgcccaggaaataatccgcccacgtcgatgtaaatattttgatacaaatagtgaagtagaagaagaatctgaagaagatgaagattatattccatcagaagactggaaaaaggagattatggtgggctccatgtttcaagcagaaattccagttggcatttgtagatacaaagaaaatgaaaaagtatatgaaaatgatgatcagctcctgtgggaccctgagtacttaccagaagataaagtgattatatttcttaaagatgcatctagaagaacaggtgatgagaagggtgtagaagcaattcctgaaggatctcacataaaagacaatgaacaggctttatatgaattggttaaatgcaattttgatacagaagaagcattgagaagattaagatttaatgtaaaagcagctagagaggaattatctgtttggacagaggaagagtgtagaaattttgaacaagggctgaaggcctatggaaaggattttcatttgattcaggctaataaagtccgaacaaggtcagttggtgaatgtgtagcattctattacatgtggaaaaaatctgaacgttatgatttctttgctcagcaaacacgatttggaaagaagaaatataatcttcatcctggtgtaacggattacatggatcgtcttctagacgaaagtgaaagtgctgcatctagtcgagcaccatcccctcccccaactgcatcaaacagtagtaacagccagtctgagaaagaagatggcactgtaagcactgctaatcaaaatggagtgtcatctaatggaccaggcatactccaaatgcttcttccagttcatttttcagccatcagttcaagagccaatgcctttttaaaatagtaatgaactagtccgtaacttgaaagtatttcgatttcttggctttatatatcttgtggaaaggacgatactacgtcttcaaatgaacaggc

SEQ ID NO: 2037 - DNA, 347 bp, Homo sapiens
  source 1..347: mol_type = genomic DNA
accgccaccatgtttatgtttaattggtttacagactgtctgtggactcttttcctgtcaaattaccagccatctgttgaatcttcaagtccaggaggttcagcaacatcagatgaccatgaatttgatccatcagctgacatgctggttcatgattttgatgatgaacgaacattagaagaggaagaaatgatggaaggagaaacaaacttcagctctgaaatagaagatcttgcaagggtaaataacatgtagtaatgaactagtccgtaacttgaaagtatttcgatttcttggctttatatatcttgtggaaaggacgatgtcccttaggctatgcattggga

SEQ ID NO: 2038 - DNA, 1799 bp, Homo sapiens
  source 1..1799: mol_type = genomic DNA
accgccaccatggatggggcttcttcaggcggtggcggcagcagcgaaggtggcggcggcagcagcggcagcggctatggtgtggtcgctcgattctcccagtgcctggctgagtttcggacgtggttaagaaccaactggttgaggttcaatgcagacaagacggatgtgatgctgccatctgttgaatcttcaagtccaggaggttcagcaacatcagatgaccatgaatttgatccatcagctgacatgctggttcatgattttgatgatgaacgaacattagaagaggaagaaatgatggaaggagaaacaaacttcagctctgaaatagaagatcttgcaagggaaggcgacatgccaattcatgaacttctcagcctttatggttatggtagtactgttcgactacctgaagaagatgaggaagaggaagaagaggaagaagaaggtgaagatgatgaagatgctgataatgatgacaacagtggctgtagtggggaaaataaagaggagaatataaaggattcatcaggtcaggaggatgaaactcagtcttccaatgatgatccatcacaatctgttgcttctcaagatgcccaggaaataatccgcccacgtcgatgtaaatattttgatacaaatagtgaagtagaagaagaatctgaagaagatgaagattatattccatcagaagactggaaaaaggagattatggtgggctccatgtttcaagcagaaattccagttggcatttgtagatacaaagaaaatgaaaaagtatatgaaaatgatgatcagctcctgtgggaccctgagtacttaccagaagataaagtgattatatttcttaaagatgcatctagaagaacaggtgatgagaagggtgtagaagcaattcctgaaggatctcacataaaagacaatgaacaggctttatatgaattggttaaatgcaattttgatacagaagaagcattgagaagattaagatttaatgtaaaagcagctagagaggaattatctgtttggacagaggaagagtgtagaaattttgaacaagggctgaaggcctatggaaaggattttcatttgattcaggctaataaagtccgaacaaggtcagttggtgaatgtgtagcattctattacatgtggaaaaaatctgaacgttatgatttctttgctcagcaaacacgatttggaaagaagaaatataatcttcatcctggtgtaacggattacatggatcgtcttctagacgaaagtgaaagtgctgcatctagtcgagcaccatcccctcccccaactgcatcaaacagtagtaacagccagtctgagaaagaagatggcactgtaagcactgctaatcaaaatggagtgtcatctaatggaccaggtgaaatattaaacaaagaggaagtaaaagttgaagggttacacattaatggaccaacaggtggaaataagaaaccacttcatgcagatatggatactaatggttatgaaacagataaccttaccactgacccaaaacttgcccatatgactgcaagaaatgaaaatgattttgatgaaaaaagtgagagacctgccaaaaggcgaagggtaaacagcaatggaaaagaaagtccaggttcttctgaatttttccaagaagcagtctcacatgggaaatttgaagaacttgaaaacacagatgactagtaatgaactagtccgtaacttgaaagtatttcgatttcttggctttatatatcttgtggaaaggacgacaggagttgcggtagagcccaatt

SEQ ID NO: 2039 - DNA, 1739 bp, Homo sapiens
  source 1..1739: mol_type = genomic DNA
accgccaccatggcggaggcctcctcgctggggaggcagagtcctcgcgtggtctcctgcctcgagcacagcctgtgcccaggggagccgggcttgcagacaacagcagtggtgtccatgggctctggagaccatcagttcaacctcgcagagatcctgtcacagaactacagtgttaggggggagtgcgaggaggcctcgaggtgcccagacaagcccaaggaggagctggagaaggacttcatctcccagagcaacgacatgccctttgatgagctgcttgcgctctatggctacgaggcgtcagaccccatttcagaccgggagagtgagggtggtgacgtggccccgaacctcccagacatgaccctggacaaagaacaaatagcgaaggatttgctttcaggggaagaagaggaagagacgcaatcatctgctgacgacctcaccccgtccgtgacctcccacgaggcctccgacctcttccctaaccggagtggatctcgtttcctggctgatgaagacagagagcctggctcttctgcctcctccgacaccgaggaggactctcttcctgccaacaaatgtaagaaggagatcatggtgggacctcagttccaagctgacctcagcaacctgcacttgaaccggcactgtgagaagatctacgagaacgaagaccagctgctctgggaccccagcgtcctccctgagagggaggtggaggagttcctgtacagggcggtgaagcggcgttggcacgagatggccgggcctcagctcccagagggagaagccgtgaaagacagtgagcaggcgctgtacgagttggtgaaatgcaacttcaatgtggaggaggccctgcgaaggctgcggttcaacgtgaaggtgatccgagatgggctctgtgcttggagtgaagaggagtgcaggaactttgagcacggcttccgtgtgcatggaaagaactttcacctgatccaggccaacaaggtgcgcacacggtcagtgggcgagtgtgtcgagtactactacctgtggaagaagtcggagcgctacgactacttcgcccagcagacgcggctgggccggaggaagtacgtcccgtccggaaccacggacgcagaccaggacctggatggcagcgaccccgatggccccggccgtccgcgcccggagcaagacaccctgactgggatgcgcacagatccactgagcgtggatggcacggccggtggtctcgatgagcccggagtggcctctgatggactcccgtcctcggagccagggccgtgttccttccagcagctggatgagtcccccgctgtacccctgtcccatcggcccccagccctggccgacccagcctcataccagccagctgtcactgctccggagccagacgccagcccaaggctggccgtggacttcgccctgcccaaggagctgcccctcatctccagccatgtggacctcagcggggatccggaggagactgtggccccagcacaggtggctttgtcggtcaccgagtttggactcatcggcattggggacgtgaaccccttcctggccgcccaccccacgtgcccggcccccgggctacactcggagcccctgtcacactgtaacgtgatgacctgctagtaatgaactagtccgtaacttgaaagtatttcgatttcttggctttatatatcttgtggaaaggacgaataagagacgacggtgccatatat

SEQ ID NO: 2040 - DNA, 1769 bp, Homo sapiens
  source 1..1769: mol_type = genomic DNA
accgccaccatggcggaggcttcttttggaagttcgagcccagtttgttttattccagttgggtctttgtcttctgaggatcatgattttgaccccactgctgagatgttggtccatgactatgatgatgaaagaactcttgaagaagaggaaatgatggatgagggtaaaaacttcagttcagaaattgaagacttagaaaaggaaggaaccatgcctctagaagatttactggcattctatggctatgaacctacaattccagcagttgcaaattccagtgcaaatagttccccaagtgaactggcagatgaactaccagacatgacactagacaaagaggaaatagcaaaagacctgttgtcaggtgatgacgaggaaactcagtcttctgcggatgatctgacgccatctgtgacttcccatgaaacttctgatttcttccctaggcctttacgatcaaatactgcatgtgatggtgataaggaatcagaggttgaagatgttgaaacagacagtggtaattcacctgaagatttgaggaaggaaataatgattggtttacaatatcaggcagagattcccccttatcttggagagtacgatggtaatgagaaagtatatgaaaacgaagaccagttactttggtgtcctgatgtggttttggagagcaaagttaaggaataccttgttgagacttcattaaggactggcagtgaaaaaataatggataggatttctgcaggaacacacacaagggacaatgaacaggcattatatgaacttctcaagtgtaaccacaatataaaggaagcaatcgaaagatactgctgcaatggaaaggcctctcaagaaggaatgactgcatggacggaagaagaatgccgaagctttgaacatgcactcatgctttttggaaaagattttcatcttatacagaagaataaggtgagaactaggacagttgctgagtgtgtagcattctactatatgtggaagaaatctgaacgttatgattactttgctcaacagacaagatttgggaaaaaaagatataaccatcaccctggagttacggactatatggatcgtttagtagatgaaacagaagctttgggtgggacggtaaatgcttcagccttaacttctaaccggcctgagcctattcctgatcaacagctaaacattctcaactccttcactgccagtgacttgacagctttgaccaacagtgtagcaaccgtctgcgaccccacagatgtgaattgtttggatgatagctttcctccactgggcaacacaccccgtggacaagttaatcatgtgcctgttgtaacagaagagttactcaccctgcccagcaatggggaaagtgattgttttaatttatttgagactggattttatcactcggagctaaaccctatgaacatgtgcagtgaagagtcagagagaccagcaaaaagattgaaaatgggcattgccgtccctgaatcctttatgaatgaagtttctgtaaataacctgggtgtggactttgaaaatcacacacatcacatcaccagtgccaaaatggctgtttctgtggctgactttggcagtctctctgccaacgagaccaatggtttcatcagtgcccatgctctgcatcagcacgcggccctacactctgagtagtaatgaactagtccgtaacttgaaagtatttcgatttcttggctttatatatcttgtggaaaggacgataatggagcgtcgcatagggtttg

SEQ ID NO: 2041 - DNA, 1751 bp, Homo sapiens
  source 1..1751: mol_type = genomic DNA
accgccaccatggcggaggcttcttttggaagttcgagcccagttgggtctttgtcttctgaggatcatgattttgaccccactgctgagatgttggtccatgactatgatgatgaaagaactcttgaagaagaggaaatgatggatgagggtaaaaacttcagttcagaaattgaagacttagaaaaggaaggaaccatgcctctagaagatttactggcattctatggctatgaacctacaattccagcagttgcaaattccagtgcaaatagttccccaagtgaactggcagatgaactaccagacatgacactagacaaagaggaaatagcaaaagacctgttgtcaggtgatgacgaggaaactcagtcttctgcggatgatctgacgccatctgtgacttcccatgaaacttctgatttcttccctaggcctttacgatcaaatactgcatgtgatggtgataaggaatcagaggttgaagatgttgaaacagacagtggtaattcacctgaagatttgaggaaggaaataatgattggtttacaatatcaggcagagattcccccttatcttggagagtacgatggtaatgagaaagtatatgaaaacgaagaccagttactttggtgtcctgatgtggttttggagagcaaagttaaggaataccttgttgagacttcattaaggactggcagtgaaaaaataatggataggatttctgcaggaacacacacaagggacaatgaacaggcattatatgaacttctcaagtgtaaccacaatataaaggaagcaatcgaaagatactgctgcaatggaaaggcctctcaaggaatgactgcatggacggaagaagaatgccgaagctttgaacatgcactcatgctttttggaaaagattttcatcttatacagaagaataaggtgagaactaggacagttgctgagtgtgtagcattctactatatgtggaagaaatctgaacgttatgattactttgctcaacagacaagatttgggaaaaaaagatataaccatcaccctggagttacggactatatggatcgtttagtagatgaaacagaagctttgggtgggacggtaaatgcttcagccttaacttctaaccggcctgagcctattcctgatcaacagctaaacattctcaactccttcactgccagtgacttgacagctttgaccaacagtgtagcaaccgtctgcgaccccacagatgtgaattgtttggatgatagctttcctccactgggcaacacaccccgtggacaagttaatcatgtgcctgttgtaacagaagagttactcaccctgcccagcaatggggaaagtgattgttttaatttatttgagactggattttatcactcggagctaaaccctatgaacatgtgcagtgaagagtcagagagaccagcaaaaagattgaaaatgggcattgccgtccctgaatcctttatgaatgaagtttctgtaaataacctgggtgtggactttgaaaatcacacacatcacatcaccagtgccaaaatggctgtttctgtggctgactttggcagtctctctgccaacgagaccaatggtttcatcagtgcccatgctctgcatcagcacgcggccctacactctgagtagtaatgaactagtccgtaacttgaaagtatttcgatttcttggctttatatatcttgtggaaaggacgatcttatccgtgaggtcggagccaa

SEQ ID NO: 2042 - DNA, 1754 bp, Homo sapiens
  source 1..1754: mol_type = genomic DNA
accgccaccatggcggaggcttcttttggaagttcgagcccagttgggtctttgtcttctgaggatcatgattttgaccccactgctgagatgttggtccatgactatgatgatgaaagaactcttgaagaagaggaaatgatggatgagggtaaaaacttcagttcagaaattgaagacttagaaaaggaaggaaccatgcctctagaagatttactggcattctatggctatgaacctacaattccagcagttgcaaattccagtgcaaatagttccccaagtgaactggcagatgaactaccagacatgacactagacaaagaggaaatagcaaaagacctgttgtcaggtgatgacgaggaaactcagtcttctgcggatgatctgacgccatctgtgacttcccatgaaacttctgatttcttccctaggcctttacgatcaaatactgcatgtgatggtgataaggaatcagaggttgaagatgttgaaacagacagtggtaattcacctgaagatttgaggaaggaaataatgattggtttacaatatcaggcagagattcccccttatcttggagagtacgatggtaatgagaaagtatatgaaaacgaagaccagttactttggtgtcctgatgtggttttggagagcaaagttaaggaataccttgttgagacttcattaaggactggcagtgaaaaaataatggataggatttctgcaggaacacacacaagggacaatgaacaggcattatatgaacttctcaagtgtaaccacaatataaaggaagcaatcgaaagatactgctgcaatggaaaggcctctcaagaaggaatgactgcatggacggaagaagaatgccgaagctttgaacatgcactcatgctttttggaaaagattttcatcttatacagaagaataaggtgagaactaggacagttgctgagtgtgtagcattctactatatgtggaagaaatctgaacgttatgattactttgctcaacagacaagatttgggaaaaaaagatataaccatcaccctggagttacggactatatggatcgtttagtagatgaaacagaagctttgggtgggacggtaaatgcttcagccttaacttctaaccggcctgagcctattcctgatcaacagctaaacattctcaactccttcactgccagtgacttgacagctttgaccaacagtgtagcaaccgtctgcgaccccacagatgtgaattgtttggatgatagctttcctccactgggcaacacaccccgtggacaagttaatcatgtgcctgttgtaacagaagagttactcaccctgcccagcaatggggaaagtgattgttttaatttatttgagactggattttatcactcggagctaaaccctatgaacatgtgcagtgaagagtcagagagaccagcaaaaagattgaaaatgggcattgccgtccctgaatcctttatgaatgaagtttctgtaaataacctgggtgtggactttgaaaatcacacacatcacatcaccagtgccaaaatggctgtttctgtggctgactttggcagtctctctgccaacgagaccaatggtttcatcagtgcccatgctctgcatcagcacgcggccctacactctgagtagtaatgaactagtccgtaacttgaaagtatttcgatttcttggctttatatatcttgtggaaaggacgatgggacacgctatcgctcactgct

SEQ ID NO: 2043 - DNA, 3146 bp, Homo sapiens
  source 1..3146: mol_type = genomic DNA
accgccaccatggcggagtcttcggataagctctatcgagtcgagtacgccaagagcgggcgcgcctcttgcaagaaatgcagcgagagcatccccaaggactcgctccggatggccatcatggtgcagtcgcccatgtttgatggaaaagtcccacactggtaccacttctcctgcttctggaaggtgggccactccatccggcaccctgacgttgaggtggatgggttctctgagcttcggtgggatgaccagcagaaagtcaagaagacagcggaagctggaggagtgacaggcaaaggccaggatggaattggtagcaaggcagagaagactctgggtgactttgcagcagagtatgccaagtccaacagaagtacgtgcaaggggtgtatggagaagatagaaaagggccaggtgcgcctgtccaagaagatggtggacccggagaagccacagctaggcatgattgaccgctggtaccatccaggctgctttgtcaagaacagggaggagctgggtttccggcccgagtacagtgcgagtcagctcaagggcttcagcctccttgctacagaggataaagaagccctgaagaagcagctcccaggagtcaagagtgaaggaaagagaaaaggcgatgaggtggatggagtggatgaagtggcgaagaagaaatctaaaaaagaaaaagacaaggatagtaagcttgaaaaagccctaaaggctcagaacgacctgatctggaacatcaaggacgagctaaagaaagtgtgttcaactaatgacctgaaggagctactcatcttcaacaagcagcaagtgccttctggggagtcggcgatcttggaccgagtagctgatggcatggtgttcggtgccctccttccctgcgaggaatgctcgggtcagctggtcttcaagagcgatgcctattactgcactggggacgtcactgcctggaccaagtgtatggtcaagacacagacacccaaccggaaggagtgggtaaccccaaaggaattccgagaaatctcttacctcaagaaattgaaggttaaaaaacaggaccgtatattccccccagaaaccagcgcctccgtggcggccacgcctccgccctccacagcctcggctcctgctgctgtgaactcctctgcttcagcagataagccattatccaacatgaagatcctgactctcgggaagctgtcccggaacaaggatgaagtgaaggccatgattgagaaactcggggggaagttgacggggacggccaacaaggcttccctgtgcatcagcaccaaaaaggaggtggaaaagatgaataagaagatggaggaagtaaaggaagccaacatccgagttgtgtctgaggacttcctccaggacgtctccgcctccaccaagagccttcaggagttgttcttagcgcacatcttgtccccttggggggcagaggtgaaggcagagcctgttgaagttgtggccccaagagggaagtcaggggctgcgctctccaaaaaaagcaagggccaggtcaaggaggaaggtatcaacaaatctgaaaagagaatgaaattaactcttaaaggaggagcagctgtggatcctgattctggactggaacactctgcgcatgtcctggagaaaggtgggaaggtcttcagtgccacccttggcctggtggacatcgttaaaggaaccaactcctactacaagctgcagcttctggaggacgacaaggaaaacaggtattggatattcaggtcctggggccgtgtgggtacggtgatcggtagcaacaaactggaacagatgccgtccaaggaggatgccattgagcacttcatgaaattatatgaagaaaaaaccgggaacgcttggcactccaaaaatttcacgaagtatcccaaaaagttctaccccctggagattgactatggccaggatgaagaggcagtgaagaagctgacagtaaatcctggcaccaagtccaagctccccaagccagttcaggacctcatcaagatgatctttgatgtggaaagtatgaagaaagccatggtggagtatgagatcgaccttcagaagatgcccttggggaagctgagcaaaaggcagatccaggccgcatactccatcctcagtgaggtccagcaggcggtgtctcagggcagcagcgactctcagatcctggatctctcaaatcgcttttacaccctgatcccccacgactttgggatgaagaagcctccgctcctgaacaatgcagacagtgtgcaggccaaggtggaaatgcttgacaacctgctggacatcgaggtggcctacagtctgctcaggggagggtctgatgatagcagcaaggatcccatcgatgtcaactatgagaagctcaaaactgacattaaggtggttgacagagattctgaagaagccgagatcatcaggaagtatgttaagaacactcatgcaaccacacacaatgcgtatgacttggaagtcatcgatatctttaagatagagcgtgaaggcgaatgccagcgttacaagccctttaagcagcttcataaccgaagattgctgtggcacgggtccaggaccaccaactttgctgggatcctgtcccagggtcttcggatagccccgcctgaagcgcccgtgacaggctacatgtttggtaaagggatctatttcgctgacatggtctccaagagtgccaactactgccatacgtctcagggagacccaataggcttaatcctgttgggagaagttgcccttggaaacatgtatgaactgaagcacgcttcacatatcagcaagttacccaagggcaagcacagtgtcaaaggtttgggcaaaactacccctgatccttcagctaacattagtctggatggtgtagacgttcctcttgggaccgggatttcatctggtgtgaatgacacctctctactatataacgagtacattgtctatgatattgctcaggtaaatctgaagtatctgctgaaactgaaattcaattttaagacctccctgtggtagtaatgaactagtccgtaacttgaaagtatttcgatttcttggctttatatatcttgtggaaaggacgagagacggcgttgtgaaaggaagag

SEQ ID NO: 2044 - DNA, 1421 bp, Homo sapiens
  source 1..1421: mol_type = genomic DNA
accgccaccatggatataaaaaactcaccatctagccttaattctccttcctcctacaactgcagtcaatccatcttacccctggagcacggctccatatacataccttcctcctatgtagacagccaccatgaatatccagccatgacattctatagccctgctgtgatgaattacagcattcccagcaatgtcactaacttggaaggtgggcctggtcggcagaccacaagcccaaatgtgttgtggccaacacctgggcacctttctcctttagtggtccatcgccagttatcacatctgtatgcggaacctcaaaagagtccctggtgtgaagcaagatcgctagaacacaccttacctgtaaacagagagacactgaaaaggaaggttagtgggaaccgttgcgccagccctgttactggtccaggttcaaagagggatgctcacttctgcgctgtctgcagcgattacgcatcgggatatcactatggagtctggtcgtgtgaaggatgtaaggccttttttaaaagaagcattcaaggacataatgattatatttgtccagctacaaatcagtgtacaatcgataaaaaccggcgcaagagctgccaggcctgccgacttcggaagtgttacgaagtgggaatggtgaagtgtggctcccggagagagagatgtgggtaccgccttgtgcggagacagagaagtgccgacgagcagctgcactgtgccggcaaggccaagagaagtggcggccacgcgccccgagtgcgggagctgctgctggacgccctgagccccgagcagctagtgctcaccctcctggaggctgagccgccccatgtgctgatcagccgccccagtgcgcccttcaccgaggcctccatgatgatgtccctgaccaagttggccgacaaggagttggtacacatgatcagctgggccaagaagattcccggtatgtaccctctggtcacagcgacccaggatgctgacagcagccggaagctggctcacttgctgaacgccgtgaccgatgctttggtttgggtgattgccaagagcggcatctcctcccagcagcaatccatgcgcctggctaacctcctgatgctcctgtcccacgtcaggcatgcgagtaacaagggcatggaacatctgctcaacatgaagtgcaaaaatgtggtcccagtgtatgacctgctgctggagatgctgaatgcccacgtgcttcgcgggtgcaagtcctccatcacggggtccgagtgcagcccggcagaggacagtaaaagcaaagagggctcccagaacccacagtctcagtagtaatgaactagtccgtaacttgaaagtatttcgatttcttggctttatatatcttgtggaaaggacgagcagaccgaggcacgcaactcatt

SEQ ID NO: 2045 - DNA, 1589 bp, Homo sapiens
  source 1..1589: mol_type = genomic DNA
accgccaccatggatataaaaaactcaccatctagccttaattctccttcctcctacaactgcagtcaatccatcttacccctggagcacggctccatatacataccttcctcctatgtagacagccaccatgaatatccagccatgacattctatagccctgctgtgatgaattacagcattcccagcaatgtcactaacttggaaggtgggcctggtcggcagaccacaagcccaaatgtgttgtggccaacacctgggcacctttctcctttagtggtccatcgccagttatcacatctgtatgcggaacctcaaaagagtccctggtgtgaagcaagatcgctagaacacaccttacctgtaaacagagagacactgaaaaggaaggttagtgggaaccgttgcgccagccctgttactggtccaggttcaaagagggatgctcacttctgcgctgtctgcagcgattacgcatcgggatatcactatggagtctggtcgtgtgaaggatgtaaggccttttttaaaagaagcattcaaggacataatgattatatttgtccagctacaaatcagtgtacaatcgataaaaaccggcgcaagagctgccaggcctgccgacttcggaagtgttacgaagtgggaatggtgaagtgtggctcccggagagagagatgtgggtaccgccttgtgcggagacagagaagtgccgacgagcagctgcactgtgccggcaaggccaagagaagtggcggccacgcgccccgagtgcgggagctgctgctggacgccctgagccccgagcagctagtgctcaccctcctggaggctgagccgccccatgtgctgatcagccgccccagtgcgcccttcaccgaggcctccatgatgatgtccctgaccaagttggccgacaaggagttggtacacatgatcagctgggccaagaagattcccggctttgtggagctcagcctgttcgaccaagtgcggctcttggagagctgttggatggaggtgttaatgatggggctgatgtggcgctcaattgaccaccccggcaagctcatctttgctccagatcttgttctggacagggatgaggggaaatgcgtagaaggaattctggaaatctttgacatgctcctggcaactacttcaaggtttcgagagttaaaactccaacacaaagaatatctctgtgtcaaggccatgatcctgctcaattccagtatgtaccctctggtcacagcgacccaggatgctgacagcagccggaagctggctcacttgctgaacgccgtgaccgatgctttggtttgggtgattgccaagagcggcatctcctcccagcagcaatccatgcgcctggctaacctcctgatgctcctgtcccacgtcaggcatgcgagggcagaaaaggcctctcaaacactcacctcatttggaatgaagatggagactcttttgcctgaagcaacgatggagcagtagtaatgaactagtccgtaacttgaaagtatttcgatttcttggctttatatatcttgtggaaaggacgattagtcaccgttcctagttgaaag

SEQ ID NO: 2046 - DNA, 1526 bp, Homo sapiens
  source 1..1526: mol_type = genomic DNA
accgccaccatggatataaaaaactcaccatctagccttaattctccttcctcctacaactgcagtcaatccatcttacccctggagcacggctccatatacataccttcctcctatgtagacagccaccatgaatatccagccatgacattctatagccctgctgtgatgaattacagcattcccagcaatgtcactaacttggaaggtgggcctggtcggcagaccacaagcccaaatgtgttgtggccaacacctgggcacctttctcctttagtggtccatcgccagttatcacatctgtatgcggaacctcaaaagagtccctggtgtgaagcaagatcgctagaacacaccttacctgtaaacagagagacactgaaaaggaaggttagtgggaaccgttgcgccagccctgttactggtccaggttcaaagagggatgctcacttctgcgctgtctgcagcgattacgcatcgggatatcactatggagtctggtcgtgtgaaggatgtaaggccttttttaaaagaagcattcaaggacataatgattatatttgtccagctacaaatcagtgtacaatcgataaaaaccggcgcaagagctgccaggcctgccgacttcggaagtgttacgaagtgggaatggtgaagtgtggctcccggagagagagatgtgggtaccgccttgtgcggagacagagaagtgccgacgagcagctgcactgtgccggcaaggccaagagaagtggcggccacgcgccccgagtgcgggagctgctgctggacgccctgagccccgagcagctagtgctcaccctcctggaggctgagccgccccatgtgctgatcagccgccccagtgcgcccttcaccgaggcctccatgatgatgtccctgaccaagttggccgacaaggagttggtacacatgatcagctgggccaagaagattcccggctttgtggagctcagcctgttcgaccaagtgcggctcttggagagctgttggatggaggtgttaatgatggggctgatgtggcgctcaattgaccaccccggcaagctcatctttgctccagatcttgttctggacagggatgaggggaaatgcgtagaaggaattctggaaatctttgacatgctcctggcaactacttcaaggtttcgagagttaaaactccaacacaaagaatatctctgtgtcaaggccatgatcctgctcaattccagtatgtaccctctggtcacagcgacccaggatgctgacagcagccggaagctggctcacttgctgaacgccgtgaccgatgctttggtttgggtgattgccaagagcggcatctcctcccagcagcaatccatgcgcctggctaacctcctgatgctcctgtcccacgtcaggcatgcgaggtcctgtgtatacaagtagtaatgaactagtccgtaacttgaaagtatttcgatttcttggctttatatatcttgtggaaaggacgattcagacaacaagcattataagat

SEQ ID NO: 2047 - DNA, 1547 bp, Homo sapiens
  source 1..1547: mol_type = genomic DNA
accgccaccatggatataaaaaactcaccatctagccttaattctccttcctcctacaactgcagtcaatccatcttacccctggagcacggctccatatacataccttcctcctatgtagacagccaccatgaatatccagccatgacattctatagccctgctgtgatgaattacagcattcccagcaatgtcactaacttggaaggtgggcctggtcggcagaccacaagcccaaatgtgttgtggccaacacctgggcacctttctcctttagtggtccatcgccagttatcacatctgtatgcggaacctcaaaagagtccctggtgtgaagcaagatcgctagaacacaccttacctgtaaacagagagacactgaaaaggaaggttagtgggaaccgttgcgccagccctgttactggtccaggttcaaagagggatgctcacttctgcgctgtctgcagcgattacgcatcgggatatcactatggagtctggtcgtgtgaaggatgtaaggccttttttaaaagaagcattcaaggacataatgattatatttgtccagctacaaatcagtgtacaatcgataaaaaccggcgcaagagctgccaggcctgccgacttcggaagtgttacgaagtgggaatggtgaagtgtggctcccggagagagagatgtgggtaccgccttgtgcggagacagagaagtgccgacgagcagctgcactgtgccggcaaggccaagagaagtggcggccacgcgccccgagtgcgggagctgctgctggacgccctgagccccgagcagctagtgctcaccctcctggaggctgagccgccccatgtgctgatcagccgccccagtgcgcccttcaccgaggcctccatgatgatgtccctgaccaagttggccgacaaggagttggtacacatgatcagctgggccaagaagattcccggctttgtggagctcagcctgttcgaccaagtgcggctcttggagagctgttggatggaggtgttaatgatggggctgatgtggcgctcaattgaccaccccggcaagctcatctttgctccagatcttgttctggacagggatgaggggaaatgcgtagaaggaattctggaaatctttgacatgctcctggcaactacttcaaggtttcgagagttaaaactccaacacaaagaatatctctgtgtcaaggccatgatcctgctcaattccagtatgtaccctctggtcacagcgacccaggatgctgacagcagccggaagctggctcacttgctgaacgccgtgaccgatgctttggtttgggtgattgccaagagcggcatctcctcccagcagcaatccatgcgcctggctaacctcctgatgctcctgtcccacgtcaggcatgcgagatggggagaaaagcaattcattcatttgaagttatcttagtaatgaactagtccgtaacttgaaagtatttcgatttcttggctttatatatcttgtggaaaggacgagtcgctggagagcaggctattgga

SEQ ID NO: 2048 - DNA, 4619 bp, Homo sapiens
  source 1..4619: mol_type = genomic DNA
accgccaccatgttgtgcgtagccggagccaggttgaagagagaactcgatgccaccgcaacggtattggcgaaccggcaggatgaaagtgagcagtccagaaagcggcttatcgaacagagccgggagttcaagaagaacactccagaggatttgcgcaagcaggtagcgccgctgctgaagagtttccaaggagagattgatgcactgagtaaaagaagcaaggaagctgaagcagctttcttgaatgtctacaaaagattgattgacgtcccagatcccgtaccagctttggatctcggacagcaactccagctcaaagtgcagcgcctgcacgatattgaaacagagaaccagaaacttagggaaactctggaagaatacaacaaggaatttgctgaagtgaaaaatcaagaggttacgataaaagcacttaaagagaaaatccgagaatatgaacagacactgaagaaccaagccgaaaccatagctcttgagaaggaacagaagttacagaatgactttgcagaaaaggagagaaagctgcaggagacacagatgtccaccacctcaaagctggaggaagctgagcataaggttcagagcctacaaacagccctggaaaaaactcgaacagaattatttgacctgaaaaccaaatacgatgaagaaactactgcaaaggccgacgagattgaaatgatcatgacggaccttgaaagggcaaaccagagggcagaggtggctcagagagaggcggagaccttaagggaacagctctcatcggccaatcactccctccagctggcctcacagatccagaaggcaccagacgtggagcaggccatagaggtgctgacccgctccagcctagaagttgagttggccgccaaggagcgggagatcgcacagctggtggaggacgtgcagagactccaggccagcctcaccaagctgcgggagaattcggccagccagatctcacagcttgagcagcagctgagcgccaaaaacagcacactcaaacaactggaagaaaaactcaaaggccaggctgactatgaagaggtgaagaaagagctgaacattctgaagtccatggagtttgcaccgtccgagggcgctgggacacaggatgcggccaagcccctggaggtgctgttgctggagaagaaccgctcgctgcagtccgagaacgccgcgctgcgcatctccaacagcgacctgagcgggtcagccaggaggaaagggaaagaccagcctgaaagtcggcgcccgggatctttgccggccccccctccttctcagttgccccgcaacccgggggagcaggcttccaatactaatggtacacaccagttctcaccagcggggttaagtcaagactttttcagctcatccctggcaagccccagcctacccctggcttctacaggaaaatttgcactaaactctcttctccagcggcagctaatgcagtccttctactccaaggctatgcaggaagccggaagcacaagcatgattttttcaacaggtccatacagcacaaactccatatcttcccaaagtccattacaacaaagcccagatgtcaatggcatggccccatcccccagccagtcagaaagtgctgggagcgtctccgagggcgaggagatggacactgcagaaatcgcccggcaggtcaaagagcagctgattaagcacaatatcggacaacgtattttcggacattatgtgttgggactgtctcaagggtccgtgagcgagattctggcccggcccaagccatggaataaactgactgttcgtggcaaggagccatttcacaagatgaaacagttcctctccgatgagcagaacatcctggccctccgtagcatccaaggcagacaaagagagaatccaggccagagcctgaacagactatttcaggaagtaccgaaacgaagaaatgggtctgaaggtaacatcaccacccggatccgagcctcggagactggctctgatgaagccatcaagtccatcctagagcaagccaagagggagctccaagtgcagaaaactgcagagccggcccagccttcctccgcatccggcagcgggaactctgatgacgccatccgctccatcctgcagcaagcccgccgggagatggaggcccagcaggctgccctcgaccctgccttaaagcaggcaccactgtcccagagtgacatcaccatcctcacccccaagcttctgtccacctcgcccatgcccaccgtgtccagctacccacctctcgccatctccctgaagaagccctccgcagctcctgaggccggtgcctctgctctgccgaaccccccggccctcaaaaaggaggcccaggacgcccccgggctggacccccagggagcagccgattgtgcacaaggggtcctgagacaggtgaaaaatgaggtgggccgcagcggtgcctggaaggaccactggtggagcgcggtgcagccggagagaagaaatgccgcctcctccgaggaggccaaggccgaagaaacgggcggcgggaaagagaagggcagcggtggcagcggaggtggcagccagcctcgggccgagcgcagtcagctccagggaccctcgtcgtcagagtactggaaggagtggcccagcgctgagtccccatactcccagagctcagagctgagtctgaccggggccagccgcagcgagacaccacagaacagccccctgccatcctccccgatcgtgcccatgtccaagcccaccaagccctcggtccccccgctgacccccgagcagtacgaggtctacatgtaccaggaggtggacaccatcgagctcacccggcaggttaaggaaaagctggccaagaacggcatctgccagagaatcttcggggagaaggtgctgggcctgtcccagggcagcgtcagcgacatgctgtcccgaccgaagccatggagcaagctgacgcagaaaggccgagaacccttcatccggatgcagctctggctgaacggcgagctaggccagggtgttctacccgtccagggccagcagcaagggccagtcctccactccgtgacatcgctccaggacccgctgcagcagggctgtgtgagctcagaaagcactccaaagacctccgccagctgcagccctgcccctgagtccccgatgagttccagtgagtcggtgaagagcctgaccgagctggtccagcagccctgtccccccatcgaggcgagcaaggacagcaagccaccagagcccagtgacccgccagcatccgactcccagcccacaaccccgctgcctctctccggacactcggccctcagcatccaagaattagtagccatgtccccggagctggacacctacggcataaccaagcgggtgaaggaggtgctgacggacaacaacctcggccagcgcttatttggggagaccatcttagggctcacccaaggctctgtctctgacctccttgcccgccccaaaccctggcataagctcagtctgaaaggacgagagcccttcgtccggatgcagctgtggctgaacgaccccaacaatgtggagaagctgatggacatgaaacggatggagaagaaagcctacatgaagcggcggcacagctcagtcagtgacagccagccctgcgaaccgccctctgtcggcaccgagtacagccagggcgccagcccccagccccagcaccagctgaagaaaccccgggtggtgctggctccggaggagaaggaggcgctgaaacgagcgtatcagcaaaagccatacccgtcaccaaaaaccatcgaagacctcgccacccagctcaacctgaaaaccagcaccgtcatcaactggttccacaactacaggtctcggatccgcagagaactgttcattgaggaaattcaggccgggagtcagggccaggcgggcgccagcgactcaccctcggcccgcagcggccgggcggcgcccagctcggagggcgacagctgcgacggcgtggaggccactgagggcccaggcagcgccgacaccgaggagcccaagtctcagggagaggccgagcgggaggaggtgccgcggccggcggagcagacggagccgccgccctcggggaccccgggcccggacgacgcccgcgacgacgaccacgagggaggccccgtggaaggcccggggcccctgcccagccccgcctccgcgaccgccaccgccgcgcccgcggcccccgaggacgccgctacctcagccgccgccgcgccgggggagggccccgcggccccgagctccgcgccgccgcccagcaacagcagcagcagcagcgccccccgcaggcccagctcgctgcagagccttttcggcctccccgaggccgcgggcgcccgggactcgcgcgacaaccccctgcgcaagaagaaggccgcgaacttgaacagcatcatccaccgcctggagaaggccgccagccgggaggaacctatcgaatgggagttctagtaatgaactagtccgtaacttgaaagtatttcgatttcttggctttatatatcttgtggaaaggacgattagaggaacgatgtctactagtg

SEQ ID NO: 2049 - DNA, 4652 bp, Homo sapiens
  source 1..4652: mol_type = genomic DNA
accgccaccatggcggccaatgtgggatcgatgtttcaatattggaagcgctttgatttacagcagctgcagagagaactcgatgccaccgcaacggtattggcgaaccggcaggatgaaagtgagcagtccagaaagcggcttatcgaacagagccgggagttcaagaagaacactccagaggatttgcgcaagcaggtagcgccgctgctgaagagtttccaaggagagattgatgcactgagtaaaagaagcaaggaagctgaagcagctttcttgaatgtctacaaaagattgattgacgtcccagatcccgtaccagctttggatctcggacagcaactccagctcaaagtgcagcgcctgcacgatattgaaacagagaaccagaaacttagggaaactctggaagaatacaacaaggaatttgctgaagtgaaaaatcaagaggttacgataaaagcacttaaagagaaaatccgagaatatgaacagacactgaagaaccaagccgaaaccatagctcttgagaaggaacagaagttacagaatgactttgcagaaaaggagagaaagctgcaggagacacagatgtccaccacctcaaagctggaggaagctgagcataaggttcagagcctacaaacagccctggaaaaaactcgaacagaattatttgacctgaaaaccaaatacgatgaagaaactactgcaaaggccgacgagattgaaatgatcatgacggaccttgaaagggcaaaccagagggcagaggtggctcagagagaggcggagaccttaagggaacagctctcatcggccaatcactccctccagctggcctcacagatccagaaggcaccagacgtggagcaggccatagaggtgctgacccgctccagcctagaagttgagttggccgccaaggagcgggagatcgcacagctggtggaggacgtgcagagactccaggccagcctcaccaagctgcgggagaattcggccagccagatctcacagcttgagcagcagctgagcgccaaaaacagcacactcaaacaactggaagaaaaactcaaaggccaggctgactatgaagaggtgaagaaagagctgaacattctgaagtccatggagtttgcaccgtccgagggcgctgggacacaggatgcggccaagcccctggaggtgctgttgctggagaagaaccgctcgctgcagtccgagaacgccgcgctgcgcatctccaacagcgacctgagcgggtcagccaggaggaaagggaaagaccagcctgaaagtcggcgcccgggatctttgccggccccccctccttctcagttgccccgcaacccgggggagcaggcttccaatactaatggtacacaccagttctcaccagcggggttaagtcaagactttttcagctcatccctggcaagccccagcctacccctggcttctacaggaaaatttgcactaaactctcttctccagcggcagctaatgcagtccttctactccaaggctatgcaggaagccggaagcacaagcatgattttttcaacaggtccatacagcacaaactccatatcttcccaaagtccattacaacaaagcccagatgtcaatggcatggccccatcccccagccagtcagaaagtgctgggagcgtctccgagggcgaggagatggacactgcagaaatcgcccggcaggtcaaagagcagctgattaagcacaatatcggacaacgtattttcggacattatgtgttgggactgtctcaagggtccgtgagcgagattctggcccggcccaagccatggaataaactgactgttcgtggcaaggagccatttcacaagatgaaacagttcctctccgatgagcagaacatcctggccctccgtagcatccaaggcagacaaagagagaatccaggccagagcctgaacagactatttcaggaagtaccgaaacgaagaaatgggtctgaaggtaacatcaccacccggatccgagcctcggagactggctctgatgaagccatcaagtccatcctagagcaagccaagagggagctccaagtgcagaaaactgcagagccggcccagccttcctccgcatccggcagcgggaactctgatgacgccatccgctccatcctgcagcaagcccgccgggagatggaggcccagcaggctgccctcgaccctgccttaaagcaggcaccactgtcccagagtgacatcaccatcctcacccccaagcttctgtccacctcgcccatgcccaccgtgtccagctacccacctctcgccatctccctgaagaagccctccgcagctcctgaggccggtgcctctgctctgccgaaccccccggccctcaaaaaggaggcccaggacgcccccgggctggacccccagggagcagccgattgtgcacaaggggtcctgagacaggtgaaaaatgaggtgggccgcagcggtgcctggaaggaccactggtggagcgcggtgcagccggagagaagaaatgccgcctcctccgaggaggccaaggccgaagaaacgggcggcgggaaagagaagggcagcggtggcagcggaggtggcagccagcctcgggccgagcgcagtcagctccagggaccctcgtcgtcagagtactggaaggagtggcccagcgctgagtccccatactcccagagctcagagctgagtctgaccggggccagccgcagcgagacaccacagaacagccccctgccatcctccccgatcgtgcccatgtccaagcccaccaagccctcggtccccccgctgacccccgagcagtacgaggtctacatgtaccaggaggtggacaccatcgagctcacccggcaggttaaggaaaagctggccaagaacggcatctgccagagaatcttcggggagaaggtgctgggcctgtcccagggcagcgtcagcgacatgctgtcccgaccgaagccatggagcaagctgacgcagaaaggccgagaacccttcatccggatgcagctctggctgaacggcgagctaggccagggtgttctacccgtccagggccagcagcaagggccagtcctccactccgtgacatcgctccaggacccgctgcagcagggctgtgtgagctcagaaagcactccaaagacctccgccagctgcagccctgcccctgagtccccgatgagttccagtgagtcggtgaagagcctgaccgagctggtccagcagccctgtccccccatcgaggcgagcaaggacagcaagccaccagagcccagtgacccgccagcatccgactcccagcccacaaccccgctgcctctctccggacactcggccctcagcatccaagaattagtagccatgtccccggagctggacacctacggcataaccaagcgggtgaaggaggtgctgacggacaacaacctcggccagcgcttatttggggagaccatcttagggctcacccaaggctctgtctctgacctccttgcccgccccaaaccctggcataagctcagtctgaaaggacgagagcccttcgtccggatgcagctgtggctgaacgaccccaacaatgtggagaagctgatggacatgaaacggatggagaagaaagcctacatgaagcggcggcacagctcagtcagtgacagccagccctgcgaaccgccctctgtcggcaccgagtacagccagggcgccagcccccagccccagcaccagctgaagaaaccccgggtggtgctggctccggaggagaaggaggcgctgaaacgagcgtatcagcaaaagccatacccgtcaccaaaaaccatcgaagacctcgccacccagctcaacctgaaaaccagcaccgtcatcaactggttccacaactacaggtctcggatccgcagagaactgttcattgaggaaattcaggccgggagtcagggccaggcgggcgccagcgactcaccctcggcccgcagcggccgggcggcgcccagctcggagggcgacagctgcgacggcgtggaggccactgagggcccaggcagcgccgacaccgaggagcccaagtctcagggagaggccgagcgggaggaggtgccgcggccggcggagcagacggagccgccgccctcggggaccccgggcccggacgacgcccgcgacgacgaccacgagggaggccccgtggaaggcccggggcccctgcccagccccgcctccgcgaccgccaccgccgcgcccgcggcccccgaggacgccgctacctcagccgccgccgcgccgggggagggccccgcggccccgagctccgcgccgccgcccagcaacagcagcagcagcagcgccccccgcaggcccagctcgctgcagagccttttcggcctccccgaggccgcgggcgcccgggactcgcgcgacaaccccctgcgcaagaagaaggccgcgaacttgaacagcatcatccaccgcctggagaaggccgccagccgggaggaacctatcgaatgggagttctagtaatgaactagtccgtaacttgaaagtatttcgatttcttggctttatatatcttgtggaaaggacgaaccggaccaatcgtcggtaaggat

SEQ ID NO: 2050 - DNA, 2132 bp, Homo sapiens
  source 1..2132: mol_type = genomic DNA
accgccaccatggcggccaatgtgggatcgatgtttcaatattggaagcgctttgatttacagcagctgcagagagaactcgatgccaccgcaacggtattggcgaaccggcaggatgaaagtgagcagtccagaaagcggcttatcgaacagagccgggagttcaagaagaacactccagaggatttgcgcaagcaggtagcgccgctgctgaagagtttccaaggagagattgatgcactgagtaaaagaagcaaggaagctgaagcagctttcttgaatgtctacaaaagattgattgacgtcccagatcccgtaccagctttggatctcggacagcaactccagctcaaagtgcagcgcctgcacgatattgaaacagagaaccagaaacttagggaaactctggaagaatacaacaaggaatttgctgaagtgaaaaatcaagaggttacgataaaagcacttaaagagaaaatccgagaatatgaacagacactgaagaaccaagccgaaaccatagctcttgagaaggaacagaagttacagaatgactttgcagaaaaggagagaaagctgcaggagacacagatgtccaccacctcaaagctggaggaagctgagcataaggttcagagcctacaaacagccctggaaaaaactcgaacagaattatttgacctgaaaaccaaatacgatgaagaaactactgcaaaggccgacgagattgaaatgatcatgacggaccttgaaagggcaaaccagagggcagaggtggctcagagagaggcggagaccttaagggaacagctctcatcggccaatcactccctccagctggcctcacagatccagaaggcaccagacgtggccatagaggtgctgacccgctccagcctagaagttgagttggccgccaaggagcgggagatcgcacagctggtggaggacgtgcagagactccaggccagcctcaccaagctgcgggagaattcggccagccagatctcacagcttgagcagcagctgagcgccaaaaacagcacactcaaacaactggaagaaaaactcaaaggccaggctgactatgaagaggtgaagaaagagctgaacattctgaagtccatggagtttgcaccgtccgagggcgctgggacacaggatgcggccaagcccctggaggtgctgttgctggagaagaaccgctcgctgcagtccgagaacgccgcgctgcgcatctccaacagcgacctgagcggacgctgtgcggagctgcaagtccgtatcactgaggctgtggccacagccactgagcagagagagctgatcgcccgcctggagcaggacctgagcatcattcagtccatccagcggcccgatgccgagggtgccgctgagcaccgcctggagaagatcccagagcccatcaaagaggccactgccctattctacggacctgcagcaccagccagcggtgccctcccagagggccaggtggattcactgctttccatcatctccagccagagggagcgcttccgtgcccggaaccaggagcttgaggccgagaaccgcctggcccagcacaccctccaggccctgcagagtgagctggacagcctgcgcgccgacaacatcaagctctttgagaagatcaagttcctgcagagctaccctggccggggcagcggcagtgatgacacggagctgcggtactcgtcccagtacgaggagcgcctggaccccttctcctccttcagcaagcgggagcggcagaggaagtacctgagcttgagtccctgggacaaggccaccctcagcatggggcgtctggttctctccaacaagatggcgcgcaccatcggcttcttctacacactgttcctgcactgcctggtcttcctggtgctctacaagctggcatggagcgagagcatggagagggactgtgccaccttctgcgccaagaagttcgctgaccacctgcacaagttccacgagaatgacaacggggctgcggctggtgacttgtggcagtagtaatgaactagtccgtaacttgaaagtatttcgatttcttggctttatatatcttgtggaaaggacgataggattagaattaaggctcggac

SEQ ID NO: 2051 - DNA, 2090 bp, Homo sapiens
  source 1..2090: mol_type = genomic DNA
accgccaccatggcggccaatgtgggatcgatgtttcaatattggaagcgctttgatttacagcagctgcagagagaactcgatgccaccgcaacggtattggcgaaccggcaggatgaaagtgagcagtccagaaagcggcttatcgaacagagccgggagttcaagaagaacactccagagattgatgcactgagtaaaagaagcaaggaagctgaagcagctttcttgaatgtctacaaaagattgattgacgtcccagatcccgtaccagctttggatctcggacagcaactccagctcaaagtgcagcgcctgcacgatattgaaacagagaaccagaaacttagggaaactctggaagaatacaacaaggaatttgctgaagtgaaaaatcaagaggttacgataaaagcacttaaagagaaaatccgagaatatgaacagacactgaagaaccaagccgaaaccatagctcttgagaaggaacagaagttacagaatgactttgcagaaaaggagagaaagctgcaggagacacagatgtccaccacctcaaagctggaggaagctgagcataaggttcagagcctacaaacagccctggaaaaaactcgaacagaattatttgacctgaaaaccaaatacgatgaagaaactactgcaaaggccgacgagattgaaatgatcatgacggaccttgaaagggcaaaccagagggcagaggtggctcagagagaggcggagaccttaagggaacagctctcatcggccaatcactccctccagctggcctcacagatccagaaggcaccagacgtggagcaggccatagaggtgctgacccgctccagcctagaagttgagttggccgccaaggagcgggagatcgcacagctggtggaggacgtgcagagactccaggccagcctcaccaagctgcgggagaattcggccagccagatctcacagcttgagcagcagctgagcgccaaaaacagcacactcaaacaactggaagaaaaactcaaaggccaggctgactatgaagaggtgaagaaagagctgaacattctgaagtccatggagtttgcaccgtccgagggcgctgggacacaggatgcggccaagcccctggaggtgctgttgctggagaagaaccgctcgctgcagtccgagaacgccgcgctgcgcatctccaacagcgacctgagcggacgctgtgcggagctgcaagtccgtatcactgaggctgtggccacagccactgagcagagagagctgatcgcccgcctggagcaggacctgagcatcattcagtccatccagcggcccgatgccgagggtgccgctgagcaccgcctggagaagatcccagagcccatcaaagaggccactgccctattctacggacctgcagcaccagccagcggtgccctcccagagggccaggtggattcactgctttccatcatctccagccagagggagcgcttccgtgcccggaaccaggagcttgaggccgagaaccgcctggcccagcacaccctccaggccctgcagagtgagctggacagcctgcgcgccgacaacatcaagctctttgagaagatcaagttcctgcagagctaccctggccggggcagcggcagtgatgacacggagctgcggtactcgtcccagtacgaggagcgcctggaccccttctcctccttcagcaagcgggagcggcagaggaagtacctgagcttgagtccctgggacaaggccaccctcagcatggggcgtctggttctctccaacaagatggcgcgcaccatcggcttcttctacacactgttcctgcactgcctggtcttcctggtgctctacaagctggcatggagcgagagcatggagagggactgtgccaccttctgcgccaagaagttcgctgaccacctgcacaagttccacgagaatgacaacggggctgcggctggtgacttgtggcagtagtaatgaactagtccgtaacttgaaagtatttcgatttcttggctttatatatcttgtggaaaggacgaagaaagcggtctgctgtgttcgtc

SEQ ID NO: 2052 - DNA, 2021 bp, Homo sapiens
  source 1..2021: mol_type = genomic DNA
accgccaccatggcggccaatgtgggatcgatgtttcaatattggaagcgctttgatttacagcagctgcaggatttgcgcaagcaggtagcgccgctgctgaagagtttccaaggagagattgatgcactgagtaaaagaagcaaggaagctgaagcagctttcttgaatgtctacaaaagattgattgacgtcccagatcccgtaccagctttggatctcggacagcaactccagctcaaagtgcagcgcctgcacgatattgaaacagagaaccagaaacttagggaaactctggaagaatacaacaaggaatttgctgaagtgaaaaatcaagaggttacgataaaagcacttaaagagaaaatccgagaatatgaacagacactgaagaaccaagccgaaaccatagctcttgagaaggaacagaagttacagaatgactttgcagaaaaggagagaaagctgcaggagacacagatgtccaccacctcaaagctggaggaagctgagcataaggttcagagcctacaaacagccctggaaaaaactcgaacagaattatttgacctgaaaaccaaatacgatgaagaaactactgcaaaggccgacgagattgaaatgatcatgacggaccttgaaagggcaaaccagagggcagaggtggctcagagagaggcggagaccttaagggaacagctctcatcggccaatcactccctccagctggcctcacagatccagaaggcaccagacgtggccatagaggtgctgacccgctccagcctagaagttgagttggccgccaaggagcgggagatcgcacagctggtggaggacgtgcagagactccaggccagcctcaccaagctgcgggagaattcggccagccagatctcacagcttgagcagcagctgagcgccaaaaacagcacactcaaacaactggaagaaaaactcaaaggccaggctgactatgaagaggtgaagaaagagctgaacattctgaagtccatggagtttgcaccgtccgagggcgctgggacacaggatgcggccaagcccctggaggtgctgttgctggagaagaaccgctcgctgcagtccgagaacgccgcgctgcgcatctccaacagcgacctgagcggacgctgtgcggagctgcaagtccgtatcactgaggctgtggccacagccactgagcagagagagctgatcgcccgcctggagcaggacctgagcatcattcagtccatccagcggcccgatgccgagggtgccgctgagcaccgcctggagaagatcccagagcccatcaaagaggccactgccctattctacggacctgcagcaccagccagcggtgccctcccagagggccaggtggattcactgctttccatcatctccagccagagggagcgcttccgtgcccggaaccaggagcttgaggccgagaaccgcctggcccagcacaccctccaggccctgcagagtgagctggacagcctgcgcgccgacaacatcaagctctttgagaagatcaagttcctgcagagctaccctggccggggcagcggcagtgatgacacggagctgcggtactcgtcccagtacgaggagcgcctggaccccttctcctccttcagcaagcgggagcggcagaggaagtacctgagcttgagtccctgggacaaggccaccctcagcatggggcgtctggttctctccaacaagatggcgcgcaccatcggcttcttctacacactgttcctgcactgcctggtcttcctggtgctctacaagctggcatggagcgagagcatggagagggactgtgccaccttctgcgccaagaagttcgctgaccacctgcacaagttccacgagaatgacaacggggctgcggctggtgacttgtggcagtagtaatgaactagtccgtaacttgaaagtatttcgatttcttggctttatatatcttgtggaaaggacgaagcacttgaaacaccggagcaggt

SEQ ID NO: 2053 - DNA, 2138 bp, Homo sapiens
  source 1..2138: mol_type = genomic DNA
accgccaccatggcggccaatgtgggatcgatgtttcaatattggaagcgctttgatttacagcagctgcagagagaactcgatgccaccgcaacggtattggcgaaccggcaggatgaaagtgagcagtccagaaagcggcttatcgaacagagccgggagttcaagaagaacactccagaggatttgcgcaagcaggtagcgccgctgctgaagagtttccaaggagagattgatgcactgagtaaaagaagcaaggaagctgaagcagctttcttgaatgtctacaaaagattgattgacgtcccagatcccgtaccagctttggatctcggacagcaactccagctcaaagtgcagcgcctgcacgatattgaaacagagaaccagaaacttagggaaactctggaagaatacaacaaggaatttgctgaagtgaaaaatcaagaggttacgataaaagcacttaaagagaaaatccgagaatatgaacagacactgaagaaccaagccgaaaccatagctcttgagaaggaacagaagttacagaatgactttgcagaaaaggagagaaagctgcaggagacacagatgtccaccacctcaaagctggaggaagctgagcataaggttcagagcctacaaacagccctggaaaaaactcgaacagaattatttgacctgaaaaccaaatacgatgaagaaactactgcaaaggccgacgagattgaaatgatcatgacggaccttgaaagggcaaaccagagggcagaggtggctcagagagaggcggagaccttaagggaacagctctcatcggccaatcactccctccagctggcctcacagatccagaaggcaccagacgtggagcaggccatagaggtgctgacccgctccagcctagaagttgagttggccgccaaggagcgggagatcgcacagctggtggaggacgtgcagagactccaggccagcctcaccaagctgcgggagaattcggccagccagatctcacagcttgagcagcagctgagcgccaaaaacagcacactcaaacaactggaagaaaaactcaaaggccaggctgactatgaagaggtgaagaaagagctgaacattctgaagtccatggagtttgcaccgtccgagggcgctgggacacaggatgcggccaagcccctggaggtgctgttgctggagaagaaccgctcgctgcagtccgagaacgccgcgctgcgcatctccaacagcgacctgagcggacgctgtgcggagctgcaagtccgtatcactgaggctgtggccacagccactgagcagagagagctgatcgcccgcctggagcaggacctgagcatcattcagtccatccagcggcccgatgccgagggtgccgctgagcaccgcctggagaagatcccagagcccatcaaagaggccactgccctattctacggacctgcagcaccagccagcggtgccctcccagagggccaggtggattcactgctttccatcatctccagccagagggagcgcttccgtgcccggaaccaggagcttgaggccgagaaccgcctggcccagcacaccctccaggccctgcagagtgagctggacagcctgcgcgccgacaacatcaagctctttgagaagatcaagttcctgcagagctaccctggccggggcagcggcagtgatgacacggagctgcggtactcgtcccagtacgaggagcgcctggaccccttctcctccttcagcaagcgggagcggcagaggaagtacctgagcttgagtccctgggacaaggccaccctcagcatggggcgtctggttctctccaacaagatggcgcgcaccatcggcttcttctacacactgttcctgcactgcctggtcttcctggtgctctacaagctggcatggagcgagagcatggagagggactgtgccaccttctgcgccaagaagttcgctgaccacctgcacaagttccacgagaatgacaacggggctgcggctggtgacttgtggcagtagtaatgaactagtccgtaacttgaaagtatttcgatttcttggctttatatatcttgtggaaaggacgagtctggtggagtctcatagagtta

SEQ ID NO: 2054 - DNA, 2000 bp, Homo sapiens
  source 1..2000: mol_type = genomic DNA
accgccaccatggcggccaatgtgggatcgatgtttcaatattggaagcgctttgatttacagcagctgcagagagaactcgatgccaccgcaacggtattggcgaaccggcaggatgaaagtgagcagtccagaaagcggcttatcgaacagagccgggagttcaagaagaacactccagaggatttgcgcaagcaggtagcgccgctgctgaagagtttccaaggagagattgatgcactgagtaaaagaagcaaggaagctgaagcagctttcttgaatgtctacaaaagattgattgacgtcccagaggttacgataaaagcacttaaagagaaaatccgagaatatgaacagacactgaagaaccaagccgaaaccatagctcttgagaaggaacagaagttacagaatgactttgcagaaaaggagagaaagctgcaggagacacagatgtccaccacctcaaagctggaggaagctgagcataaggttcagagcctacaaacagccctggaaaaaactcgaacagaattatttgacctgaaaaccaaatacgatgaagaaactactgcaaaggccgacgagattgaaatgatcatgacggaccttgaaagggcaaaccagagggcagaggtggctcagagagaggcggagaccttaagggaacagctctcatcggccaatcactccctccagctggcctcacagatccagaaggcaccagacgtggagcaggccatagaggtgctgacccgctccagcctagaagttgagttggccgccaaggagcgggagatcgcacagctggtggaggacgtgcagagactccaggccagcctcaccaagctgcgggagaattcggccagccagatctcacagcttgagcagcagctgagcgccaaaaacagcacactcaaacaactggaagaaaaactcaaaggccaggctgactatgaagaggtgaagaaagagctgaacattctgaagtccatggagtttgcaccgtccgagggcgctgggacacaggatgcggccaagcccctggaggtgctgttgctggagaagaaccgctcgctgcagtccgagaacgccgcgctgcgcatctccaacagcgacctgagcggacgctgtgcggagctgcaagtccgtatcactgaggctgtggccacagccactgagcagagagagctgatcgcccgcctggagcaggacctgagcatcattcagtccatccagcggcccgatgccgagggtgccgctgagcaccgcctggagaagatcccagagcccatcaaagaggccactgccctattctacggacctgcagcaccagccagcggtgccctcccagagggccaggtggattcactgctttccatcatctccagccagagggagcgcttccgtgcccggaaccaggagcttgaggccgagaaccgcctggcccagcacaccctccaggccctgcagagtgagctggacagcctgcgcgccgacaacatcaagctctttgagaagatcaagttcctgcagagctaccctggccggggcagcggcagtgatgacacggagctgcggtactcgtcccagtacgaggagcgcctggaccccttctcctccttcagcaagcgggagcggcagaggaagtacctgagcttgagtccctgggacaaggccaccctcagcatggggcgtctggttctctccaacaagatggcgcgcaccatcggcttcttctacacactgttcctgcactgcctggtcttcctggtgctctacaagctggcatggagcgagagcatggagagggactgtgccaccttctgcgccaagaagttcgctgaccacctgcacaagttccacgagaatgacaacggggctgcggctggtgacttgtggcagtagtaatgaactagtccgtaacttgaaagtatttcgatttcttggctttatatatcttgtggaaaggacgaaaacagacctgtaatagagtccct

SEQ ID NO: 2055 - DNA, 1427 bp, Homo sapiens
  source 1..1427: mol_type = genomic DNA
accgccaccatggagcagccacaggaggaagcccctgaggtccgggaagaggaggagaaagaggaagtggcagaggcagaaggagccccagagctcaatgggggaccacagcatgcacttccttccagcagctacacagacctctcccggagctcctcgccaccctcactgctggaccaactgcagatgggctgtgacggggcctcatgcggcagcctcaacatggagtgccgggtgtgcggggacaaggcatcgggcttccactacggtgttcatgcatgtgaggggtgcaagggcttcttccgtcgtacgatccgcatgaagctggagtacgagaagtgtgagcgcagctgcaagattcagaagaagaaccgcaacaagtgccagtactgccgcttccagaagtgcctggcactgggcatgtcacacaacgctatccgttttggtcggatgccggaggctgagaagaggaagctggtggcagggctgactgcaaacgaggggagccagtacaacccacaggtggccgacctgaaggccttctccaagcacatctacaatgcctacctgaaaaacttcaacatgaccaaaaagaaggcccgcagcatcctcaccggcaaagccagccacacggcgccctttgtgatccacgacatcgagacattgtggcaggcagagaaggggctggtgtggaagcagttggtgaatggcctgcctccctacaaggagatcagcgtgcacgtcttctaccgctgccagtgcaccacagtggagaccgtgcgggagctcactgagttcgccaagagcatccccagcttcagcagcctcttcctcaacgaccaggttacccttctcaagtatggcgtgcacgaggccatcttcgccatgctggcctctatcgtcaacaaggacgggctgctggtagccaacggcagtggctttgtcacccgtgagttcctgcgcagcctccgcaaacccttcagtgatatcattgagcctaagtttgaatttgctgtcaagttcaacgccctggaacttgatgacagtgacctggccctattcattgcggccatcattctgtgtggagaccggccaggcctcatgaacgttccacgggtggaggctatccaggacaccatcctgcgtgccctcgaattccacctgcaggccaaccaccctgatgcccagtacctcttccccaagctgctgcagaagatggctgacctgcggcaactggtcaccgagcacgcccagatgatgcagcggatcaagaagaccgaaaccgagacctcgctgcaccctctgctccaggagatctacaaggacatgtactagtaatgaactagtccgtaacttgaaagtatttcgatttcttggctttatatatcttgtggaaaggacgattggaattgatttctctgacatcc

SEQ ID NO: 2056 - DNA, 1310 bp, Homo sapiens
  source 1..1310: mol_type = genomic DNA
accgccaccatgcaccaacgagacctctcccggagctcctcgccaccctcactgctggaccaactgcagatgggctgtgacggggcctcatgcggcagcctcaacatggagtgccgggtgtgcggggacaaggcatcgggcttccactacggtgttcatgcatgtgaggggtgcaagggcttcttccgtcgtacgatccgcatgaagctggagtacgagaagtgtgagcgcagctgcaagattcagaagaagaaccgcaacaagtgccagtactgccgcttccagaagtgcctggcactgggcatgtcacacaacgctatccgttttggtcggatgccggaggctgagaagaggaagctggtggcagggctgactgcaaacgaggggagccagtacaacccacaggtggccgacctgaaggccttctccaagcacatctacaatgcctacctgaaaaacttcaacatgaccaaaaagaaggcccgcagcatcctcaccggcaaagccagccacacggcgccctttgtgatccacgacatcgagacattgtggcaggcagagaaggggctggtgtggaagcagttggtgaatggcctgcctccctacaaggagatcagcgtgcacgtcttctaccgctgccagtgcaccacagtggagaccgtgcgggagctcactgagttcgccaagagcatccccagcttcagcagcctcttcctcaacgaccaggttacccttctcaagtatggcgtgcacgaggccatcttcgccatgctggcctctatcgtcaacaaggacgggctgctggtagccaacggcagtggctttgtcacccgtgagttcctgcgcagcctccgcaaacccttcagtgatatcattgagcctaagtttgaatttgctgtcaagttcaacgccctggaacttgatgacagtgacctggccctattcattgcggccatcattctgtgtggagaccggccaggcctcatgaacgttccacgggtggaggctatccaggacaccatcctgcgtgccctcgaattccacctgcaggccaaccaccctgatgcccagtacctcttccccaagctgctgcagaagatggctgacctgcggcaactggtcaccgagcacgcccagatgatgcagcggatcaagaagaccgaaaccgagacctcgctgcaccctctgctccaggagatctacaaggacatgtactagtaatgaactagtccgtaacttgaaagtatttcgatttcttggctttatatatcttgtggaaaggacgattccctatccaggaaatggatagt

SEQ ID NO: 2057 - DNA, 1133 bp, Homo sapiens
  source 1..1133: mol_type = genomic DNA
accgccaccatggagcagccacaggaggaagcccctgaggtccgggaagaggaggagaaagaggaagtggcagaggcagaaggagccccagagctcaatgggggaccacagcatgcacttccttccagcagctacacagctatccgttttggtcggatgccggaggctgagaagaggaagctggtggcagggctgactgcaaacgaggggagccagtacaacccacaggtggccgacctgaaggccttctccaagcacatctacaatgcctacctgaaaaacttcaacatgaccaaaaagaaggcccgcagcatcctcaccggcaaagccagccacacggcgccctttgtgatccacgacatcgagacattgtggcaggcagagaaggggctggtgtggaagcagttggtgaatggcctgcctccctacaaggagatcagcgtgcacgtcttctaccgctgccagtgcaccacagtggagaccgtgcgggagctcactgagttcgccaagagcatccccagcttcagcagcctcttcctcaacgaccaggttacccttctcaagtatggcgtgcacgaggccatcttcgccatgctggcctctatcgtcaacaaggacgggctgctggtagccaacggcagtggctttgtcacccgtgagttcctgcgcagcctccgcaaacccttcagtgatatcattgagcctaagtttgaatttgctgtcaagttcaacgccctggaacttgatgacagtgacctggccctattcattgcggccatcattctgtgtggagaccggccaggcctcatgaacgttccacgggtggaggctatccaggacaccatcctgcgtgccctcgaattccacctgcaggccaaccaccctgatgcccagtacctcttccccaagctgctgcagaagatggctgacctgcggcaactggtcaccgagcacgcccagatgatgcagcggatcaagaagaccgaaaccgagacctcgctgcaccctctgctccaggagatctacaaggacatgtactagtaatgaactagtccgtaacttgaaagtatttcgatttcttggctttatatatcttgtggaaaggacgataacacaattcttggaatctgtag

SEQ ID NO: 2058 - DNA, 1346 bp, Homo sapiens
  source 1..1346: mol_type = genomic DNA
accgccaccatggcctcgggcgacaccctctacatcgccacggacggctcggagatgccggccgagatcgtggagctgcacgagatcgaggtggagaccatcccggtggagaccatcgagaccacagtggtgggcgaggaggaggaggaggacgacgacgacgaggacggcggcggtggcgaccacggcggcgggggcggccacgggcacgccggccaccaccaccaccaccatcaccaccaccaccacccgcccatgatcgctctgcagccgctggtcaccgacgacccgacccaggtgcaccaccaccaggaggtgatcctggtgcagacgcgcgaggaggtggtgggcggcgacgactcggacgggctgcgcgccgaggacggcttcgaggatcagattctcatcccggtgcccgcgccggccggcggcgacgacgactacattgaacaaacgctggtcaccgtggcggcggccggcaagagcggcggcggcggctcgtcgtcgtcgggaggcggccgcgtcaagaagggcggcggcaagaagagcggcaagaagagttacctcagcggcggggccggcgcggcgggcggcggcggcgccgacccgggcaacaagaagtgggagcagaagcaggtgcagatcaagaccctggagggcgagttctcggtcaccatgtggtcctcagatgaaaaaaaagatattgaccatgagacagtggttgaagaacagatcattggagagaactcacctcctgattattcagaatatatgacaggaaagaaacttcctcctggaggaatacctggcattgacctctcagatcccaaacaactggcagaatttgctagaatgaagccaagaaaaattaaagaagatgatgctccaagaacaatagcttgccctcataaaggctgcacaaagatgttcagggataactcggccatgagaaaacatctgcacacccacggtcccagagtccacgtctgtgcagaatgtggcaaagcttttgttgagagttcaaaactaaaacgacaccaactggttcatactggagagaagccctttcagtgcacgttcgaaggctgtgggaaacgcttttcactggacttcaatttgcgcacacatgtgcgaatccataccggagacaggccctatgtgtgccccttcgatggttgtaataagaagtttgctcagtcaactaacctgaaatctcacatcttaacacatgctaaggccaaaaacaaccagtagtaatgaactagtccgtaacttgaaagtatttcgatttcttggctttatatatcttgtggaaaggacgaataagttatcactcgagccgatcg

SEQ ID NO: 2059 - DNA, 524 bp, Homo sapiens
  source 1..524: mol_type = genomic DNA
accgccaccatgaccaagtttcaggagatggtgacattcaaggatgtggctgtggtcttcaccagggaggagctggggttgctggaccttgcccagagaaagctgtaccaagatgtgatgctggagaacttcaggaacctgctgtcagtgggctatcaacccttcaaactagatgtgatattacagttgggaaaagaagacaagcttcggatgatggagacagaaatccaaggagatgggtgttcaggtgagaaccatggagctctgagtctttgcggggtacagcctagtcctctcctcctcaccacctcctcagccaccagcctggcccaagaccccagaattcatcgccctggtttactgcagcagcttgcacatgaccttcctccttctacctccctccagtccattctccacatagccagatcatagtaatgaactagtccgtaacttgaaagtatttcgatttcttggctttatatatcttgtggaaaggacgatgtcgcaagactacaatccctcta

SEQ ID NO: 2060 - DNA, 2114 bp, Homo sapiens
  source 1..2114: mol_type = genomic DNA
accgccaccatgaccaagtttcaggagatggtgacattcaaggatgtggctgtggtcttcaccagggaggagctggggttgctggaccttgcccagagaaagctgtaccaagatgtgatgctggagaacttcaggaacctgctgtcagtgggctatcaacccttcaaactagatgtgatattacagttgggaaaagaagacaagcttcggatgatggagacagaaatccaaggagatgggtgttcaggacacaagaatcaaaatgagatagatacccttcaagaagtaagattaagattcctttcatatgaagaccttatatgctggcaaatatgggaacaatttacaagtaaattaaccagtaatcaagacctaataataaatcttcaaggcaagaggtccaagttgctaaaacaaggtgattccccctgtcaggtgtggacaggagaatctagtcaggtctctgaagatgagaactatgtaataaagctacaaggggagagttcaaatagcataaaaaatcaagagcttccattgaggaccacctgggatttctggaggaaaatgtatctgagagaaccacagaattatcagagtaggtgtcagcaaattgatgtaaaaaataagctctgtaaatgtgatcattgtgttaggcaaagaattgctcatcaacatgatgatcatggagtacacaaaagagagaaagcttttagccacaataattgtggaaaagactgtgtgaaggaatcatcccagcatagcataatccaatcaggagagcaaacctctgatgaaaatggaaaaggcttaagtgttggctctaatcttgaacttcaccagcaactacacttaagagacaagcctcatgtaaatgttgagtacgggaagggcataggttacagctcagggcttcccaggcatcagtgtttccacataggagagaaatgctataggaatggtgacagtggtgagggcttcagtcagggctcacatctgcaacctcatcagagagtcagcacaggagagaacctctacagatgtcaggtatatgcccggagctccaaccagaactcctgtcttccctctcatgagcttactcacccaggagagaagttgtgtacatgtggcaggtgtgggaagggcttccatcatagcttagattttgacattcactgtgtagacagtgctggagagagagcctgtaaatgtgatgtatatgataaaggcttcagtcagacatcacaacttcaagcccatcagagaggtcactctagagacaagacatacaaatgggaagtaagtgacaggatatttaataggaattctggtcttcaccagagagttcacactggagagaaaccatataaatgtgaggtatgtgataagggcttcagtaaggcctcaaatcttcaagcccatcagagaatccacactggagagaaaccctacaaatgtgatgtgtgtgataagaacttcagccgtaattcccaccttcaggcccatcagagagtccatacaggagagaaaccctacaaatgtgacacatgtgggaaggacttcagtcagatctctcatcttcaggcccatcagagagttcacaaaggagagaagccatacaaatgtgagacatgtgggaagggctttagtcagagttcgcatctccaagaccatcagcaagtccatactggagagaatccctacaaatgtgatgtgtgtgggaaaggcttcagttggagttcacatcttcaagcccatcagagagtccacacaggagagaaaccatacaaatgtgaagaatgtaggaaaggcttcatctggaactcatatcttcatgttcatcagaggatccacacgggagagaaaccctataaatgtggcatgtgtggtaagagcttcagtcagacttcacatcttcaagcccatcagagagtccatactggagagaaaccatacaaatgttttgtgtgtggtaagggctttagtaagagttcgttgtcttcagattcatcagagagtccatagtaatgaactagtccgtaacttgaaagtatttcgatttcttggctttatatatcttgtggaaaggacgataacatctgccatcccacgcgagc

SEQ ID NO: 2061 - DNA, 1220 bp, Homo sapiens
  source 1..1220: mol_type = genomic DNA
accgccaccatggcctccaacgaagatttctccatcacacaagacctggagatcccggcagatattgtggagctccacgacatcaatgtggagccccttcctatggaggacattccgacggaaagcgtccagtacgaggatgtggatggcaattggatctacggtggccacaaccatccgccattgatggtgttgcagccgctcttcacgaacacgggctatggcgaccacgaccaggaaatgcttatgttgcagacacaagaggaagtggtgggctattgcgactcagacaaccagctaggcaacgacttggaggaccagttggccctcccggatagcattgaagacgagcacttccagatgaccctggcctctctgtcggcctcggcggcatcaacatcaacatcaacccagagccgcagcaaaaagcccagcaaaaagcccagcggcaagagtgccaccagcactgaggccaacccggcaggcagcagctccagcctgggcacgaggaagtgggagcagaagcaaatgcaggtcaaaacgctggagggtgagttttccgtgactatgtggtcccctaacgataacaatgaccaaggggcagtgggtgaaggccaggctgaaaacccacctgattattccgagtacttgaaagggaagaaacttcctcctggggggttaccaggcattgatctctcagatcctaaacagctggcagaatttactaaagtgaagcccaaaaggtccaaaggagaacctcccaaaacagtcccttgctcttatagcggctgcgaaaagatgttccgggattacgccgccatgagaaaacatctccacatccacgggcccagagtccacgtatgtgcagaatgtggcaaagcttttcttgagagctcaaagctgagacgacaccagctggtccacaccggcgagaagccctttcagtgcacattcgaaggctgcgggaaacgcttttcccttgatttcaatttgcgcacacacttgcgcatccacaccggcgataagcccttcgtgtgccccttcgatgtttgcaacaggaagttcgctcagtcaaccaacctgaaaacccacatattaacgcatgtgaagaccaaaaacaacccgtagtaatgaactagtccgtaacttgaaagtatttcgatttcttggctttatatatcttgtggaaaggacgaacctgggcctctggaactacactc

SEQ ID NO: 2062 - DNA, 2240 bp, Homo sapiens
  source 1..2240: mol_type = genomic DNA
accgccaccatgagagagccggcgctggcggccagcgccatggcttaccacccgttccacgcgccacggcccgccgacttccccatgtccgcctttctggcggcggcgcagccctccttcttcccggcactcgcgctgccgcccggcgcgctggccaagccgctgcccgacccgggcctggcgggggcggcggccgcggcggcggcggcggcagcagcggccgaggcggggctgcacgtctcggcactgggcccgcacccgcccgccgcgcatctgcgctccctcaagagcctggagcccgaggacgaggtggaggacgaccccaaggtgacgctggaggccaaggagctgtgggaccagttccacaagctaggcacggagatggtcatcaccaagtccgggaggcggatgttcccccccttcaaggtgcgagtcagcggcctggacaagaaggccaagtatatcctgctgatggacattgtagccgctgacgattgccgctataagttccacaactcgcgctggatggtggcgggcaaggccgaccctgagatgcccaaacgcatgtacatccacccagacagcccagccacgggggagcagtggatggctaagcctgtggccttccacaagctgaagctgaccaacaacatctctgacaagcacggcttcaccatcctaaactccatgcacaagtaccagccgcgcttccacatagtgcgagccaacgacatcctgaagctgccttacagcaccttccgcacctacgtgttcccggagaccgacttcatcgccgtcactgcctaccagaatgacaagatcacacagctgaagatcgacaacaacccgtttgccaagggcttccgggacaccgggaacggccggcgggagaaaaggaagcagctgacgctgccgtctctacgcttgtacgaggagcactgcaaacccgagcgcgatggcgcggagtcagacgcctcgtcgtgcgaccctccccccgcgcgggaaccacccacctccccgggcgcagcgcccagtccgctgcgcctgcaccgggcccgagctgaggagaagtcgtgcgccgcggacagcgacccggagcctgagcggttgagcgaggagcgtgcgggggcgccgctaggccgcagcccggctccagacagcgccagccccactcgcttgaccgaacccgagcgcgcccgggagcggcgtagtcccgagaggggcaaggagccggccgagagcggcggggacggcccgttcggcctgaggagcctggagaaggagcgcgccgaagctcggaggaaggacgaggggcgcaaggaggcggccgagggcaaggagcagggcctggcgccgctggtggtgcagacagacagtgcgtcccccctgggcgccggacacctgcccggcctggccttttccagccacttgcacgggcagcagttctttgggccgctgggagccggccagccgctcttcctgcaccctggacagttcaccatgggccctggcgccttctccgccatgggcatgggtcacctactggcctcggtggcaggcggcggcaacggcggaggtggcgggcctgggaccgccgcggggctggacgcaggcgggctgggtcccgcggccagcgcagcaagcaccgccgcgcccttcccgttccacctctcccagcacatgctggcatctcagggaattccaatgcccactttcggaggcctcttcccctacccctacacctacatggcagcagcagccgcagccgcctcggctttgcccgccactagtgctgcagctgccgccgccgcagccgccggctccctctcccggagccccttcctgggcagtgcccggccccgactgcgtttcagcccctatcagatcccggtcaccatcccgcctagcactagcctcctcaccaccgggctggcctctgagggctccaaggccgctggtggaaacagccgggagcctagccccctgcccgagctggctctccgcaaagtaggggccccatcccgcggtgccctgtcgcccagtggctcggccaaggaggcggccaatgaactgcagagcatccagagactggtgagtgggctggagagccagcgagccctctccccaggccgggagtcgcccaagtagtaatgaactagtccgtaacttgaaagtatttcgatttcttggctttatatatcttgtggaaaggacgagtgaatatagcaccgctggtttcg

SEQ ID NO: 2063 - DNA, 2333 bp, Homo sapiens
  source 1..2333: mol_type = genomic DNA
accgccaccatgagcctctccatgagagatccggtcattcctgggacaagcatggcctaccatccgttcctacctcaccgggcgccggacttcgccatgagcgcggtgctgggtcaccagccgccgttcttccccgcgctgacgctgcctcccaacggcgcggcggcgctctcgctgccgggcgccctggccaagccgatcatggatcaattggtgggggcggccgagaccggcatcccgttctcctccctggggccccaggcgcatctgaggcctttgaagaccatggagcccgaagaagaggtggaggacgaccccaaggtgcacctggaggctaaagaactttgggatcagtttcacaagcggggcaccgagatggtcattaccaagtcgggaaggcgaatgtttcctccatttaaagtgagatgttctgggctggataaaaaagccaaatacattttattgatggacattatagctgctgatgactgtcgttataaatttcacaattctcggtggatggtggctggtaaggccgaccccgaaatgccaaagaggatgtacattcacccggacagccccgctactggggaacagtggatgtccaaagtcgtcactttccacaaactgaaactcaccaacaacatttcagacaaacatggatttactttggccttcccaagtgatcacgctacgtggcaggggaattatagttttggtactcagactatattgaactccatgcacaaataccagccccggttccacattgtaagagccaatgacatcttgaaactcccttatagtacatttcggacatacttgttccccgaaactgaattcatcgctgtgactgcataccagaatgataagataacccagttaaaaatagacaacaacccttttgcaaaaggtttccgggacactggaaatggccgaagagaaaaaagaaaacagctcaccctgcagtccatgagggtgtttgatgaaagacacaaaaaggagaatgggacctctgatgagtcctccagtgaacaagcagctttcaactgcttcgcccaggcttcttctccagccgcctccactgtagggacatcgaacctcaaagatttatgtcccagcgagggtgagagcgacgccgaggccgagagcaaagaggagcatggccccgaggcctgcgacgcggccaagatctccaccaccacgtcggaggagccctgccgtgacaagggcagccccgcggtcaaggctcaccttttcgctgctgagcggccccgggacagcgggcggctggacaaagcgtcgcccgactcacgccatagccccgccaccatctcgtccagcactcgcggcctgggcgcggaggagcgcaggagcccggttcgcgagggcacagcgccggccaaggtggaagaggcgcgcgcgctcccgggcaaggaggccttcgcgccgctcacggtgcagacggacgcggccgccgcgcacctggcccagggccccctgcctggcctcggcttcgccccgggcctggcgggccaacagttcttcaacgggcacccgctcttcctgcaccccagccagtttgccatggggggcgccttctccagcatggcggccgctggcatgggtcccctcctggccacggtttctggggcctccaccggtgtctcgggcctggattccacggccatggcctctgccgctgcggcgcagggactgtccggggcgtccgcggccaccctgcccttccacctccagcagcacgtcctggcctctcagggcctggccatgtcccctttcggaagcctgttcccttacccctacacgtacatggccgcagcggcggccgcctcctctgcggcagcctccagctcggtgcaccgccaccccttcctcaatctgaacaccatgcgcccgcggctgcgctacagcccctactccatcccggtgccggtcccggacggcagcagtctgctcaccaccgccctgccctccatggcggcggccgcggggcccctggacggcaaagtcgccgccctggccgccagcccggcctcggtggcagtggactcgggctctgaactcaacagccgctcctccacgctctcctccagctccatgtccttgtcgcccaaactctgcgcggagaaagaggcggccaccagcgaactgcagagcatccagcggttggttagcggcttggaagccaagccggacaggtcccgcagcgcgtccccgtagtaatgaactagtccgtaacttgaaagtatttcgatttcttggctttatatatcttgtggaaaggacgaacgtatctgggtgtgttccagtct

SEQ ID NO: 2064 - DNA, 2273 bp, Homo sapiens
  source 1..2273: mol_type = genomic DNA
accgccaccatgagcctctccatgagagatccggtcattcctgggacaagcatggcctaccatccgttcctacctcaccgggcgccggacttcgccatgagcgcggtgctgggtcaccagccgccgttcttccccgcgctgacgctgcctcccaacggcgcggcggcgctctcgctgccgggcgccctggccaagccgatcatggatcaattggtgggggcggccgagaccggcatcccgttctcctccctggggccccaggcgcatctgaggcctttgaagaccatggagcccgaagaagaggtggaggacgaccccaaggtgcacctggaggctaaagaactttgggatcagtttcacaagcggggcaccgagatggtcattaccaagtcgggaaggcgaatgtttcctccatttaaagtgagatgttctgggctggataaaaaagccaaatacattttattgatggacattatagctgctgatgactgtcgttataaatttcacaattctcggtggatggtggctggtaaggccgaccccgaaatgccaaagaggatgtacattcacccggacagccccgctactggggaacagtggatgtccaaagtcgtcactttccacaaactgaaactcaccaacaacatttcagacaaacatggatttactatattgaactccatgcacaaataccagccccggttccacattgtaagagccaatgacatcttgaaactcccttatagtacatttcggacatacttgttccccgaaactgaattcatcgctgtgactgcataccagaatgataagataacccagttaaaaatagacaacaacccttttgcaaaaggtttccgggacactggaaatggccgaagagaaaaaagaaaacagctcaccctgcagtccatgagggtgtttgatgaaagacacaaaaaggagaatgggacctctgatgagtcctccagtgaacaagcagctttcaactgcttcgcccaggcttcttctccagccgcctccactgtagggacatcgaacctcaaagatttatgtcccagcgagggtgagagcgacgccgaggccgagagcaaagaggagcatggccccgaggcctgcgacgcggccaagatctccaccaccacgtcggaggagccctgccgtgacaagggcagccccgcggtcaaggctcaccttttcgctgctgagcggccccgggacagcgggcggctggacaaagcgtcgcccgactcacgccatagccccgccaccatctcgtccagcactcgcggcctgggcgcggaggagcgcaggagcccggttcgcgagggcacagcgccggccaaggtggaagaggcgcgcgcgctcccgggcaaggaggccttcgcgccgctcacggtgcagacggacgcggccgccgcgcacctggcccagggccccctgcctggcctcggcttcgccccgggcctggcgggccaacagttcttcaacgggcacccgctcttcctgcaccccagccagtttgccatggggggcgccttctccagcatggcggccgctggcatgggtcccctcctggccacggtttctggggcctccaccggtgtctcgggcctggattccacggccatggcctctgccgctgcggcgcagggactgtccggggcgtccgcggccaccctgcccttccacctccagcagcacgtcctggcctctcagggcctggccatgtcccctttcggaagcctgttcccttacccctacacgtacatggccgcagcggcggccgcctcctctgcggcagcctccagctcggtgcaccgccaccccttcctcaatctgaacaccatgcgcccgcggctgcgctacagcccctactccatcccggtgccggtcccggacggcagcagtctgctcaccaccgccctgccctccatggcggcggccgcggggcccctggacggcaaagtcgccgccctggccgccagcccggcctcggtggcagtggactcgggctctgaactcaacagccgctcctccacgctctcctccagctccatgtccttgtcgcccaaactctgcgcggagaaagaggcggccaccagcgaactgcagagcatccagcggttggttagcggcttggaagccaagccggacaggtcccgcagcgcgtccccgtagtaatgaactagtccgtaacttgaaagtatttcgatttcttggctttatatatcttgtggaaaggacgacaccctcggatcatttgggataat

SEQ ID NO: 2065 - DNA, 1784 bp, Homo sapiens
  source 1..1784: mol_type = genomic DNA
accgccaccatgcttctgctcctcagtgaccagctcctgctcactgccctcagaaagcccaaccctcaggcaatggcggccttgttcctgtctgccccaccccaggccgaggtgaccttcgaggacgtggctgtgtacctctcccgggaggaatggggccgcctgggccctgctcagaggggcctctacagggacgtgatgctggagacctacgggaacctagtctcactgggagtaggacctgcaggccccaagcctggagtgatctcgcagttggagcgaggggatgagccctgggtcctggatgttcagggcacctctgggaaagagcacctgagagtcaacagcccagctcttgggaccagaactgagtacaaggagttgacttcacaggagacatttggtgaggaagatccccagggatctgagccagtagaagcctgtgaccacatcagtaagtcagaggggagcctggaaaagctagtggagcagagaggccccagggcagtcacactgaccaacggggagagcagcagggagtctgggggaaacctcaggttgctgtcaagacctgttcctgatcagagacctcacaaatgtgatatatgtgagcaaagttttgaacagagatcatatctcaacaaccataagcgtgtacacaggtcaaaaaaaacaaatacagttcgtaactctggggaaatcttcagtgcaaacttagttgttaaagaagatcagaaaattcctactgggaaaaaattgcattattgcagttactgtgggaaaacattcaggtacagtgccaaccttgtcaagcatcagcggcttcacactgaagagaagccctacaaatgtgatgagtgtgggaaagccttcagccagagctgcgagttcatcaatcaccgaaggatgcactcaggagagattccctaccggtgtgacgagtgtgggaagacattcacccggaggcccaacctcatgaagcaccagaggattcacactggggagaaaccctacaagtgtggggagtgtgggaagcactttagcgcctactcttccctgatttatcaccagagaatccacaccggagagaaaccctataaatgtaatgactgcgggaaagccttcagtgatggctcaatccttatccgacatcgtcggactcacaccggagagaagccatttgagtgcaaggaatgtggcaaaggctttacacaaagttctaaccttatccaacatcagagaattcacactggagagaaaccctataaatgtaatgaatgtgagaaagctttcattcaaaaaaccaaactcgtggaacatcagagaagccacactggagagaagccctatgaatgcaatgactgtggcaaagttttcagccaaagcacacacctcatccagcaccagagaatccacacaggagagaagccctacaagtgcagcgagtgtgggaaggccttccacaacagttccagactcatccaccaccagaggctgcaccacggagagaaaccctacagatgcagcgattgcaagaaagccttcagccagagcacgtacttgattcagcaccggaggatccacaccggggagaagccctacaagtgcagcgagtgtgggaaggccttccggcacagttccaacatgtgtcagcatcagcggattcacctccgggaggacttctccatgtagtaatgaactagtccgtaacttgaaagtatttcgatttcttggctttatatatcttgtggaaaggacgagagtgtgttacctcgttgggcaca

SEQ ID NO: 2066 - DNA, 1589 bp, Homo sapiens
  source 1..1589: mol_type = genomic DNA
accgccaccatgcacttcagcaccgtcaccagggacatggaagccttcacggccagcagcctgagcagcctgggggccgcggggggcttcccgggcgccgcgtcgcccggcgccgacccgtacggcccgcgcgagcccccgccgccgccgccgcgctacgacccgtgcgccgccgccgcccccggcgccccgggcccgccgccgccgccgcacgcctacccgtttgcgccggccgccggggccgccaccagcgccgccgccgagcccgagggccccggggccagctgcgcggccgcagccaaggcgccggtgaagaagaacgcgaaggtggccggtgtgagcgtgcagctagagatgaaggcgctgtgggacgagttcaaccagctgggcaccgagatgatcgtcaccaaggccggcaggcggatgtttcccaccttccaagtgaagctcttcggcatggatcccatggccgactatatgctgctcatggacttcgtgccggtggacgataagcgctaccggtacgccttccacagctcctcctggctggtggcggggaaggccgaccctgccacgccaggccgcgtgcactaccacccggactcgcctgccaagggcgcgcagtggatgaagcaaatcgtgtccttcgacaagctcaagctgaccaacaacctactggacgacaacggccacattattctgaattccatgcacagataccagccccgcttccacgtggtctatgtggacccacgcaaagatagcgagaaatatgccgaggagaacttcaaaacctttgtgttcgaggagacacgattcaccgcggtcactgcctaccagaaccatcggatcacgcagctcaagattgccagcaatcccttcgcgaaaggcttccgggactgtgaccctgaggactggccccggaaccaccggcccggcgcactgccgctcatgagcgccttcgcgcgctcgcggaaccccgtggcttccccgacgcagcccagcggcacggagaaagacgcggctgaggcccggcgagaattccagcgcgacgcgggcgggccagcagtgctcggggacccggcgcatcctccgcagctgctggcccgggtgctaagcccctcgctgcccggggccggcggcgccggcggcttagtcccgctgcccggcgcgcccggaggccggcccagtcccccgaaccccgagctgcgcctggaggcgcccggcgcatcggagccgctgcaccaccacccctacaaatatccggccgccgcctacgaccactatctcggggccaagagccggccggcgccctacccgctgcccggcctgcgtggccacggctaccacccgcacgcgcatccgcaccaccaccaccaccccgtgagtccagccgccgcggccgccgccgccgctgccgcagctgccgcggccgccaacatgtactcgtcggccggagccgcgccgcccggctcctacgactattgccccagatagtaatgaactagtccgtaacttgaaagtatttcgatttcttggctttatatatcttgtggaaaggacgatggaagattagtgactttacccgt

SEQ ID NO: 2067 - DNA, 1220 bp, Homo sapiens
  source 1..1220: mol_type = genomic DNA
accgccaccatgcacttcagcaccgtcaccagggacatggaagccttcacggccagcagcctgagcagcctgggggccgcggggggcttcccgggcgccgcgtcgcccggcgccgacccgtacggcccgcgcgagcccccgccgccgccgccgcgctacgacccgtgcgccgccgccgcccccggcgccccgggcccgccgccgccgccgcacgcctacccgtttgcgccggccgccggggccgccaccagcgccgccgccgagcccgagggccccggggccagctgcgcggccgcagccaaggcgccggtgaagaagaacgcgaaggtggccggtgtgagcgtgcagctagagatgaaggcgctgtgggacgagttcaaccagctgggcaccgagatgatcgtcaccaaggccggcaggcggatgtttcccaccttccaagtgaagctcttcggcatggatcccatggccgactatatgctgctcatggacttcgtgccggtggacgataagcgctaccggtacgccttccacagctcctcctggctggtggcggggaaggccgaccctgccacgccaggccgcgtgcactaccacccggactcgcctgccaagggcgcgcagtggatgaagcaaatcgtgtccttcgacaagctcaagctgaccaacaacctactggacgacaacggccacattattctgaattccatgcacagataccagccccgcttccacgtggtctatgtggacccacgcaaagatagcgagaaatatgccgaggagaacttcaaaacctttgtgttcgaggagacacgattcaccgcggtcactgcctaccagaaccatcggatcacgcagctcaagattgccagcaatcccttcgcgaaaggcttccgggactgtgaccctgaggactggccccggaaccaccggcccggcgcactgccgctcatgagcgccttcgcgcgctcgcggaaccccgtggcttccccgacgcagcccagcggcacggagaaagggctggtcacagaaggctctgggctccaacctggcttgctggacgtgctcttgaagcccccaagtaagaagtctgagtccctgagaccaccacactgcaaggacacttagtaatgaactagtccgtaacttgaaagtatttcgatttcttggctttatatatcttgtggaaaggacgacgtgccacaggaaacagtatatga

SEQ ID NO: 2068 - DNA, 1298 bp, Homo sapiens
  source 1..1298: mol_type = genomic DNA
accgccaccatgcacttcagcaccgtcaccagggacatggaagccttcacggccagcagcctgagcagcctgggggccgcggggggcttcccgggcgccgcgtcgcccggcgccgacccgtacggcccgcgcgagcccccgccgccgccgccgcgctacgacccgtgcgccgccgccgcccccggcgccccgggcccgccgccgccgccgcacgcctacccgtttgcgccggccgccggggccgccaccagcgccgccgccgagcccgagggccccggggccagctgcgcggccgcagccaaggcgccggtgaagaagaacgcgaaggtggccggtgtgagcgtgcagctagagatgaaggcgctgtgggacgagttcaaccagctgggcaccgagatgatcgtcaccaaggccggcaggcggatgtttcccaccttccaagtgaagctcttcggcatggatcccatggccgactatatgctgctcatggacttcgtgccggtggacgataagcgctaccggtacgccttccacagctcctcctggctggtggcggggaaggccgaccctgccacgccaggccgcgtgcactaccacccggactcgcctgccaagggcgcgcagtggatgaagcaaatcgtgtccttcgacaagctcaagctgaccaacaacctactggacgacaacggccacattattctgaattccatgcacagataccagccccgcttccacgtggtctatgtggacccacgcaaagatagcgagaaatatgccgaggagaacttcaaaacctttgtgttcgaggagacacgattcaccgcggtcactgcctaccagaaccatcggatcacgcagctcaagattgccagcaatcccttcgcgaaaggcttccgggactgtgaccctgaggactggccccggaaccaccggcccggcgcactgccgctcatgagcgccttcgcgcgctcgcggaaccccgtggcttccccgacgcagcccagcggcacggagaaaggtggacatgtcctgaaggacaaggaagtgaaagctgagacgtctaggaacacaccagagagagaagtggagcttctgagggatgcaggtggctgtgtgaacctggggctcccctgccccgcagagtgccaacccttcaatacccagggcctggtggctgggaggaccgcaggtgaccgtctttgttagtaatgaactagtccgtaacttgaaagtatttcgatttcttggctttatatatcttgtggaaaggacgaccatttggtgcttgctatgacgag

SEQ ID NO: 2069 - DNA, 1412 bp, Homo sapiens
  source 1..1412: mol_type = genomic DNA
accgccaccatgtaccatccacgagaattgtacccgtccctgggggccggctaccgcctggggcccgcccaacctggggccgactccagcttcccacccgccctagcggagggctaccgctaccccgaactggacacccctaaactggattgcttcctctccgggatggaggctgctccccgcaccctggccgcgcacccacctctgccccttctgccccctgccatgggcactgagccggccccatcagctccagaggccctccattccctcccgggggtcagcctgagcctggagaaccgggagctatggaaggagttcagctctgtgggaacagaaatgatcatcaccaaagctgggaggcgcatgttccctgcctgccgagtgtcagtcactggcctggaccccgaggcccgctacttgtttcttctggatgtgattccggtggatggggctcgctaccgctggcagggccggcgctgggagcccagcggcaaggcagagccccgcctgcctgaccgtgtctacattcaccccgactctcctgccactggtgcacattggatgcggcagcctgtgtctttccatcgtgtcaagctcaccaacagcacgctggacccccacggccacctgatcctgcactccatgcacaagtaccaaccccgcatacacctagttcgggcagcccagctctgcagccagcactgggggggcatggcctccttccgcttccccgagaccacattcatctccgtgacagcctaccagaacccacagatcacacaactgaagattgcagccaatccctttgccaaaggcttccgggagaacggcagaaactgtaagagggagcgagacgcccgtgtgaagaggaaactgcggggcccagagccagcagccacagaggcctatgggagcggagacacaccaggtggtccctgcgactccaccctgggtggagacattcgtgaatcagatccagaacaggccccagcccccggggaagccaccgctgccccggcacctctgtgtggtggccccagtgctgaggcctacctcctgcaccctgcggctttccatggggcccccagtcaccttcccaccaggagccccagcttcccggaggctccagactccgggcgctcagccccctactcggctgcatttctggagctgccgcacgggtcagggggctccgggtacccagcggctccaccggcggtaccctttgccccgcactttctccaagggggccccttccctctaccatacaccgcgcctgggggctatctggatgtgggctccaaacccatgtactagtaatgaactagtccgtaacttgaaagtatttcgatttcttggctttatatatcttgtggaaaggacgacgcctgcgcagtccaatagtaagc

SEQ ID NO: 2070 - DNA, 1742 bp, Homo sapiens
  source 1..1742: mol_type = genomic DNA
accgccaccatgctgcaggataagggcctgtccgagagcgaggaggccttccgggccccgggcccagcgctcggagaggccagcgcagccaacgcccccgagcccgcgctggcagcgccgggcctcagcggagccgcgctaggcagccccccgggacccggggccgacgtcgtcgccgccgccgccgcggagcagaccatcgagaacatcaaggtggggctgcatgagaaggagctctggaagaagttccacgaggcgggcaccgagatgatcatcactaaggctggcaggaggatgttccccagctacaaggtaaaagtcacaggcatgaaccccaagaccaagtatatcctgctgattgacattgtccctgccgatgaccatcgctacaagttctgtgacaacaaatggatggtggcagggaaggctgagccagccatgccaggaaggctgtatgtccacccggattctcctgccacaggagcccactggatgcggcagctggtctccttccagaagctgaagctgacaaacaaccacctggacccctttggccatatcatcctcaactctatgcacaagtaccagccgcggctccacatcgttaaggctgatgagaacaatgctttcggctccaaaaacactgctttctgcacccacgtgttcccagagacctccttcatctctgtgacctcctaccagaatcacaagatcacccagctgaaaattgagaacaacccttttgccaagggattccggggcagtgatgacagtgacctgcgtgtggcccgactgcagagcaaagaataccccgtgatttccaaaagcatcatgaggcagaggctcatctccccccagctctcagccacaccggacgtgggccccctgctcggcacccaccaggcactccagcactaccagcacgagaacggggcacactcacagctcgcggagccgcaggacctgcccctcagcacctttcccacccagagggactcaagcctcttctatcactgcctgaaaagacgagcagacggtacccgccacctggacttaccttgcaagcgatcctatctggaagccccctcttcggtgggggaggatcactatttccgttccccccctccctacgaccagcaaatgctgagcccctcctactgcagtgaggtgacccccagagaagcatgtatgtactcaggttcagggcccgagattgccggggtgtctggggtggacgacctgcccccacctccgctgagctgtaacatgtggacttcagtgtcgccgtacaccagctatagcgtgcagacgatggagactgtgccgtaccagcccttccccacgcacttcaccgccaccaccatgatgccgcggctgcccaccctctccgctcagagctcccagccaccaggaaatgcccactttagtgtctacaatcagctctcccagtctcaggtccgagagcgggggcccagcgcctcattcccaagagagcgcggcctcccccaagggtgtgagaggaagccaccctcgccacatctaaatgctgccaatgagtttctctactctcaaaccttctccttgtcccgagaatcttccttacagtaccattcaggaatggggactgtggagaactggactgacggatagtaatgaactagtccgtaacttgaaagtatttcgatttcttggctttatatatcttgtggaaaggacgaccctctgtctttcctcatgcgatt

SEQ ID NO: 2071 - DNA, 1739 bp, Homo sapiens
  source 1..1739: mol_type = genomic DNA
accgccaccatgctgcaggataagggcctgtccgagagcgaggaggccttccgggccccgggcccagcgctcggagaggccagcgcagccaacgcccccgagcccgcgctggcagcgccgggcctcagcggagccgcgctaggcagccccccgggacccggggccgacgtcgtcgccgccgccgccgcggagcagaccatcgagaacatcaaggtggggctgcatgagaaggagctctggaagaagttccacgaggcgggcaccgagatgatcatcactaaggctggcaggaggatgttccccagctacaaggtaaaagtcacaggcatgaaccccaagaccaagtatatcctgctgattgacattgtccctgccgatgaccatcgctacaagttctgtgacaacaaatggatggtggcagggaaggctgagccagccatgccaggaaggctgtatgtccacccggattctcctgccacaggagcccactggatgcggcagctggtctccttccagaagctgaagctgacaaacaaccacctggacccctttggccatatcatcctcaactctatgcacaagtaccagccgcggctccacatcgttaaggctgatgagaacaatgctttcggctccaaaaacactgctttctgcacccacgtgttcccagagacctccttcatctctgtgacctcctaccagaatcacaagatcacccagctgaaaattgagaacaacccttttgccaagggattccggggcagtgatgacagtgacctgcgtgtggcccgactgcagagcaaagaataccccgtgatttccaaaagcatcatgaggcagaggctcatctccccccagctctcagccacaccggacgtgggccccctgctcggcacccaccaggcactccagcactaccagcacgagaacggggcacactcacagctcgcggagccgcaggacctgcccctcagcacctttcccacccagagggactcaagcctcttctatcactgcctgaaaagacgagacggtacccgccacctggacttaccttgcaagcgatcctatctggaagccccctcttcggtgggggaggatcactatttccgttccccccctccctacgaccagcaaatgctgagcccctcctactgcagtgaggtgacccccagagaagcatgtatgtactcaggttcagggcccgagattgccggggtgtctggggtggacgacctgcccccacctccgctgagctgtaacatgtggacttcagtgtcgccgtacaccagctatagcgtgcagacgatggagactgtgccgtaccagcccttccccacgcacttcaccgccaccaccatgatgccgcggctgcccaccctctccgctcagagctcccagccaccaggaaatgcccactttagtgtctacaatcagctctcccagtctcaggtccgagagcgggggcccagcgcctcattcccaagagagcgcggcctcccccaagggtgtgagaggaagccaccctcgccacatctaaatgctgccaatgagtttctctactctcaaaccttctccttgtcccgagaatcttccttacagtaccattcaggaatggggactgtggagaactggactgacggatagtaatgaactagtccgtaacttgaaagtatttcgatttcttggctttatatatcttgtggaaaggacgatccttgttatgagcatgcaccaga

SEQ ID NO: 2072 - DNA, 1508 bp, Homo sapiens
  source 1..1508: mol_type = genomic DNA
accgccaccatggagggaatcaaagtgtttctccatgaaagagaactgtggctaaaattccacgaagtgggcacggaaatgatcataaccaaggctggaaggcggatgtttcccagttacaaagtgaaggtgacgggccttaatcccaaaacgaagtacattcttctcatggacattgtacctgccgacgatcacagatacaaattcgcagataataaatggtctgtgacgggcaaagctgagcccgccatgcctggccgcctgtacgtgcacccagactcccccgccaccggggcgcattggatgaggcagctcgtctccttccagaaactcaagctcaccaacaaccacctggacccatttgggcatattattctaaattccatgcacaaataccagcctagattacacatcgtgaaagcggatgaaaataatggatttggctcaaaaaatacagcgttctgcactcacgtctttcctgagactgcgtttatagcagtgacttcctaccagaaccacaagatcacgcaattaaagattgagaataatccctttgccaaaggatttcggggcagtgatgacatggagctgcacagaatgtcaagaatgcaaagtaaagaatatcccgtggtccccaggagcaccgtgaggcaaaaagtggcctccaaccacagtcctttcagcagcgagtctcgagctctctccacctcatccaatttggggtcccaataccagtgtgagaatggtgtttccggcccctcccaggacctcctgcctccacccaacccatacccactgccccaggagcatagccaaatttaccattgtaccaagaggaaagaggaagaatgttccaccacagaccatccctataagaagccctacatggagacatcacccagtgaagaagattccttctaccgctctagctatccacagcagcagggcctgggtgcctcctacaggacagagtcggcacagcggcaagcttgcatgtatgccagctctgcgccccccagcgagcctgtgcccagcctagaggacatcagctgcaacacgtggccaagcatgccttcctacagcagctgcaccgtcaccaccgtgcagcccatggacaggctaccctaccagcacttctccgctcacttcacctcggggcccctggtccctcggctggctggcatggccaaccatggctccccacagctgggagagggaatgttccagcaccagacctccgtggcccaccagcctgtggtcaggcagtgtgggcctcagactggcctgcagtcccctggcacccttcagccccctgagttcctctactctcatggcgtgccaaggactctatcccctcatcagtaccactctgtgcacggagttggcatggtgccagagtggagcgacaatagctagtaatgaactagtccgtaacttgaaagtatttcgatttcttggctttatatatcttgtggaaaggacgaacgctccagggactgattggacac

SEQ ID NO: 2073 - DNA, 1658 bp, Homo sapiens
  source 1..1658: mol_type = genomic DNA
accgccaccatggccgacgcagacgagggctttggcctggcgcacacgcctctggagcctgacgcaaaagacctgccctgcgattcgaaacccgagagcgcgctcggggcccccagcaagtccccgtcgtccccgcaggccgccttcacccagcagggcatggagggaatcaaagtgtttctccatgaaagagaactgtggctaaaattccacgaagtgggcacggaaatgatcataaccaaggctggaaggcggatgtttcccagttacaaagtgaaggtgacgggccttaatcccaaaacgaagtacattcttctcatggacattgtacctgccgacgatcacagatacaaattcgcagataataaatggtctgtgacgggcaaagctgagcccgccatgcctggccgcctgtacgtgcacccagactcccccgccaccggggcgcattggatgaggcagctcgtctccttccagaaactcaagctcaccaacaaccacctggacccatttgggcatattattctaaattccatgcacaaataccagcctagattacacatcgtgaaagcggatgaaaataatggatttggctcaaaaaatacagcgttctgcactcacgtctttcctgagactgcgtttatagcagtgacttcctaccagaaccacaagatcacgcaattaaagattgagaataatccctttgccaaaggatttcggggcagtgatgacatggagctgcacagaatgtcaagaatgcaaagtaaagaatatcccgtggtccccaggagcaccgtgaggcaaaaagtggcctccaaccacagtcctttcagcagcgagtctcgagctctctccacctcatccaatttggggtcccaataccagtgtgagaatggtgtttccggcccctcccaggacctcctgcctccacccaacccatacccactgccccaggagcatagccaaatttaccattgtaccaagaggaaagaggaagaatgttccaccacagaccatccctataagaagccctacatggagacatcacccagtgaagaagattccttctaccgctctagctatccacagcagcagggcctgggtgcctcctacaggacagagtcggcacagcggcaagcttgcatgtatgccagctctgcgccccccagcgagcctgtgcccagcctagaggacatcagctgcaacacgtggccaagcatgccttcctacagcagctgcaccgtcaccaccgtgcagcccatggacaggctaccctaccagcacttctccgctcacttcacctcggggcccctggtccctcggctggctggcatggccaaccatggctccccacagctgggagagggaatgttccagcaccagacctccgtggcccaccagcctgtggtcaggcagtgtgggcctcagactggcctgcagtcccctggcacccttcagccccctgagttcctctactctcatggcgtgccaaggactctatcccctcatcagtaccactctgtgcacggagttggcatggtgccagagtggagcgacaatagctagtaatgaactagtccgtaacttgaaagtatttcgatttcttggctttatatatcttgtggaaaggacgaacctcacacagggtgaagcatgga

SEQ ID NO: 2074 - DNA, 554 bp, Homo sapiens
  source 1..554: mol_type = genomic DNA
accgccaccatggcccttactcaggggcaattgtcattcagcgatgtggccatagaattctctcaggaggagtggaaatgcctggaccctgggcagaaagctttatacagggacgtgatgttagagaactacaggaacctggtctccctagatttttcacttctggcctgggacgcgcgcgtcttcagggtggaagcctggcgcgcgtccggaggtgctgaggagccaaccggcccaaactttgtgggaaatgactcccctctgccctcgcccctcgctctgctaccatttccttccgtttctgcttcgcttggcgatgcaaaacgcgcgaggctcacggcagagggccgaggccacgggactctcagggccgggcccgcccctcggccgcgcagtgcggcgccgcacgccccggacgctgtccagcgttggccgcctgagcagaggctgccgcggagctagtaatgaactagtccgtaacttgaaagtatttcgatttcttggctttatatatcttgtggaaaggacgattccacctctagttgagaggtaac

SEQ ID NO: 2075 - DNA, 683 bp, Homo sapiens
  source 1..683: mol_type = genomic DNA
accgccaccatggcccttactcaggggcaattgtcattcagcgatgtggccatagaattctctcaggaggagtggaaatgcctggaccctgggcagaaagctttatacagggacgtgatgttagagaactacaggaacctggtctccctaggaatctgtcttcctgacctgagtgttacctccatgttggagcaaaagagagatccctggactctgcagagtgaagtgaaaataataaacaatccagatggcagggagtgcatcaaaggtgtgaacacagatttttcacttctggcctgggacgcgcgcgtcttcagggtggaagcctggcgcgcgtccggaggtgctgaggagccaaccggcccaaactttgtgggaaatgactcccctctgccctcgcccctcgctctgctaccatttccttccgtttctgcttcgcttggcgatgcaaaacgcgcgaggctcacggcagagggccgaggccacgggactctcagggccgggcccgcccctcggccgcgcagtgcggcgccgcacgccccggacgctgtccagcgttggccgcctgagcagaggctgccgcggagctagtaatgaactagtccgtaacttgaaagtatttcgatttcttggctttatatatcttgtggaaaggacgaaccgctacggacatacacatcctc

SEQ ID NO: 2076 - DNA, 2087 bp, Homo sapiens
  source 1..2087: mol_type = genomic DNA
accgccaccatggcccttactcaggggcaattgtcattcagcgatgtggccatagaattctctcaggaggagtggaaatgcctggaccctgggcagaaagctttatacagggacgtgatgttagagaactacaggaacctggtctccctaggaatctgtcttcctgacctgagtgttacctccatgttggagcaaaagagagatccctggactctgcagagtgaagtgaaaataataaacaatccagatggcagggagtgcatcaaaggtgtgaacacagagaagagttctaaattgggaagcagtgcaggaaacaagtcacttaaaaatcaacatggattaactcttcagttacatctgactgaatggcagccatttcaagctgtaaggaatatttatggatgtaagcatgttgagaaatctatcagtgacaattcttcagtttcaccagttcaaataagttttttcagtgtcaaaacccatatttttaataactacagaaatgattttcttttttctacattactcccacaagaacagaaagtacacattagggaaaagccttatggatgtaatgagcatgggaaagtcttcagagtgtcttcaagccttactaaccgtcaagtaatccacattgcagataaaacttacaaatgtagtgactgtggcgagatctttagtagcaattcaaactttgcacaacatcaacgaatccatactggagagaagccttacaaatataatgaatgtggcaaagtcttcaatcagaattcacaccttgcacaacatcagaaaattcatactggacagaaaccttacaataacaaagaatgtgggaaagtctttagtcaccatgcctaccttgcacagcataggaaaattcatactggagagaagccttacaaatgtagtgaatgtggcaaagcatttagtgtgtgttccagtcttactgctcatcttgtaatccatactggagagaaaccttatgattgtaaggaatgtggcaaggtcttcaggcataagtcttccctaaccactcatcagacagttcatactggagagagaccatacaaatgtaatgaatgtggcaaggggtttagtcgaattgcattccttgcaaggcatcggaaagttcatactggagagaaaccttacaaatgtaatgagtgtggcaaggtctttattggcaattcacgccttgcacgacataggaaaattcatactggggggaggcgttacaaatgtaatgaatgtggcaaagcatttagaacgtgttcagatctcactgcccatcttctaatccatactggagagaaaccttacgaatgtatagactgtggcaaggtcttcaggcacaagtcttccctaacctatcactgtagaattcatactggagagaagccttacaaatgtaacgaatgtggcaaggtcttcagtcagaattcaaaccttcaacgacataggaaaattcatactggagagaagctttacaaatgtaatgaatgtggcaaggtcttccgtcagaattcacaccttgcacaacatagggatattcatactggagagaagccttacagttgtaatgaatgtggcaaggtcttccgtcggaattcacaccttgtgcgacataggaatgttcatactggagaaaagccttacagttgtaatgaatgtggcaaggtcttcagtcggaattcacaccttgcgcgacataggaatattcatactggagagaagcctcacagttgtaatgaatgtggcaaggtcttcagtcggaattcacaccttgcgcgacataggaaaattcatactggagagaagctttacaaatgtaatgaatgtagcaaggtcttcagtcggaattcacgccttgcacaacataggaatattcatactggagtgaagccttacagttgtaatgaatgtggcaaggtctttagtaaaaattccatcctagtacaacattgcagtattcataccagagagaagccttagtaatgaactagtccgtaacttgaaagtatttcgatttcttggctttatatatcttgtggaaaggacgagttctattggaacacgggccaggc

SEQ ID NO: 2077 - DNA, 2126 bp, Homo sapiens
  source 1..2126: mol_type = genomic DNA
accgccaccatggcccttactcaggggcaattgtcattcagcgatgtggccatagaattctctcaggaggagtggaaatgcctggaccctgggcagaaagctttatacagggacgtgatgttagagaactacaggaacctggtctccctaggtgaggataatgtccgtccagaagcctgcatctgctctggaatctgtcttcctgacctgagtgttacctccatgttggagcaaaagagagatccctggactctgcagagtgaagtgaaaataataaacaatccagatggcagggagtgcatcaaaggtgtgaacacagagaagagttctaaattgggaagcagtgcaggaaacaagtcacttaaaaatcaacatggattaactcttcagttacatctgactgaatggcagccatttcaagctgtaaggaatatttatggatgtaagcatgttgagaaatctatcagtgacaattcttcagtttcaccagttcaaataagttttttcagtgtcaaaacccatatttttaataactacagaaatgattttcttttttctacattactcccacaagaacagaaagtacacattagggaaaagccttatggatgtaatgagcatgggaaagtcttcagagtgtcttcaagccttactaaccgtcaagtaatccacattgcagataaaacttacaaatgtagtgactgtggcgagatctttagtagcaattcaaactttgcacaacatcaacgaatccatactggagagaagccttacaaatataatgaatgtggcaaagtcttcaatcagaattcacaccttgcacaacatcagaaaattcatactggacagaaaccttacaataacaaagaatgtgggaaagtctttagtcaccatgcctaccttgcacagcataggaaaattcatactggagagaagccttacaaatgtagtgaatgtggcaaagcatttagtgtgtgttccagtcttactgctcatcttgtaatccatactggagagaaaccttatgattgtaaggaatgtggcaaggtcttcaggcataagtcttccctaaccactcatcagacagttcatactggagagagaccatacaaatgtaatgaatgtggcaaggggtttagtcgaattgcattccttgcaaggcatcggaaagttcatactggagagaaaccttacaaatgtaatgagtgtggcaaggtctttattggcaattcacgccttgcacgacataggaaaattcatactggggggaggcgttacaaatgtaatgaatgtggcaaagcatttagaacgtgttcagatctcactgcccatcttctaatccatactggagagaaaccttacgaatgtatagactgtggcaaggtcttcaggcacaagtcttccctaacctatcactgtagaattcatactggagagaagccttacaaatgtaacgaatgtggcaaggtcttcagtcagaattcaaaccttcaacgacataggaaaattcatactggagagaagctttacaaatgtaatgaatgtggcaaggtcttccgtcagaattcacaccttgcacaacatagggatattcatactggagagaagccttacagttgtaatgaatgtggcaaggtcttccgtcggaattcacaccttgtgcgacataggaatgttcatactggagaaaagccttacagttgtaatgaatgtggcaaggtcttcagtcggaattcacaccttgcgcgacataggaatattcatactggagagaagcctcacagttgtaatgaatgtggcaaggtcttcagtcggaattcacaccttgcgcgacataggaaaattcatactggagagaagctttacaaatgtaatgaatgtagcaaggtcttcagtcggaattcacgccttgcacaacataggaatattcatactggagtgaagccttacagttgtaatgaatgtggcaaggtctttagtaaaaattccatcctagtacaacattgcagtattcataccagagagaagccttagtaatgaactagtccgtaacttgaaagtatttcgatttcttggctttatatatcttgtggaaaggacgactactgcgtatattgtgcgctgcg

SEQ ID NO: 2078 - DNA, 4004 bp, Homo sapiens
  source 1..4004: mol_type = genomic DNA
accgccaccatggaagaagcgagcctgtgccttggagtgtcttcggcggagccggaagctgagccccacctgagtggccccgtcctcaacggccagtatgccatgagtcagaagctgcaccagatcacctcccagctcagccatgccttccccgagctccatccccggcccaaccccgaggagaagccccccgcatccctggaggagaaggcccacgtgcccatgagcggccagcccatgggcagtcagatggcgctcctggccaaccagctgggccgggaggtggacaccagcctcaacgggagggtggacttgcagcagttcctcaacgggcagaacctgggcatcatgtcccagatgagcgacatcgaggacgacgcccgcaagaaccgcaagtacccgtgcccactctgcggcaagcgcttccgcttcaacagcatcctctccctgcacatgcgcacgcacacgggcgagaagcccttcaagtgcccgtactgcgaccacagggcggcgcagaaggggaacctcaagattcacctgcggacccacaagctgggcaacctgggcaaggggcgtgggcgtgtgcgcgaggagaaccgcctgctgcacgagctggaggagcgcgccatcctgcgggacaagcagctgaaaggcagcctgctgcagccccggccggacctgaagcccccgccgcacgcccagcaggccccgctggccgcctgcaccctggccctgcaggctaaccacagcgttcccgacgtggcccacccggtgccctcgcccaagcctgccagcgtgcaggaggacgcggtggccccggcggcgggcttccgctgtaccttctgcaagggcaagttcaagaagcgcgaggagctggaccgccacatccgcatcttgcacaagccctacaagtgcacgttgtgcgacttcgcggcttcgcaggaggaggagctcatcagccacgtggagaaggcacacatcacggccgagtcggcccagggccagggccccaacggcggtggcgagcagtcggccaacgagttccgctgcgaggtgtgcggtcaggtgttcagccaggcgtggttcctcaagggtcacatgcgcaagcacaaagactcctttgagcactgctgccagatctgcggccggcgcttcaaggagccctggttcctcaagaaccacatgaaggtccacctcaacaagctgtcggtgaagaacaagtcccccagcgaccccgaggtgcctgtgcccatgggcggcatgtcccaggaggcccacgccaacctgtactccaggtacctctcctgcctgcagagtggcttcatgaccccggacaaagccggcctgagcgagcccagccagctctatggcaagggcgagctgcccatgaaggagaaggaagcgctggggaagctgctgtctcccatctccagcatggcccacggcgtcccggagggggacaagcactccctcctgggatgcctcaatctcgtgccgccgctgaaatccagctgcatcgagcggctgcaggcggctgccaaggctgcggagatggaccccgtgaacagctaccaggcttggcagctcatggccaggggcatggccatggaacatggcttcttgtctaaagagcatccgctgcagcgcaaccacgaagacactttggcaaacgccggggttctgtttgataaggagaagcgggagtacgtgttagtgggagcagatggctccaagcagaaaatgcctgctgatttggttcacagcactaaagtgggcagccagagagacctgccaagtaagctcgaccctttagaaagcagtcgggattttttgtcacacgggctgaaccagactctcgagtataacctgcagggtcctgggaacatgaaggagaagcccaccgagtgccccgactgcggccgggtgttccgcacttaccaccaggtggtcgtgcactcccgtgtccacaagcgggaccgcaagggcgaggaggatgggctgcacgtgggcctggatgagcggcgtggctcgggcagtgaccaggagtcccagtcggtgagccgctccaccacgccgggctcctctaacgtcaccgaggagagcggggtcggaggcggcctctcccagaccgggagtgcccaggaggacagcccgcacccctcctcgccatcctcctcagacattggcgaggaggctgggagatctgccggcgtccagcaaccagcgctgcttcgcgacagaagcctgggctcggccatgaaggactgcccgtactgtgggaaaactttccggacatcccatcaccttaaggtgcacctgaggatacacacaggtgagaaaccctacaagtgtccgcactgtgactatgccggcacgcagtcagcatccttaaaataccacttagagcgacaccatcgggagcggcagaacggggctgggccgctgtctgggcaacccccaaatcaagaccacaaggatgagatgtcaagcaaagcttctctgttcatcaggccagacatcctgaggggggccttcaagggtctccctggaatcgacttcagaggaggccctgcatctcagcagtggacatcaggggttctctcctctggagatcactcggggcaggccacgggcatgtcttcggaggtcccctcagatgctctgaaaggcactgaccttccttccaaaagcacccacttctctgagatcggaagagcttatcaaagcattgtgagcaacggtgtgaatttccaagggtccttgcaagctttcatggacagttttgtcctcagttccttgaagaaggagaaggacatgaaggacaaagccctggctgaccccccttccatgaaagtccacggagtggatggtggtgaggagaaacccagtggcaagtcctcccagaggaagtccgagaaatctcagtatgaacccctggacttgtctgtgcggccagatgccgcctccctcccgggctcctcggtaactgtgcaggacagcattgcatggcacggctgcttgttttgtgctttcacaacgtcctccatggagctcatggcccttcatctccaggccaaccacctgggcaaagcgaaacgcaaagataacaccatcggggtcacagtcaactgcaaagaccaagcccgggaggcgagtaagatggccctgctgccctcgttacaatcaaacaaagacctgggcctctccaatatgatcagctctctagactctgcttctgagaagatggcccaaggtcagctcaaggagactctgggagagcagaagagcggtgcatggaccggccacgtggaccctgcattttgtaacttcccatcagacttctacaagcagtttggtgtttacccaggcatggttggctcaggggcctccagttcctgccccaacaaggagcctgatggaaaggcccactctgaagaggatgtccccatcctgatccccgaaaccacgagtaagaacactactgatgacctctctgacattgcctcctcagaggacatggactcctccaagggggagaacaacgatgaagaggatgttgaaaccgaaccggaaatgatgaccaagccactgtctgccctcagcaaagacagcagcagcgatggcggggacagcctgcagcccacaggcacctcccagcccgtccagggactggtctcacctttatcccaagcaccggagaagcagtggcacagccagggtcttctccaagcccaggaccccttggcgggcctgccaaagccggagcgggggccccagagcctggacaagccgatgaacatgctgtcggtcctcagggcctacagttctgatggcttagcagcctttaacggacttgcaagtagcacagcaaattctggatgtatcaagaggccagacttgtgtggtaagtagtaatgaactagtccgtaacttgaaagtatttcgatttcttggctttatatatcttgtggaaaggacgagaggcgatcgcagcatgccagatc

SEQ ID NO: 2079 - DNA, 1901 bp, Homo sapiens
  source 1..1901: mol_type = genomic DNA
accgccaccatggcggcggcactgagggccccgacccagcaggtttttgtagcctttgaggatgtggccatttacttctcccaggaggagtgggagctccttgatgagatgcagaggctcctgtaccgcgatgtgatgctggagaactttgcagttatggcatccctaggttgctggtgtggagcagtagatgaggggacgccttctgcagagagcgtttctgtggaagaactgtcacagggcaggactccaaaggcagatacatccactgataagagtcacccctgtgagatttgtaccccagtcctgagagacattttacaaatgattgagctccatgcctcaccctgtggacagaaattgtacttgggtggagcatcaagagatttctggatgagttcaaaccttcaccagctccagaagcttgataatggagagaagctctttaaagtggatggggaccaggcctcatttatgatgaactgcaggttccatgtgtcaggaaaacccttcacgtttggggaagtcgggagggacttttcagccacctcaggacttctccagcatcaggtgactcccaccattgagagaccacacagcaggattagacacttgagagttcccactggacgaaagcctctcaaatacactgaatccaggaaatcttttagagagaaatctgtattcattcaacaccaaagagctgactctggagaaaggccttacaagtgcagtgaatgtgggaaatcctttagtcaaagttctggctttcttcgacacaggaaagcacacggtagaacaaggactcatgaatgtagtgaatgtgggaaatcatttagtcgcaaaactcacctaactcaacaccaaagagttcacactggagaaaggccttatgactgcagtgaatgtggcaaatcctttcgccaggtatctgtcctcattcaacatcaacgagttcacactggagaaaggccttatgagtgcagtgaatgtgggaaatcttttagccacagcactaacctctatcgtcacaggagtgcccacactagcacaaggccttatgagtgcagtgaatgtggaaaatcctttagccatagcactaacctctttcgacactggagagttcacactggagtaaggccttatgagtgtagtgaatgtgggaaagcatttagttgcaatatctaccttattcaccaccaaagatttcacactggagaaagaccttatgtgtgcagtgaatgtgggaaatcatttggccagaaatctgtcctcattcaacaccaaagagttcacactggagaaaggccttatgagtgcagtgaatgtgggaaagtttttagccaaagctctggcctctttcgacacagaagagctcacactaaaacaaagccttatgagtgcagtgaatgtgaaaaatcatttagttgcaaaactgacctcattcgacaccagacagttcacactggagaaaggccttatgagtgcagtgtatgtgggaaatcttttatccgaaaaacccacctcattcgacaccagactgttcacactaatgaaaggccttatgagtgcgatgaatgtgggaaatcctatagccaaagctctgccctccttcagcataggagagttcacactggagaaaggccttatgagtgcagagaatgtgggaaatcttttacccgcaaaaatcacctcattcaacacaagacagttcacactggagaaaggccttatgaatgcagtgaatgtggaaaatcctttagccaaagctctggcctcttaagacacagaagagttcatgtgcagtagtaatgaactagtccgtaacttgaaagtatttcgatttcttggctttatatatcttgtggaaaggacgattaatacagatctaataagctcac

SEQ ID NO: 2080 - DNA, 4007 bp, Homo sapiens
  source 1..4007: mol_type = genomic DNA
[400 bp omitted]cgatctccagtgctgaagagtttgatgacgacgagaagattgaggtggatgacccccctgacaaggaggacatgcgatcaagcttcaggtcgaatgtgttgacggggtcggctccccagcaggactacgataagctgaaggcactcggaggggaaaactccagcaaaactggactctctacgtcaggcaatgtggagaaaaacaaagctgttaagagagaaacagaagccagttctataaacctgagtgtttatgaaccttttaaagtcagaaaagcagaggataaattgaaggaaagctctgacaaggtgctggaaaacagagtcctagatgggaagctgagctccgagaagaatgacaccagcctccccagcgttgcgccatcaaagacaaagtcgtcctccaagctctcgtcctgcatcgctgccatcgcggctctcagcgctaaaaaggcggcttcagactcctgcaaagaaccagtggccaattcgagggaatcctccccgttaccaaaagaagtaaatgacagtccgagagccgctgacaagtctcctgaatcccagaatctcatcgacgggaccaaaaaaccatccctgaagcaaccggatagtcccagaagcatctcaagtgagaacagcagcaaaggatccccgtcctctcccgcagggtccacaccagcaatccccaaagtccgcataaaaaccattaagacatcttctggggaaatcaagagaacagtgaccagggtattgccagaagtggatcttgactctggaaagaaaccttccgagcagacagcgtccgtgatggcctctgtgacatcccttctgtcgtctccagcatcagccgccgtcctttcctctccccccagggcgcctctccagtctgcggtcgtgaccaatgcagtttcccctgcagagctcacccccaaacaggtcacaatcaagcctgtggctactgctttcctcccagtgtctgctgtgaagacggcaggatcccaagtcattaatttgaagctcgctaacaacaccacggtgaaagccacggtcatatctgctgcctctgtccagagtgccagcagcgccatcattaaagctgccaacgccatccagcagcaaactgtcgtggtgccggcatccagcctggccaatgccaaactcgtgccaaagactgtgcaccttgccaaccttaaccttttgcctcagggtgcccaggccacctctgaactccgccaagtgctaaccaaacctcagcaacaaataaagcaggcaataatcaatgcagcagcctcgcaaccccccaaaaaggtgtctcgagtccaggtggtgtcgtccttgcagagttctgtggtggaagctttcaacaaggtgctgagcagtgtcaatccagtccctgtttacatcccaaacctcagtcctcccgccaatgcagggatcacgttaccgacgcgtgggtacaagtgcttggagtgtggggactcctttgcacttgaaaagagtctgacccagcactacgacagacggagcgtgcgcatcgaagtaacgtgcaaccattgtacaaagaacctcgttttttacaacaaatgcagcctcctttcccatgcccgtgggcataaggagaaaggggtggtaatgcaatgctcccacttaattttaaagccagtcccagcagatcaaatgatagtttctccgtcaagcaatacttccacttcaacttccactcttcagagccctgtgggagctggcacacacactgtcacaaaaattcagtctggcataactgggacagtcatatcggctccttcaagcactcccatcaccccagccatgcccctagatgaagacccctccaaactgtgtagacatagtctaaaatgtttggagtgtaatgaagtcttccaggacgagacatcactggctacacatttccagcaggctgcagatacgagtggacaaaagacttgcactatctgccagatgctgcttcctaaccagtgcagttatgcatcacaccagagaatccatcagcacaaatctccctacacctgccctgagtgtggggccatctgcaggtcggtgcacttccagacccacgtcaccaagaactgtctgcactacacgaggagagttggttttcgatgtgtgcattgcaatgttgtgtactctgatgtggctgctctgaagtctcacattcaaggttctcactgtgaagtcttctacaagtgtcctatttgtccaatggcgtttaagtctgccccaagcacacattcccacgcctacacacagcatcctggcatcaagataggagaaccaaaaataatatataagtgttccatgtgcgacactgtgttcaccctgcaaaccttgctgtatcgccactttgaccaacacattgaaaaccagaaggtgtctgttttcaagtgtccagactgttctcttttatatgcacagaagcaacttatgatggaccatatcaagtctatgcatggaacattgaaaagtattgaagggcctccaaacttgggtataaacttgcctttgagcattaagcctgcaactcaaaattcagcaaatcagaacaaagaggacaccaaatccatgaatgggaaagagaaattggaaaagaaatctccatctcctgtgaaaaaatcaatggaaaccaagaaagtggccagtcctgggtggacgtgttgggagtgtgactgcctgttcatgcagagagatgtgtacatatcccacgtgaggaaggagcacgggaagcaaatgaagaaacacccctgccgccagtgtgacaagtctttcagctcgtcccacagcctgtgccggcacaaccggatcaagcacaaaggcatcaggaaagtgtacgcctgctcgcactgcccagactccagacgtacctttaccaaacgtttgatgctggagaagcacgtccagctgatgcatggcatcaaggaccctgacctgaaagaaatgacagatgccaccaatgaggaggaaacagaaataaaagaagacactaaggtccccagtcccaagcggaagttggaagaaccagttctggagttcaggcctccccgaggagcaatcactcaaccactgaaaaagctgaaaatcaatgtttttaaggttcacaagtgtgccgtgtgtggcttcaccaccgaaaacctgctgcaattccacgaacacatccctcagcacaaatcggatggttcttcctaccagtgccgggagtgtggcctctgctacacgtctcacgtctctctgtccaggcacctcttcatcgtacacaagttaaaggaacctcagccagtgtccaagcaaaatggggctggggaagataaccaacaggagaacaaacccagccacgaggatgaatcccctgatggcgccgtgtcagacagaaagtgcaaagtgtgcgcaaaaacttttgaaactgaagctgccttaaatactcacatgcggacacacggcatggccttcatcaaatccaaaaggatgagctcagccgagaaatagtaatgaactagtccgtaacttgaaagtatttcgatttcttggctttatatatcttgtggaaaggacgaactacccgcaggtacagagggccc

SEQ ID NO: 2081 - DNA, 2615 bp, Homo sapiens
  source 1..2615: mol_type = genomic DNA
accgccaccatggctagcaaacgaaaatctacaactccatgcatggttcggacatcacaagtagtagaacaagatgtgcccgaggaagtagacagggccaaagagaaaggaatcggcacaccacagcctgacgtggccaaggacagttgggcagcagaacttgaaaactcttccaaagaaaacgaagtgatagaggtgaaatctatgggggaaagccagtccaaaaaactccaaggtggttatgagtgcaaatactgcccctactccacgcaaaacctgaacgagttcacggagcatgtcgacatgcagcatcccaacgtgattctcaaccccctctacgtgtgtgcagaatgtaacttcacaaccaaaaagtacgactccctatccgaccacaactccaagttccatcccggggaggccaacttcaagctgaagttaattaaacgcaataatcaaactgtcttggaacagtccatcgaaaccaccaaccatgtcgtgtccatcaccaccagtggccctggaactggtgacagtgattctgggatctcggtgagtaaaacccccatcatgaagcctggaaaaccaaaagcggatgccaagaaggtgcccaagaagcccgaggagatcacccccgagaaccacgtggaagggaccgcccgcctggtgacagacacagctgagatcctctcgagactcggcggggtggagctcctccaagacacattaggacacgtcatgccttctgtacagctgccaccaaatatcaaccttgtgcccaaggtccctgtcccactaaatactaccaaatacaactctgccctggatacaaatgccacgatgatcaactctttcaacaagtttccttacccgacccaggctgagttgtcctggctgacagctgcctccaaacacccagaggagcacatcagaatctggtttgccacccagcgcttaaagcatggcatcagctggtccccagaagaggtggaggaggcccggaagaagatgttcaacggcaccatccagtcagtacccccgaccatcactgtgctgcccgcccagttggcccccacaaaggtgacgcagcccatcctccagacggctctaccgtgccagatcctcggccagactagcctggtgctgactcaggtgaccagcgggtcaacaaccgtctcttgctcccccatcacacttgccgtggcaggagtcaccaaccatggccagaagagacccttggtgactccccaagctgcccccgaacccaagcgtccacacatcgctcaggtgccagagcccccacccaaggtggccaaccccccgctcacaccagccagtgaccgcaagaagacaaaggagcagatagcacatctcaaggccagctttctccagagccagttccctgacgatgccgaggtttaccggctcatcgaggtgactggccttgccaggagcgagatcaagaagtggttcagtgaccaccgatatcggtgtcaaaggggcatcgtccacatcaccagcgaatcccttgccaaagaccagttggccatcgcggcctcccgacacggtcgcacgtatcatgcgtacccagactttgccccccagaagttcaaagagaaaacacagggtcaggttaaaatcttggaagacagctttttgaaaagttcttttcctacccaagcagaactggatcggctaagggtggagaccaagctgagcaggagagagatcgactcctggttctcggagaggcggaagcttcgagacagcatggaacaagctgtcttggattccatggggtctggcaaaaaaggccaagatgtgggagcccccaatggtgctctgtctcgactcgaccagctctccggtgcccagttaacaagttctctgcccagcccttcgccagcaattgcaaaaagtcaagaacaggttcatctcctgaggagcacgtttgcaagaacccagtggcctactccccaggagtacgaccagttagcggccaagactggcctggtccgaactgagattgtgcgttggttcaaggagaacagatgcttgctgaaaacgggaaccgtgaagtggatggagcagtaccagcaccagcccatggcagatgatcacggctacgatgccgtagcaaggaaagcaacaaaacccatggccgagagcccaaagaacgggggtgatgtggttccacaatattacaaggaccccaaaaagctctgcgaagaggacttggagaagttggtgaccagggtaaaagtaggcagcgagccagcaaaagactgtttgccagcaaagccctcagaggccacctcagaccggtcagagggcagcagccgggacggccagggtagcgacgagaacgaggagtcgagcgttgtggattacgtggaggtgacggtcggggaggaggatgcgatctcagatagatcagatagctggagtcaggctgcggcagaaggtgtgtcggaactggctgaatcagactccgactgcgtccctgcagaggctggccaggcctagtaatgaactagtccgtaacttgaaagtatttcgatttcttggctttatatatcttgtggaaaggacgaaagagagtcggccctacgcgatga

SEQ ID NO: 2082 - DNA, 2972 bp, Homo sapiens
  source 1..2972: mol_type = genomic DNA
accgccaccatggccagcaagaggaaatccaccacaccatgcatgatcccagtgaagactgtggtgttgcaagatgccagcatggaggcccagcccgctgagaccttgcctgaaggaccccagcaggatctgcccccagaagcatctgctgccagcagtgaggcagcacagaaccccagcagtactgatggctctacactggccaatgggcatcggagcactttagatggctatttatattcctgtaaatactgcgatttcagatcccatgacatgacccaatttgtgggacatatgaactcagagcacacagactttaataaagacccaacctttgtatgcagtgggtgcagttttctggcaaaaacccctgaggggctttccttgcacaatgccacatgtcactccggggaagccagctttgtgtggaacgtggccaagccagacaatcatgtggttgtggagcagagcatccctgagagcaccagcactcctgacctagcgggtgagcccagtgctgaaggggctgatggacaggcagaaatcatcattaccaaaactccaatcatgaagataatgaaaggcaaagctgaagccaaaaaaattcatacactcaaggagaatgtccctagccagcctgtgggtgaggccttaccaaagctgtcgactggagaaatggaggtgagagagggggaccattccttcatcaatggggcagttccagtcagccaggcatctgccagctctgcaaaaaacccccatgccgccaacgggcccctgataggaacagtgccagttttgccagctggcatagcacagttcctctccctccagcagcagcccccagtgcatgcccaacaccatgtccaccagccactgcccacggccaaggcccttcccaaagtgatgatccccctgagcagcattccaacgtacaatgcagccatggactctaacagcttcctgaagaactccttccacaagttcccctaccccaccaaagccgagctctgctatttgactgtggtgaccaagtatccagaagaacagctcaagatctggttcacagcccaaaggctgaagcaggggatcagctggtcccctgaggagattgaggatgcccggaaaaagatgttcaatacagtcatccagtctgtgcctcagcccacaattacggttctaaataccccactcgtcgccagtgctggcaatgtccagcatctcatccaggccgctcttccaggtcacgttgtggggcagccagagggtacaggagggggacttctggtcactcagccattgatggccaatgggttgcaagcaacaagttcccctctccccctcacggtgacatccgtccccaagcagccaggtgtggcacccattaacactgtgtgttcaaatacaacgtcagctgtgaaggtggtcaatgcggcccagtcgctcctcacggcctgccccagcataacctcccaagccttccttgatgctagcatctacaaaaataagaaatctcatgaacagctgtcagctctgaaagggagcttctgtcggaaccagttcccagggcagagcgaagttgaacatctcacaaaagtgacgggcctcagtaccagagaggtgcggaaatggttcagtgatcgtagataccactgccggaacttgaagggctccagagcgatgatacctggagatcacagttccatcatcattgactctgtgccagaggtgtccttctccccatcgtccaaggtccctgaggtaacctgcattccgacaacagccacactagcaacccacccttctgccaaacgacaatcttggcaccagactcctgacttcacaccaaccaaatacaaggagagagcccctgagcagctcagagccctggagagcagttttgcacaaaaccctcttcctcttgatgaggaactggaccgcctgagaagtgaaaccaaaatgacccgacgagaaattgatagctggttttcagagagacggaaaaaagtgaatgctgaggagaccaagaaggctgaggagaatgcctctcaggaggaagaggaggctgctgaggatgagggtggagaagaggatttggccagtgagctaagggtctctggtgaaaatggctctctggaaatgcccagcagccatatcttggcagagcgcaaagtcagccccattaaaatcaacctgaagaacctgagggtcactgaagccaatggcaggaacgagattccagggctgggtgcctgtgaccctgaggatgatgagtcaaacaaactggcagagcagctcccaggcaaagtgagctgcaaaaagactgcccagcagcggcacttgctgcggcagctctttgtccagacacagtggccaagcaaccaggactatgactccatcatggcccagacgggtctgccacggccagaggtggtgcgctggtttggagatagcaggtacgcactgaagaacggccaactcaaatggtacgaagactataagcgaggcaacttcccaccagggctactggtcattgcccctggcaaccgggagctcctgcaggactattacatgacacacaagatgctgtatgaagaggacctgcagaacctctgtgacaagacccagatgagctcccagcaggtcaagcagtggtttgctgagaaaatgggggaggagaccagagccgtggcagacacaggcagtgaggaccagggccctggtactggtgagctcacagcagttcacaaagggatgggtgacacctattcagaggtgtctgagaacagtgagtcgtgggagccccgtgtccctgaggccagctcagagccctttgacacatcgagtccccaggctggacgtcagctcgaaacagactagtaatgaactagtccgtaacttgaaagtatttcgatttcttggctttatatatcttgtggaaaggacgaccacgccttgaagttctagcctgc

SEQ ID NO: 2083 - DNA, 3011 bp, Homo sapiens
  source 1..3011: mol_type = genomic DNA
accgccaccatggccagcaagaggaaatccaccacaccatgcatgatcccagtgaagactgtggtgttgcaagatgccagcatggaggcccagcccgctgagaccttgcctgaaggaccccagcaggatctgcccccagaagcatctgctgccagcagtgaggcagcacagaaccccagcagtactgatggctctacactggccaatgggcatcggagcactttagatggctatttatattcctgtaaatactgcgatttcagatcccatgacatgacccaatttgtgggacatatgaactcagagcacacagactttaataaagacccaacctttgtatgcagtgggtgcagttttctggcaaaaacccctgaggggctttccttgcacaatgccacatgtcactccggggaagccagctttgtgtggaacgtggccaagccagacaatcatgtggttgtggagcagagcatccctgagagcaccagcactcctgacctagcgggtgagcccagtgctgaaggggctgatggacaggcagaaatcatcattaccaaaactccaatcatgaagataatgaaaggcaaagctgaagccaaaaaaattcatacactcaaggagaatgtccctagccagcctgtgggtgaggccttaccaaagctgtcgactggagaaatggaggtgagagagggggaccattccttcatcaatggggcagttccagtcagccaggcatctgccagctctgcaaaaaacccccatgccgccaacgggcccctgataggaacagtgccagttttgccagctggcatagcacagttcctctccctccagcagcagcccccagtgcatgcccaacaccatgtccaccagccactgcccacggccaaggcccttcccaaagtgatgatccccctgagcagcattccaacgtacaatgcagccatggactctaacagcttcctgaagaactccttccacaagttcccctaccccaccaaagccgagctctgctatttgactgtggtgaccaagtatccagaagaacagctcaagatctggttcacagcccaaaggctgaagcaggggatcagctggtcccctgaggagattgaggatgcccggaaaaagatgttcaatacagtcatccagtctgtgcctcagcccacaattacggttctaaataccccactcgtcgccagtgctggcaatgtccagcatctcatccaggccgctcttccaggtcacgttgtggggcagccagagggtacaggagggggacttctggtcactcagccattgatggccaatgggttgcaagcaacaagttcccctctccccctcacggtgacatccgtccccaagcagccaggtgtggcacccattaacactgtgtgttcaaatacaacgtcagctgtgaaggtggtcaatgcggcccagtcgctcctcacggcctgccccagcataacctcccaagccttccttgatgctagcatctacaaaaataagaaatctcatgaacagctgtcagctctgaaagggagcttctgtcggaaccagttcccagggcagagcgaagttgaacatctcacaaaagtgacgggcctcagtaccagagaggtgcggaaatggttcagtgatcgtagataccactgccggaacttgaagggctccagagcgatgatacctggagatcacagttccatcatcattgactctgtgccagaggtgtccttctccccatcgtccaaggtccctgaggtaacctgcattccgacaacagccacactagcaacccacccttctgccaaacgacaatcttggcaccagactcctgacttcacaccaaccaaatacaaggagagagcccctgagcagctcagagccctggagagcagttttgcacaaaaccctcttcctcttgatgaggaactggaccgcctgagaagtgaaaccaaaatgacccgacgagaaattgatagctggttttcagagagacggaaaaaagtgaatgctgaggagaccaagaaggctgaggagaatgcctctcaggaggaagaggaggctgctgaggatgagggtggagaagaggatttggccagtgagctaagggtctctggtgaaaatggctctctggaaatgcccagcagccatatcttggcagagcgcaaagtcagccccattaaaatcaacctgaagaacctgagggtcactgaagccaatggcaggaacgagattccagggctgggtgcctgtgaccctgaggatgatgagtcaaacaaactggcagagcagctcccaggcaaagtgagctgcaaaaagactgcccagcagcggcacttgctgcggcagctctttgtccagacacagtggccaagcaaccaggactatgactccatcatggcccagacgggtctgccacggccagaggtggtgcgctggtttggagatagcaggtacgcactgaagaacggccaactcaaatggtacgaagactataagcgaggcaacttcccaccagggctactggtcattgcccctggcaaccgggagctcctgcaggactattacatgacacacaagatgctgtatgaagaggacctgcagaacctctgtgacaagacccagatgagctcccagcagaaacagactgaatttgatctgattaatgtgaaggactggccagtctgggaaaccgcctgccacgtggaagagccaaacccgactctctgctgccacatgccgttcccatgcccggctgctgggcacctgggagagcttccagaatcctcgcagacagcccagagcctgccgctaccctcggcctgcccaccaccaagcaagcagcaagcaagatggggttctcatcagttcttcctcccacaatgtaggacctttcctttaccttccaatggatagtaatgaactagtccgtaacttgaaagtatttcgatttcttggctttatatatcttgtggaaaggacgactcgggagtgcaacttctctggca

SEQ ID NO: 2084 - DNA, 2723 bp, Homo sapiens
  source 1..2723: mol_type = genomic DNA
accgccaccatggcaagcaggcgaaaatcaacaacaccttgcatggtccttgccagtgaacaagatccagaccttgagttgatatcagatttggatgaaggtcctcctgtgcttacacctgtagaaaacaccagagcagagagtatctcaagtgatgaagaggttcatgaatctgtggattcagacaatcagcaaaataaaaaagttgaaggtggatatgaatgtaaatattgtacttttcaaactccagatctaaatatgtttacttttcatgtggattcggaacatcccaatgtagtgctaaattcatcctatgtttgtgtcgaatgcaattttcttaccaaaaggtatgatgcactttctgagcataatctgaaatatcacccaggagaagagaattttaagttgactatggtgaaacgtaataaccagacaatctttgaacaaacaataaatgatctgacttttgatggtagttttgttaaagaggagaatgcagagcaagcagaatctacagaagtttcttcttcgggaatatctatcagtaaaactcctatcatgaaaatgatgaaaaataaagtggaaaataaacggattgcagttcatcataactcagttgaggacgttcctgaagagaaagagaatgaaatcaaaccagaccgtgaagaaattgtagaaaatccaagttcttcagcttctgaatctaatacaagtacttccattgtaaacagaatacatccaagtactgccagcacggtagtgacaccagcagcagttcttcctggattggcacaggtgataactgctgtatctgctcagcagaattctaatttgattcccaaagtcttaatccctgttaatagcattcccacctacaatgctgcattggataacaatccccttttacttaacacctacaacaagttcccttacccaacaatgtcagaaattacagttctttctgctcaagcaaaatatacagaggaacagatcaagatatggttttcagcccaacgtttaaaacatggtgttagttggactcccgaggaagtagaggaggcaagaaggaaacaattcaatggaacagtgcatactgtacctcagaccataactgttattcctacacacatttccacagggagtaatggtttaccatctattttacagacatgccaaatagttggtcagcctggtctggtccttactcaagtggctggaacaaacaccttgccagttacagcacctatagccttgacagtggcaggcgttccaagtcaaaataatatacagaaaagtcaggtacctgctgctcagcctactgcagaaacaaagccagcaacagcagcagttccaacttctcaaagtgtcaaacatgaaactgcattggtaaaccctgattcatttggcattcgggcaaaaaagacaaaagagcaactggcagaattaaaagttagctaccttaaaaatcagtttccccatgattcagaaattatcagacttatgaaaataacaggcctgacgaaaggagagattaaaaaatggtttagtgacacaaggtacaaccagagaaattcaaagagtaatcagtgcttacatctcaacaatgattcctctaccaccattattatagactccagtgatgaaaccacggaatccccaactgttggtactgcacagcctaagcaatcctggaatccttttcctgactttactccccaaaagtttaaagagaaaactgcagagcagcttcgtgtccttcaggcaagttttctcaacagctctgtacttacagatgaagaattaaataggttaagggcacaaaccaaacttaccagaagagaaatcgatgcttggtttacagagaagaagaaatcaaaagctttaaaggaagagaaaatggaaatagatgaaagtaatgcaggtagttccaaagaagaagctggagaaacttctcctgcagatgaatctggtgcacctaagtcagggagtacaggcaagatatgtaaaaaaacacctgagcagctgcacatgcttaagagtgcatttgtccggacacagtggccatcaccagaagagtatgacaagttggccaaagaaagcgggcttgctagaacagacatagttagttggtttggggacacccgttatgcttggaagaatggaaacttgaaatggtactactactatcagagcgccaattcaagtagtatgaatggtctgtcttcccttaggaaaagagggagagggagacccaaaggacggggaagaggaagaccgcgtgggcggcctagaggaagcaaaagaattaacaactgggacaggggaccatcactcataaaatttaaaactggaactgcaatacttaaggattattacctgaagcacaagtttcttaatgagcaagaccttgatgaacttgttaacaaatcacatatgggctatgagcaggtcagagagtggtttgcagaaagacagagaagatcagaattaggtatagaattatttgaggaaaatgaggaggaagatgaagttattgatgaccaggaagaggatgaagaagaaacagatgatagtgacacttgggaacctccacgacatgtgaaacggaagctgtctaaatcagatgactagtaatgaactagtccgtaacttgaaagtatttcgatttcttggctttatatatcttgtggaaaggacgagtaacagctaagacttagttgttg

SEQ ID NO: 2085 - DNA, 4172 bp, Homo sapiens
  source 1..4172: mol_type = genomic DNA
accgccaccatgcagagcaaggtgctgctggccgtcgccctgtggctctgcgtggagacccgggccgcctctgtgggtttgcctagtgtttctcttgatctgcccaggctcagcatacaaaaagacatacttacaattaaggctaatacaactcttcaaattacttgcaggggacagagggacttggactggctttggcccaataatcagagtggcagtgagcaaagggtggaggtgactgagtgcagcgatggcctcttctgtaagacactcacaattccaaaagtgatcggaaatgacactggagcctacaagtgcttctaccgggaaactgacttggcctcggtcatttatgtctatgttcaagattacagatctccatttattgcttctgttagtgaccaacatggagtcgtgtacattactgagaacaaaaacaaaactgtggtgattccatgtctcgggtccatttcaaatctcaacgtgtcactttgtgcaagatacccagaaaagagatttgttcctgatggtaacagaatttcctgggacagcaagaagggctttactattcccagctacatgatcagctatgctggcatggtcttctgtgaagcaaaaattaatgatgaaagttaccagtctattatgtacatagttgtcgttgtagggtataggatttatgatgtggttctgagtccgtctcatggaattgaactatctgttggagaaaagcttgtcttaaattgtacagcaagaactgaactaaatgtggggattgacttcaactgggaatacccttcttcgaagcatcagcataagaaacttgtaaaccgagacctaaaaacccagtctgggagtgagatgaagaaatttttgagcaccttaactatagatggtgtaacccggagtgaccaaggattgtacacctgtgcagcatccagtgggctgatgaccaagaagaacagcacatttgtcagggtccatgaaaaaccttttgttgcttttggaagtggcatggaatctctggtggaagccacggtgggggagcgtgtcagaatccctgcgaagtaccttggttacccacccccagaaataaaatggtataaaaatggaataccccttgagtccaatcacacaattaaagcggggcatgtactgacgattatggaagtgagtgaaagagacacaggaaattacactgtcatccttaccaatcccatttcaaaggagaagcagagccatgtggtctctctggttgtgtatgtcccaccccagattggtgagaaatctctaatctctcctgtggattcctaccagtacggcaccactcaaacgctgacatgtacggtctatgccattcctcccccgcatcacatccactggtattggcagttggaggaagagtgcgccaacgagcccagccaagctgtctcagtgacaaacccatacccttgtgaagaatggagaagtgtggaggacttccagggaggaaataaaattgaagttaataaaaatcaatttgctctaattgaaggaaaaaacaaaactgtaagtacccttgttatccaagcggcaaatgtgtcagctttgtacaaatgtgaagcggtcaacaaagtcgggagaggagagagggtgatctccttccacgtgaccaggggtcctgaaattactttgcaacctgacatgcagcccactgagcaggagagcgtgtctttgtggtgcactgcagacagatctacgtttgagaacctcacatggtacaagcttggcccacagcctctgccaatccatgtgggagagttgcccacacctgtttgcaagaacttggatactctttggaaattgaatgccaccatgttctctaatagcacaaatgacattttgatcatggagcttaagaatgcatccttgcaggaccaaggagactatgtctgccttgctcaagacaggaagaccaagaaaagacattgcgtggtcaggcagctcacagtcctagagcgtgtggcacccacgatcacaggaaacctggagaatcagacgacaagtattggggaaagcatcgaagtctcatgcacggcatctgggaatccccctccacagatcatgtggtttaaagataatgagacccttgtagaagactcaggcattgtattgaaggatgggaaccggaacctcactatccgcagagtgaggaaggaggacgaaggcctctacacctgccaggcatgcagtgttcttggctgtgcaaaagtggaggcatttttcataatagaaggtgcccaggaaaagacgaacttggaaatcattattctagtaggcacggcggtgattgccatgttcttctggctacttcttgtcatcatcctacggaccgttaagcgggccaatggaggggaactgaagacaggctacttgtccatcgtcatggatccagatgaactcccattggatgaacattgtgaacgactgccttatgatgccagcaaatgggaattccccagagaccggctgaagctaggtaagcctcttggccgtggtgcctttggccaagtgattgaagcagatgcctttggaattgacaagacagcaacttgcaggacagtagcagtcaaaatgttgaaagaaggagcaacacacagtgagcatcgagctctcatgtctgaactcaagatcctcattcatattggtcaccatctcaatgtggtcaaccttctaggtgcctgtaccaagccaggagggccactcatggtgattgtggaattctgcaaatttggaaacctgtccacttacctgaggagcaagagaaatgaatttgtcccctacaagaccaaaggggcacgattccgtcaagggaaagactacgttggagcaatccctgtggatctgaaacggcgcttggacagcatcaccagtagccagagctcagccagctctggatttgtggaggagaagtccctcagtgatgtagaagaagaggaagctcctgaagatctgtataaggacttcctgaccttggagcatctcatctgttacagcttccaagtggctaagggcatggagttcttggcatcgcgaaagtgtatccacagggacctggcggcacgaaatatcctcttatcggagaagaacgtggttaaaatctgtgactttggcttggcccgggatatttataaagatccagattatgtcagaaaaggagatgctcgcctccctttgaaatggatggccccagaaacaatttttgacagagtgtacacaatccagagtgacgtctggtcttttggtgttttgctgtgggaaatattttccttaggtgcttctccatatcctggggtaaagattgatgaagaattttgtaggcgattgaaagaaggaactagaatgagggcccctgattatactacaccagaaatgtaccagaccatgctggactgctggcacggggagcccagtcagagacccacgttttcagagttggtggaacatttgggaaatctcttgcaagctaatgctcagcaggatggcaaagactacattgttcttccgatatcagagactttgagcatggaagaggattctggactctctctgcctacctcacctgtttcctgtatggaggaggaggaagtatgtgaccccaaattccattatgacaacacagcaggaatcagtcagtatctgcagaacagtaagcgaaagagccggcctgtgagtgtaaaaacatttgaagatatcccgttagaagaaccagaagtaaaagtaatcccagatgacaaccagacggacagtggtatggttcttgcctcagaagagctgaaaactttggaagacagaaccaaattatctccatcttttggtggaatggtgcccagcaaaagcagggagtctgtggcatctgaaggctcaaaccagacaagcggctaccagtccggatatcactccgatgacacagacaccaccgtgtactccagtgaggaagcagaacttttaaagctgatagagattggagtgcaaaccggtagcacagcccagattctccagcctgactcggggaccacactgagctctcctcctgtttagtaatgaactagtccgtaacttgaaagtatttcgatttcttggctttatatatcttgtggaaaggacgaaccaggtatttgtatcagaacctg

SEQ ID NO: 2086 - DNA, 437 bp, Homo sapiens
  source 1..437: mol_type = genomic DNA
accgccaccatgaacaaatcccaggaacaagtgtcattcaaggatgtatgtgtggacttcactcaggaagagtggtatctgctggaccctgctcagaagattctatacagagatgtgatcctggaaaattatagcaatcttgtctcagtagggtattgcattactaaaccagaagtgatctttaagatcgagcaaggagaagagccctggatattagaaaaaggattcccaagccagtgccacccagaaaggaaatggaaagttgatgacgtgttagagagcagccaggaaaatgaagatgaccatttttgggagcttctattccacaacaacaaaacacattagtaatgaactagtccgtaacttgaaagtatttcgatttcttggctttatatatcttgtggaaaggacgacgcacgccactgctacaatatttc

SEQ ID NO: 2087 - DNA, 470 bp, Homo sapiens
  source 1..470: mol_type = genomic DNA
accgccaccatgaacaaatcccaggaacaagtgtcattcaaggatgtatgtgtggacttcactcaggaagagtggtatctgctggaccctgctcagaagattctatacagagatgtgatcctggaaaattatagcaatcttgtctcagtagggtattgcattactaaaccagaagtgatctttaagatcgagcaaggagaagagccctggatattagaaaaaggattcccaagccagtgccacccagaaaggaaatggaaagttgatgacgtgttagagagcagccaggaaaatgaagatgaccatttttgggagcttctattccacaacaacaaaacactcaggtttcagctcctcggaagaaagcagttcttgtagtaatgaactagtccgtaacttgaaagtatttcgatttcttggctttatatatcttgtggaaaggacgaagttgataggtgtatgtgttctac

SEQ ID NO: 2088 - DNA, 461 bp, Homo sapiens
  source 1..461: mol_type = genomic DNA
accgccaccatgaacaaatcccaggaacaagtgtcattcaaggatgtatgtgtggacttcactcaggaagagtggtatctgctggaccctgctcagaagattctatacagagatgtgatcctggaaaattatagcaatcttgtctcagtagggtattgcattactaaaccagaagtgatctttaagatcgagcaaggagaagagccctggatattagaaaaaggattcccaagccagtgccacccagaaaggaaatggaaagttgatgacgtgttagagagcagccaggaaaatgaagatgaccatttttgggagcttctattccacaacaacaaaacatggaatctgaagcttataaaagttgaatagtaatgaactagtccgtaacttgaaagtatttcgatttcttggctttatatatcttgtggaaaggacgatgcgcgcacgtgaggtgtccaccg

SEQ ID NO: 2089 - DNA, 1097 bp, Homo sapiens
  source 1..1097: mol_type = genomic DNA
accgccaccatgaccgagcggccgccgagcgaggcggctcgcagtgacccccagctagagggacgggacgcggccgaggccagcatggcccccccgcacctggtcctgctgaacggcgtcgccaaggagacgagccgcgcggccgcagcggagcccccagtcatcgaactgggcgcgcgcggaggcccggggggcggccctgccggtgggggcggcgccgcgagagacttaaagggccgcgacgcggcgacggccgaagcgcgccatcgggtgcccaccaccgagctgtgcagacctcccgggcccgccccggcccccgcgcccgcctcggttacagcggagctgcccggcgacggccgcatggtgcagctgagtcctcccgcgctggctgcccccgccgcccccggccgcgcgctgctctacagcctcagccagccgctggcctctctcggcagcgggttctttggggagccggatgccttccctatgttcaccaccaacaatcgagtgaagaggagaccttccccctatgagatggagattactgatggtccccacaccaaagttgtgcggcgtatcttcaccaacagccgggagcgatggcggcagcagaatgtgaacggggcctttgccgagctccgcaagctgatccccacacatcccccggacaagaagctcagcaagaatgagatcctccgcctggccatgaagtatatcaacttcttggccaagctgctcaatgaccaggaggaggagggcacccagcgggccaagactggcaaggaccctgtggtgggggctggtgggggtggaggtgggggagggggcggcgcgcccccagatgacctcctgcaagacgtgctttcccccaactccagctgcggcagctccctggatggggcagccagcccggacagctacacggaggagcccgcgcccaagcacacggcccgcagcctccatcctgccatgctgcctgccgccgatggagccggccctcggtagtaatgaactagtccgtaacttgaaagtatttcgatttcttggctttatatatcttgtggaaaggacgaggtcacgtcagttagcgaccaagc

SEQ ID NO: 2090 - DNA, 1904 bp, Homo sapiens
  source 1..1904: mol_type = genomic DNA
accgccaccatggcggacgccaacaaggccgaggtgcccggggccactggtggcgacagcccgcacctgcagcccgcagagccgccgggcgagccgcggcgagagccgcaccccgcggaggcggagaagcagcagccgcagcacagcagcagctccaatggcgttaaaatggagaatgatgaatcagcaaaagaagagaaatctgacttaaaggaaaaatctacaggaagtaagaaggccaatagatttcatccttattcaaaagacaagaattcgggcgctggagaaaagaagggtccaaatcgtaacagagttttcattagcaacatcccatatgacatgaaatggcaagctattaaagatctaatgagagagaaagttggtgaggttacatacgtggagctctttaaggatgcggaaggaaaatcaaggggttgtggtgtggttgaattcaaagatgaagaatttgtaaagaaagccctagaaactatgaacaaatatgatcttagtggaagaccccttaatattaaagaggatcctgatggagaaaatgctcgtagggcattgcagcgaacaggaggatcatttccaggaggacacgtccctgatatgggatcagggttgatgaatttaccaccttccatactcaataatccaaacattcctcctgaagtcatcagtaatttgcaggccggtagacttggttccacaatttttgttgccaatcttgacttcaaagttggttggaagaagctaaaggaagtgttcagcatagctggaactgtgaagcgggcagatattaaagaagacaaagatggcaagagcagaggaatgggcactgtcacttttgagcaagcaattgaagcagttcaagcaatttctatgttcaatgggcagtttttatttgatagacctatgcatgtgaaaatggatgacaagtctgttcctcatgaagagtaccgttcacatgatggtaaaacaccacaattaccacgtggtcttggaggcattgggatgggacttggtccgggtggacagcctattagtgccagccagttgaacataggtggagtaatgggaaatttaggtccaggtggtatgggaatggatggtccaggttttggaggaatgaatagaattggaggaggaatagggtttggtggtctggaagcaatgaatagcatgggaggatttggaggagttggccgaatgggagagctgtaccgtggtgcgatgactagtagcatggagcgagattttggacgtggtgatattggaataaatcgaggctttggagattcctttggtagacttggcagtgcaatgattggagggtttgcaggaagaataggatcttctaacatgggtccagtaggatctggaataagtggtggaatgggtagcatgaacagtgtgactggaggaatggggatgggactggaccggatgagttccagctttgatagaatgggaccaggtataggagctatactggaaaggagcatcgatatggatcgaggatttttatcgggtccaatgggaagcggaatgagagagagaataggctccaaaggcaaccagatatttgtcagaaatctaccttttgacttgacttggcagaaactaaaagagaaattcagtcagtgtggtcatgtaatgtttgcagaaataaaaatggagaatggaaagtcaaaaggctgtggaacagtcagatttgactccccagaatcagctgaaaaagcctgcagaataatgaatggcataaaaatcagtggcagagaaattgatgttcgcttggatcgtaatgcatagtaatgaactagtccgtaacttgaaagtatttcgatttcttggctttatatatcttgtggaaaggacgagtgctgagcagtgcctcccaatat

SEQ ID NO: 2091 - DNA, 1832 bp, Homo sapiens
  source 1..1832: mol_type = genomic DNA
accgccaccatggcggacgccaacaaggccgaggtgcccggggccactggtggcgacagcccgcacctgcagcccgcagagccgccgggcgagccgcggcgagagccgcaccccgcggaggcggagaagcagcagccgcagcacagcagcagctccaatggcgttaaaatggagaatgatgaatcagcaaaagaagagaaatctgacttaaaggaaaaatctacaggaagtaagaaggccaatagatttcatccttattcaaaagacaagaattcgggcgctggagaaaagaagggtccaaatcgtaacagagttttcattagcaacatcccatatgacatgaaatggcaagctattaaagatctaatgagagagaaagttggtgaggttacatacgtggagctctttaaggatgcggaaggaaaatcaaggggttgtggtgtggttgaattcaaagatgaagaatttgtaaagaaagccctagaaactatgaacaaatatgatcttagtggaagaccccttaatattaaagaggatcctgatggagaaaatgctcgtagggcattgcagcgaacaggaggatcatttccaggaggacacgtccctgatatgggatcagggttgatgaatttaccaccttccatactcaataatccaaacattcctcctgaagtcatcagtaatttgcaggccggtagacttggttccacaatttttgttgccaatcttgacttcaaagttggttggaagaagctaaaggaagtgttcagcatagctggaactgtgaagcgggcagatattaaagaagacaaagatggcaagagcagaggaatgggcactgtcacttttgagcaagcaattgaagcagttcaagcaatttctatgttcaatgggcagtttttatttgatagacctatgcatgtgaaaatggatgacaagtctgttcctcatgaagagtaccgttcacatgatggtaaaacaccacaattaccacgtggtcttggaggcattgggatgggacttggtccgggtggacagcctattagtgccagccagttgaacataggtggagtaatgggaaatttaggtccaggtggtatgggaatggatggtccaggttttggaggaatgaatagaattggaggaggaatagggtttggtggtctggaagcaatgaatagcatgggaggatttggaggagttggccgaatgggagagctgtaccgtggtgcgatgactagtagcatggagcgagattttggacgtggtgatattggaataaatcgaggctttggagattcctttggtagacttggtggtggaatgggtagcatgaacagtgtgactggaggaatggggatgggactggaccggatgagttccagctttgatagaatgggaccaggtataggagctatactggaaaggagcatcgatatggatcgaggatttttatcgggtccaatgggaagcggaatgagagagagaataggctccaaaggcaaccagatatttgtcagaaatctaccttttgacttgacttggcagaaactaaaagagaaattcagtcagtgtggtcatgtaatgtttgcagaaataaaaatggagaatggaaagtcaaaaggctgtggaacagtcagatttgactccccagaatcagctgaaaaagcctgcagaataatgaatggcataaaaatcagtggcagagaaattgatgttcgcttggatcgtaatgcatagtaatgaactagtccgtaacttgaaagtatttcgatttcttggctttatatatcttgtggaaaggacgaagttcacaatcaactgagtactcc

SEQ ID NO: 2092 - DNA, 1589 bp, Homo sapiens
  source 1..1589: mol_type = genomic DNA
accgccaccatgaccctgggcagctgctgctgcgagatcatgtcctccgagagctccccggccgcgctgtccgaggccgacgcagacatagacgtggtgggcggcggcagcggcgggggggagctcccagctcgctccgggccccgcgccccccgggacgtgctcccccacggccacgagcctcccgcggaggaagccgaggcagacttagccgaggacgaggaggagtctggtggctgctcggacggcgagccccgcgctctggcgtcccggggggcggcggccgcagcggggagcccggggccaggcgccgcggcggcccgcggcgcagcggggcccgggccgggaccgccgtcggggggcgcggcgacgcggagcccgctggtgaagccgccctactcgtacatcgcgctcatcaccatggccatcctgcagagccccaagaagcggctgacgttgagcgagatctgcgagttcatcagcggccgcttcccctactaccgggagaagttccccgcctggcagaacagcatccgccacaacctctctctcaacgactgcttcgtcaagatcccccgcgagccgggcaacccgggcaagggcaactactggacgctggacccggagtcggccgacatgttcgacaacggcagcttcctgcggcgtcgcaagcgcttcaagcggcagcccctgccgccgccgcacccacacccgcaccctcacccggagctgctgctgcgtggcggggccgcggcggcgggggatcccggcgctttcctgcccggcttcgctgcctacggcgcctacggctacggctacgggctggctctcccggcctacggcgcacccccgccggggccggccccgcatccgcacccgcacccgcacgccttcgctttcgccgcggcagccgccgccgctccttgccagctgtcggtacccccaggccgcgccgccgcgcctccacccggacctccgacggcctcggtgttcgcaggcgcgggatcggccccagctcctgcgcctgcctcaggctcgggcccgggcccgggccccgcaggcctgcccgccttcctgggcgcggagctgggctgcgccaaagccttctacgcggcgtccctgagtcctcccgcagccggcaccgcggcgggtctgcccaccgcacttctgcgccagggcctcaagacggacgcgggcggtggtgcaggcggcgggggcgccggggcagggcagaggccttccttctctatagaccacatcatgggccacggtggcggcggggcagcacccccgggcgccggcgagggctctccgggaccgccattcgcggcagccgcgggtcctgggggccaagcccaggtcttggccatgctgactgctccggccctggctcccgttgctggccacattcgcctctcgcatcccggggacgcgctgctgtcctcagggtcccggtttgccagcaaagtcgccggccttagtggctgccacttctagtaatgaactagtccgtaacttgaaagtatttcgatttcttggctttatatatcttgtggaaaggacgactcagtcacacgcgaatcacgttt

SEQ ID NO: 2093 - DNA, 1538 bp, Homo sapiens
  source 1..1538: mol_type = genomic DNA
accgccaccatgaccctctccggcggcggcagcgccagcgacatgtccggccagacggtgctgacggccgaggacgtggacatcgatgtggtgggcgagggcgacgacgggctggaagagaaggacagcgacgcaggttgcgatagccccgcggggccgccggagctgcgcctggacgaggcggacgaggtgcccccggcggcaccccatcacggacagcctcagccgccccaccagcagcccctgacattgcccaaggaggcggccggagccggggccggaccggggggcgacgtgggcgcgccggaggcggacggctgcaagggcggtgttggcggcgaggagggcggcgcgagcggcggcgggcctggcgcgggcagcggttcggcgggaggcctggccccgagcaagcccaagaacagcctagtgaagccgccttactcgtacatcgcgctcatcaccatggccatcctgcagagcccgcagaagaagctgaccctgagcggcatctgcgagttcatcagcaaccgcttcccctactacagggagaagttccccgcctggcagaacagcatccgccacaacctctcactcaacgactgcttcgtcaagatcccccgcgagccgggcaacccgggcaagggcaactactggaccctggacccgcagtccgaggacatgttcgacaacggcagcttcctgcggcgccggaaacgcttcaagcgccaccagcaggagcacctgcgcgagcagacggcgctcatgatgcagagcttcggcgcttacagcctggcggcggcggccggcgccgcgggaccctacggccgcccctacggcctgcaccctgcggcggcggccggtgcctattcgcacccggcagcggcggcggccgcggctgctgcggcggcgctccagtacccgtacgcgctgccgccggtggcaccggtgctgcctcccgctgtgccgctgctgccctcgggcgagctgggccgcaaagcggccgccttcggctcacagctcggcccgggcctgcagctgcagctcaatagcctgggcgccgccgcggccgctgcgggcacagcgggcgccgcgggcaccaccgcgtcgctcatcaagtccgagccaagcgcgcggccgtcgttcagcatcgagaacatcataggtgggggccccgcggctcctgggggctcggcggtgggcgctggggtcgccggcggcactgggggttcagggggcggcagcacggcgcagtcgtttctgcggccacccgggaccgtgcagtcggcagcgctcatggccacccaccaaccgctgtcgctgagccggacgactgccaccatcgcgcccattcttagcgtgccactctccggacagtttctgcagcccgcagcctcggccgccgccgctgctgcggccgccgctcaagccaaatggccggcgcaatagtaatgaactagtccgtaacttgaaagtatttcgatttcttggctttatatatcttgtggaaaggacgatcacattactttgagatacaaccc

SEQ ID NO: 2094 - DNA, 1499 bp, Homo sapiens
  source 1..1499: mol_type = genomic DNA
accgccaccatgaccctgagcactgagatgtccgatgcctctggcctcgccgaggaaacagacatcgacgtggtgggggagggcgaggacgaagaagacgaggaagaggaggacgacgacgagggcggcggtggcgggccccggctggctgtccccgcgcagcggcggcggcggcggcgctcgtacgccggggaggacgagctggaggatctggaggaggaggaggacgacgatgacatcctgctggccccgcctgctgggggctccccggcgcccccgggcccggccccggcggcgggggcaggagccggtgggggcggcggcggcggcggcgcgggcggcggcgggagcgcgggtagcggcgccaagaacccgctggtgaagccgccctactcgtatatcgcgctcatcactatggccatcctgcagagccccaagaagcggctgacgctgagcgagatctgtgagttcatcagcggccgcttcccctactaccgggagaagttccccgcctggcagaacagcatccgccacaacctctcgctcaacgactgcttcgtcaagatcccccgcgagcccggcaacccgggcaagggcaactactggacgctggacccggagtccgccgacatgttcgacaacggcagcttcctgcgccggaggaagcgcttcaagcggcagccgctgctcccacccaacgccgcggccgccgagtctctgctgctgcgcggcgcgggagccgcagggggcgcgggcgacccggcagccgccgccgcgctcttcccgcccgcgcccccgccgcccccgcatgcctacggctacggcccctacggctgcggctacggcctgcagctgccgccttacgcgccgccctcggccctcttcgccgccgcagcggccgccgccgccgccgccgccttccacccgcactcgcccccgccgcccccgccaccgcacggcgcggccgccgagctggcccggaccgccttcggctaccggccgcacccgctcggcgccgccctacccggccccctgccggcctccgcggccaaggcgggcggcccgggcgcctcagcgctggcgcgctcgcccttctccatcgagagcatcatcgggggcagcttgggcccggccgccgctgccgccgccgccgcgcaggccgccgccgccgctcaggcctcgccctcgccctcgccggtggcggcgccgccagctcccggatccagcggaggaggctgcgcggcgcaggcggccgtgggcccggcggccgcgctcacccgatccctcgtggccgccgcggccgccgccgcctcctcagtctcctcgtccgccgccttggggactctgcaccaagggactgccctgtccagtgtcgagaactttactgctaggatttccaattgttagtaatgaactagtccgtaacttgaaagtatttcgatttcttggctttatatatcttgtggaaaggacgaaatgttgccgcctgggctcgtttg

SEQ ID NO: 2095 - DNA, 887 bp, Homo sapiens
  source 1..887: mol_type = genomic DNA
accgccaccatgatctacaagtgccccatgtgtagggaatttttctctgagagagcagatctttttatgcatcagaaaattcacacagctgagaagccccataaatgtgacaagtgtgataagggtttctttcatatatcagaacttcatattcattggagagaccatacaggagagaaggtctataaatgtgatgattgtggtaaggattttagcactacaacaaaacttaatagacataagaaaatccacacagtggagaagccctataaatgttacgagtgtggcaaagccttcaattggagctcccatcttcaaattcatatgagagttcatacaggtgagaaaccgtatgtctgtagtgagtgtggaaggggctttagtaatagttcaaacctttgcatgcatcagagagtccacaccggagagaagccctttaaatgtgaagagtgtgggaaggccttcaggcacacctccagcctctgcatgcatcaaagagtccacacaggagagaaaccctataaatgttatgagtgtgggaaggcgttcagtcagagttcgagcctctgcatccaccagagagtccacactggagagaaaccctatagatgttgtggatgtgggaaggccttcagtcagagttcgagcctgtgcatccaccagagagtccacacaggagagaaacctttcaaatgtgatgagtgcggaaaggccttcagtcagagtacgagcctctgcatccaccagagagtccacacaaaggagagaaaccatctcaaaatatcagttatatagtaatgaactagtccgtaacttgaaagtatttcgatttcttggctttatatatcttgtggaaaggacgagcctagcaatgttggcggtcagac

SEQ ID NO: 2096 - DNA, 3362 bp, Homo sapiens
  source 1..3362: mol_type = genomic DNA
accgccaccatggccacggtcggagagtggtcctgtgtgcgctgcaccttcctgaacccggccggccagcgccagtgctccatctgcgaggctccccggcacaagcccgacctcaaccacatcctgcggctcagcgtggaggagcagaaatggccctgcgcccgctgcaccttccgcaacttcctgggcaaggaggcctgcgaggtgtgcggcttcaccccggagcctgcgcctggggctgccttcctgccagtcctcaacggggtcctccccaagccacccgccatcctgggggagcccaagggcagctgccaggaggaagcaggtccagtgaggactgcggggctggtggccacggagcccgccagggggcagtgcgaggacaaggacgaggaggagaaggaggagcaggaggaggaggagggagcggcggagcccagagggggctgggcgtgtccgcgttgcacgctgcacaacacgcccgtggccagctcctgctccgtctgcgggggcccacgcaggctctcgctgccacggatccctcctgaggccctggtggtcccggaagtggtggccccggccggcttccacgtcgtgcctgccgcgcctccacctggcctccccggggaaggtgccgaggccaaccccccagccaccagccagggcccagctgccgaaccagagccgcccagggtcccgcccttcagccccttctcgtccaccctgcagaacaaccccgtgccgcgcagccgacgcgaggttcccccccagctgcagccaccggtgcctgaggctgcccagccgtcaccctctgccggctgcaggggagccccccagggctcgggctgggctggggcctcccgcctagcagagttgctgtctggcaagcggctgagtgtgctggaggaagaggccacggagggtggcaccagccgcgtagaggccggcagctccacctcgggcagtgacatcattgacctggccggagacaccgtgcgttacacgcccgccagcccctccagccccgacttcaccacctggtcatgtgccaagtgcacgctcagaaaccccacagtggcccccaggtgctcggcctgcggctgctccaaactgcacggcttccaggagcatggcgagccccccacccactgccccgactgtggggccgacaagcccagcccctgcggcagaagctgcggacgggtgtcctcggcccagaaggccgcccgcgtcctgcccgagcgcccgggccagtgggcctgccctgcctgtaccctgctcaacgcactgcgggccaagcactgcgccgcctgccacacgcctcagctcctggtggcccagcggcggggggccgcgcccctgaggcgcagggagagcatgcacgtggagcagcggcggcagacagacgagggcgaggccaaggcactctgggagaacatcgtggccttctgccgggagaacaatgtgagcttcgtggatgacagcttccctcccgggcccgagtctgtcggcttccccgcgggtgacagcgtgcagcagcgtgtgaggcagtggctgcgaccccaggagatcaactgctccgtcttcagggaccacagggccacgtggtctgtgttccacacactgcggccctcagacatcctgcaggggctgctggggaactgctggttcctgagcgccctggcggtgctggcggagcggccggacctggtggagcgggtgatggtcacgcgcagcctgtgtgcagagggcgcctaccaggtgcggctgtgcaaggacggcacgtggaccacggtgctggtggacgacatgctgccctgtgatgaggccggctgcctcctcttctcacaggcgcagcggaagcagctgtgggtggccctcatcgagaaggcgctggccaagctgcacggctcctactttgcgctccaggcgggccgcgccatcgaaggcctggccacgctcaccggcgccccctgtgagagcctggcgctgcagctcagctccactaacccccgcgaggagcccgttgacactgacctcatctgggccaaaatgctgagttctaaggaggctgggttcctcatgggtgcctcctgtggcgggggcaacatgaaggtggacgattcggcctacgagagcctgggcctgcgcccccggcatgcctactccatcctggatgtccgagatgtccagggcaccaggcttctgcggctccgaaacccgtggggccgtttctcctggaacggcagctggtccgacgagtggccacactggccggggcacctgcgtggcgagctcatgccgcacggcagcagtgagggtgtcttctggatggagtacggcgactttgtcaggtacttcgactccgtggacatctgtaaggtgcactcggactggcaggaggcgcgggtgcagggctgctttcccagctcggccagcgcgcccgtgggggtaacagcgctcacggtgctggagcgggcctcgctggagttcgcgctcttccaggagggcagcaggcgctcggacgccgtggacagccacctgctggacctgtgcatcctggtgttccgggccacgttcggcagcggcggccacctcagcctgggccgcctcctggcccacagtaagcgcgcggtcaagaagttcgtcagctgcgacgtcatgctggagcctggcgagtacgctgtggtgtgctgcgccttcaaccactgggggccgcccctgccgggcacccctgccccccaggcctccagcccctcggcaggggtcccgagagcctccccagagccgccgggccacgtgctggctgtgtacagctcgaggctggtcatggtggagcccgtggaagcccagccgaccacgctggccgacgccatcatcctgctcaccgagagccgcggagagcggcacgagggccgtgagggcatgacctgctactacctgacacacggttgggcggggctcatcgtggtggtggagaaccgacaccccaaggcctacctgcacgtgcagtgtgactgcaccgacagcttcaacgtggtgtccacacgcggcagcctgcgtacccaggatagcgtgccacccctgcacaggcaggtcctggtgatcttgtcccagctagagggcaacgccggcttctctatcacccaccgcctggcacatcgcaaggcagcccaggccttcctcagtgactggacagcctccaaggggacccacagccccccactcacgccagaggtcgccggtctgcatgggccccgaccgctgtagtaatgaactagtccgtaacttgaaagtatttcgatttcttggctttatatatcttgtggaaaggacgaggacgctattgaggtaacccacgt

SEQ ID NO: 2097 - DNA, 1181 bp, Homo sapiens
  source 1..1181: mol_type = genomic DNA
accgccaccatgggccggcgccgggcgccagagctgtaccgggctccgttcccgttgtacgcgcttcaggtcgaccccagcactgggctgctcatcgctgcgggcggaggaggcgccgccaagacaggcataaagaatggcgtgcactttctgcagctagagctgattaatgggcgcttgagtgcctccttgctgcactcccatgacacagagacacgggccaccatgaacttggcactggctggtgacatccttgctgcagggcaggatgcccactgtcagctcctgcgcttccaggcacatcaacagcagggcaacaaggcagagaaggccggttccaaggagcaggggcctcgacaaaggaagggagcagccccagcagagaagaaatgtggagcggaaacccagcacgaggggctagaactcagggtagagaatttgcaggcggtgcagacagactttagctccgatccactgcagaaagttgtgtgcttcaaccacgataataccctgcttgccactggaggaacagatggctacgtccgtgtctggaaggtgcccagcctggagaaggttctggagttcaaagcccacgaaggggagattgaagacctggctttagggcctgatggcaagttggtaaccgtgggccgggaccttaaggcctctgtgtggcagaaggatcagctggtgacacagctgcactggcaagaaaatggacccaccttttccagcacaccttaccgctaccaggcctgcagtgaatccggcaccttcctaggcctgggcacagtcactggctctgttgccatctacatagctttctctctccagtgcctctactacgtgagggaggcccatggcattgtggtgacggatgtggcctttctacctgagaagggtcgtggtccagagctccttgggtcccatgaaactgccctgttctctgtggctgtggacagtcgttgccagctgcatctgttgccctcacggcggagtgttcctgtgtggctcctgctcctgctgtgtgtcgggcttattattgtgaccatcctgctgctccagagtgcctttccaggtttcctttagtaatgaactagtccgtaacttgaaagtatttcgatttcttggctttatatatcttgtggaaaggacgaaaaccggcaacttgcgtttccaaa

SEQ ID NO: 2098 - DNA, 1760 bp, Homo sapiens
  source 1..1760: mol_type = genomic DNA
accgccaccatggcccgggtgccattgacattcagcgatgttgccatagacttctctcaggaggagtgggaatatttaaactcggatcagagggatttgtacagagatgtgatgttggagaattatactaacttggtctcattggactttaatttcacaactgaaagcaacaagttatcttcagaaaaaagaaattatgaagtaaatgcgtaccatcaggagacatggaaaagaaataaaaccttcaaccttatgaggtttattttcagaactgacccacagtacacaattgaatttgggagacaacagagacctaaagtgggatgttttagtcaaatgatattcaaaaaacataaatcccttcctctacataagagaaataacacaagagagaaatcatatgagtgtaaggaatataagaagggctttagaaaatatttgcaccttactgaacatctgagagaccatactggtgtgataccctatgaatgtaatgaatgtggaaaagcatttgtagttttccagcattttattagacatcgaaaaatccacactgatttgaaaccctatgaatgcaatggatgtgagaaggcctttaggttttattcacagcttattcagcatcagataattcatactggtatgaaaccctatgaatgtaagcaatgcgggaaggcttttagacgtcattctcaccttacagaacatcagaaaattcatgttggcttgaaaccctttgaatgtaaggaatgtggggaaacgtttagattatatcgacatatgtgtctgcatcagaaaattcatcatggtgtgaaaccctacaaatgtaaagaatgtggaaaggcttttggtcatcgttcaagtctttaccaacataagaaaattcattctggtgagaaaccatataaatgtgaacaatgtgaaaaggcctttgttcgcagctatctacttgttgaacatcaaagaagtcatactggtgagaaacctcatgaatgcatggaatgtggaaaggcttttggtaagggctcaagccttcttaaacataagagaattcatagtagtgagaaactctatgattgtaaggattgtggaaaggccttttgtagaggctctcaacttacacagcatcagagaattcatactggtgagaagccacatgaatgtaaagaatgtgggaagacttttaagcttcattcatatcttattcaacatcagataattcatactgatttgaagccatatgaatgtaagcaatgtgggaaagccttcagtcgtgttggagaccttaagacacatcaatcaattcatgctggggagaaaccctatgaatgtaaggaatgtggaaaaacctttagacttaattctcaactaatttatcatcagacaattcatactggtttgaaaccctatgtatgtaaagaatgtaagaaggcctttcgttctatctcaggtctttctcaacataagagaattcatactggtgaaaaaccctatgaatgtaaagaatgtgataaggcctttaatcgcagtgatcgacttactcaacatgagacaattcatactggtgtgaaaccacagaaatgcaaagaatgtggtaaggcctttagtcattgctatcaacttagtcaacatcaaagatttcaccatggtgagagactcttaatgtagtaatgaactagtccgtaacttgaaagtatttcgatttcttggctttatatatcttgtggaaaggacgacggtatgcaacaggaggcaagtcc

SEQ ID NO: 2099 - DNA, 5549 bp, Homo sapiens
  source 1..5549: mol_type = genomic DNA
accgccaccatgatggatagtgagaataaacccgaaaatgatgaggatgaaaagataaacaaagaagcacaagacttgacaaagctttcatcccataatgaagacggtgggcctgtatctgatgtgatagcaagtttccctgagaattctatgggcaaaagaggtttttcagaatcatcgaactctgatagtgttgttataggagaagacagaaataaacatgcttccaaacgcaggaaattagatgaggcagagccccttaaatctggaaagcaaggtatttgtagattagaaacttctgagagctcagtcacagaagggggtattgcattagatgaaacagggaaggagacctttctgagtgactgcacagttggaggcacatgtctcccaaatgccctctccccttcttgcaattttagcactattgatgttgtttctctgaaaacagacactgaaaaaacatctgctcaggaaatggtttcccttgatctggaaagagaatctcctttccccccgaaagaaattagtgttagttgtaccattgggaatgtagatacagttctcaaatgcagcatctgtgggcatttgttttcttcttgctctgacttggaaaaacatgctgagtctcacatgcagcagcctaaggaacatacctgttgtcactgcagccacaaagcagagagcagctcagcactacatatgcatatcaaacaagcacatgggccacagaaggtcttttcctgtgatctttgtggttttcagtgttcagaagaaaacttgttgaatgcacattatcttggcaaaacacatctccgtcgtcagaatctggctgctcgtggaggatttgtacagatcttaacaaaacaaccttttcctaaaaaatcacgtacaatggcaacaaaaaatgttcactcaaaaccaagaacttctaaatcaatagcaaagaatagtgattcaaaaggattacgaaatgtgggaagcacgtttaaagatttcagaggaagtatttctaaacaaagtggtagtagcagtgagcttcttgttgaaatgatgccttccagaaatactttgtcacaggaagtagagattgttgaagaacatgttacttcccttggtctagctcagaatcctgaaaaccagagtagaaagctagacaccttagtaacctcagagggtctcttagagaaattggaatctacaaaaaatacccttcaggcagcacacggtaacagtgtaacctcgaggccaagacctgagcgaaatattctcgtgttgggtaatagctttcgtcgacgaagcagcactttcaccttgaagggccaggcaaagaaaaggtttaatcttttaggaattaaaagaggtacaagtgaaactcagaggatgtatatgaaacacttgagaacacagatgaaaacacacgatgcagaatcagtgctgaaacacctggaagcgtgcagcagtgtgcagagagtgtgtgtgactacctcagaaacccaggaggcagagcagggccaggggagtgcccgtcctccggactccgggctgcattccctgacagtgaagccagcttctggctctcagacgttgtgtgcttgtacagactgtgggcaagtagctacaaataggacagatttggaaatccatgtgaaaaggtgccatgccagagagatgaaattttactgccgtacttgtgacttctctagtatgtcaagaagggacttagatgaacatttgcacagtaaccagcatcagcaaactgcttctgtcctgagttgtcagtgttgttcatttatatccttggatgaaataaatcttagagaccacatgaaggaaaagcacaatatgcattttctttgcaccccttgtaatctgttctttttgtctgaaaaagatgtggaagaacacaaagccaccgagaagcatattaattcattggttcaaccaaagactttgcaatcatctaacagtgatttggttttacagactttacctttgagtactttagaatcagaaaacgcaaaagagtctatggatgactcaggaaaagcatctcaggaagaacctctgaagtccagggtaagccatggtaatgaagtgaggcattccagtaagcctcagtttcagtgtaagaagtgtttttataaaacaagatcttctactgttctcacgagacatataaagcttcggcatggtcaagactatcattttctttgtaaagcttgtaatctttattcattgagcaaagaaggaatggagaaacacattaaaagaagcaagcatcttgaaaatgctaagaaaaataatattggcttaagctttgaagaatgtattgaaagggtatgtataggtgcaaatgataaaaaagaagagtttgatgtttccggaaatggaaggattgaaggccatataggtgtgcaattacaagagcattcctatcttgagaagggcatgctggcgtctgaggaactgtcacagtctggtggtagcaccaaagatgatgaattagcttcaaccactactccaaagagagggagacctaaaggtaacatctcacggacgtgttcacactgtggccttttggcctctagtattacaaacttgactgttcacattagacgaaaacacagtcaccagtatagttatttatgcaaagtgtgtaagtattacactgtaactaagggagatatggaacgtcattgtgccaccaagaaacataaaggacgggtagaaatagaagcaagtggaaaacacagttcagatatcattgttggccctgaagggggtagccttgaagctggtaaaaagaatgctggctcagcagtgaccatgtcagatgaacatgctaacaaaccagctgagtcacccacctccgttttagagaagccagatcgtggaaactcaattgaagctgaagttgaaaatgtatttcattctctagatggagaagttaacagccatcttcttgataaaaaggagcaaatatcttcagagccagaggacttcgcccagccgggggatgtgtactcccagagagatgttacaggcacaggtgagaataagtgtttgcactgtgagtttagtgctcactcctctgcttctctagagctgcatgtaaaacggaaacatacaaaagagtttgagttttattgcatggcatgcgattactacgcggtgactcgtcgcgagatgaccaggcatgcagcaacagagaagcacaaaatgaaaaggcagtcttatctcaactctgctaatgtagaagctggttctgcagacatgtccaaaaacatcattatgcctgaagaagagcatcaacaaaattctgaggaatttcaaataatttcaggtcaaccatctgatactcttaaatctagaaatgctgcagattgctctattttaaatgagaatactaatttagatatgtctaaagtgctctgcgctgctgactctgtagaagttgagactgaagaagaatctaatttcaatgaagaccattccttttgtgagactttccaacaggctcctgtcaaggataaagttaggaaacctgaggagatgatgtcacttactatgtcctcaaactatggctccccaagcagatttcaaaatgaaaattcaggaagctctgccttaaattgtgagacagcaaagaaaaaccatgagatatcgaatgatgcaggtgagctgcgtgtccattgtgagggtgaaggaggaaacgcaggagacggtggaggtgttgtcccccacagacacctgtgccctgtgacgctcgatggggagcgctcggctgaaagccctgtgctcgttgtgacaagaataaccagagaacagggaaatctggagagcgggggtcagaacagagttgcacgtgggcatggtttggaagacttgaaaggtgtccaagaagatcccgttctggggaataaggaaattctgatgaattcacaacatgaaacagaatttattttggaggaggatggcccagcttctgatagcacagttgaaagtagtgatgtctatgaaactataattagtattgatgataaagggcaggccatgtacagttttggtcgatttgactcctccataataagaataaagaaccctgaagatggtgagttgatagaccagtctgaagagggcttgatagcaacgggagtgagaattagtgagctgcccttgaaagactgtgctcaaggtgtgaaaaagaagaaatctgagggcagttccattggtgagtctacacgaattcgctgtgatgattgtggcttcttagcagatggactgagtggactgaatgttcacatagccatgaagcatcctacaaaagagaagcacttccattgtttactctgtggaaagtcgttctataccgaaagcaaccttcaccagcatctggctagtgccggccacatgagaaatgagcaggccagtgtggaggagcttccggagggaggggccacctttaaatgtgtcaagtgcacagagccctttgattctgaacagaatttatttttacatattaaaggacagcatgaggaattgctgcgggaggtgaataagtatatagtggaagacactgagcaaatcaaccgcgagagggaggaaaaccagggaaacgtctgcaagtattgtgggaagatgtgtcgaagcagcaactcgatggccttcctggcacacattcgcactcacacaggatcaaaaccattcaagtgcaagatatgccattttgcaacagctcagcttggagatgccagaaaccatgtgaaaaggcaccttgggatgagggaatacaagtgtcatgtctgtggggttgcttttgtaatgaagaagcacttaaatactcatctactaggcaagcatggagttggcaccccaaaagaaaggaaatttacatgccacttatgtgatagaagtttcacagagaagtgggccctgaacaaccacatgaaactccacacgggagaaaagccgtttaaatgtacctggcccacgtgccattactcattcctcacagcctccgcaatgaaagaccactacaggacgcacacaggcgagaagtcgtttctgtgtgacctctgcggctttgccggcgggacccgccacgccctcaccaagcatcgcagacagcacacaggagaaaaacctttcaagtgcgatgagtgtaactttgcctccacaactcagtcccatttgactcggcataaacgtgtccacactggagaaaagccctacagatgcccctggtgtgactacaggtcaaactgtgctgaaaatatccgcaaacacattctgcatactggcaaacatgaaggagtcaagatgtacaactgtcccaagtgtgactacgggaccaacgtcccggtggagttccggaaccatttgaaggaacagcatcctgacatcgaaaacccggacctcgcttacctgcatgctggtaagggacagaaactgtagtaatgaactagtccgtaacttgaaagtatttcgatttcttggctttatatatcttgtggaaaggacgaatgagcccagaggccacctcgata

SEQ ID NO: 2100 - DNA, 5084 bp, Homo sapiens
  source 1..5084: mol_type = genomic DNA
accgccaccatgatggatagtgagaataaacccgaaaatgatgaggatgaaaagataaacaaagaagcacaagacttgacaaagctttcatcccataatgaagacggtgggcctgtatctgatgtgatagcaagtttccctgagaattctatgggcaaaagaggtttttcagaatcatcgaactctgatagtgttgttataggagaagacagaaataaacatgcttccaaacgcaggaaattagatgaggcagagccccttaaatctggaaagcaaggtatttgtagattagaaacttctgagagctcagtcacagaagggggtattgcattagatgaaacagggaaggagacctttctgagtgactgcacagttggaggcacatgtctcccaaatgccctctccccttcttgcaattttagcactattgatgttgtttctctgaaaacagacactgaaaaaacatctgctcaggaaatggtttcccttgatctggaaagagaatctcctttccccccgaaagaaattagtgttagttgtaccattgggaatgtagatacagttctcaaatgcagcatctgtgggcatttgttttcttcttgctctgacttggaaaaacatgctgagtctcacatgcagcagcctaaggaacatacctgttgtcactgcagccacaaagcagagagcagctcagcactacatatgcatatcaaacaagcacatgggccacagaaggtcttttcctgtgatctttgtggttttcagtgttcagaagaaaacttgttgaatgcacattatcttggcaaaacacatctccgtcgtcagaatctggctgctcgtggaggatttgtacagatcttaacaaaacaaccttttcctaaaaaatcacgtacaatggcaacaaaaaatgttcactcaaaaccaagaacttctaaatcaatagcaaagaatagtgattcaaaaggattacgaaatgtgggaagcacgtttaaagatttcagaggaagtatttctaaacaaagtggtagtagcagtgagcttcttgttgaaatgatgccttccagaaatactttgtcacaggaagtagagattgttgaagaacatgttacttcccttggtctagctcagaatcctgaaaaccagagtagaaagctagacaccttagtaacctcagagggtctcttagagaaattggaatctacaaaaaatacccttcaggcagcacacggtaacagtgtaacctcgaggccaagacctgagcgaaatattctcgtgttgggtaatagctttcgtcgacgaagcagcactttcaccttgaagggccaggcaaagaaaaggtttaatcttttaggaattaaaagaggtacaagtgaaactcagaggatgtatatgaaacacttgagaacacagatgaaaacacacgatgcagaatcagtgctgaaacacctggaagcgtgcagcagtgtgcagagagtgtgtgtgactacctcagaaacccaggaggcagagcagggccaggggagtgcccgtcctccggactccgggctgcattccctgacagtgaagccagcttctggctctcagacgttgtgtgcttgtacagactgtgggcaagtagctacaaataggacagatttggaaatccatgtgaaaaggtgccatgccagagagatgaaattttactgccgtacttgtgacttctctagtatgtcaagaagggacttagatgaacatttgcacagtaaccagcatcagcaaactgcttctgtcctgagttgtcagtgttgttcatttatatccttggatgaaataaatcttagagaccacatgaaggaaaagcacaatatgcattttctttgcaccccttgtaatctgttctttttgtctgaaaaagatgtggaagaacacaaagccaccgagaagcatattaattcattggttcaaccaaagactttgcaatcatctaacagtgatttggttttacagactttacctttgagtactttagaatcagaaaacgcaaaagagtctatggatgactcaggaaaagcatctcaggaagaacctctgaagtccagggtaagccatggtaatgaagtgaggcattccagtaagcctcagtttcagtgtaagaagtgtttttataaaacaagatcttctactgttctcacgagacatataaagcttcggcatggtcaagactatcattttctttgtaaagcttgtaatctttattcattgagcaaagaaggaatggagaaacacattaaaagaagcaagcatcttgaaaatgctaagaaaaataatattggcttaagctttgaagaatgtattgaaagggtatgtataggtgcaaatgataaaaaagaagagtttgatgtttccggaaatggaaggattgaaggccatataggtgtgcaattacaagagcattcctatcttgagaagggcatgctggcgtctgaggaactgtcacagtctggtggtagcaccaaagatgatgaattagcttcaaccactactccaaagagagggagacctaaaggtaacatctcacggacgtgttcacactgtggccttttggcctctagtattacaaacttgactgttcacattagacgaaaacacagtcaccagtatagttatttatgcaaagtgtgtaagtattacactgtaactaagggagatatggaacgtcattgtgccaccaagaaacataaaggacgggtagaaatagaagcaagtggaaaacacagttcagatatcattgttggccctgaagggggtagccttgaagctggtaaaaagaatgctggctcagcagtgaccatgtcagatgaacatgctaacaaaccagctgagtcacccacctccgttttagagaagccagatcgtggaaactcaattgaagctgaagttgaaaatgtatttcattctctagatggagaagttaacagccatcttcttgataaaaaggagcaaatatcttcagagccagaggacttcgcccagccgggggatgtgtactcccagagagatgttacaggcacaggtgagaataagtgtttgcactgtgagtttagtgctcactcctctgcttctctagagctgcatgtaaaacggaaacatacaaaagagtttgagttttattgcatggcatgcgattactacgcggtgactcgtcgcgagatgaccaggcatgcagcaacagagaagcacaaaatgaaaaggcagtcttatctcaactctgctaatgtagaagctggttctgcagacatgtccaaaaacatcattatgcctgaagaagagcatcaacaaaattctgaggaatttcaaataatttcaggtcaaccatctgatactcttaaatctagaaatgctgcagattgctctattttaaatgagaatactaatttagatatgtctaaagtgctctgcgctgctgactctgtagaagttgagactgaagaagaatctaatttcaatgaagaccattccttttgtgagactttccaacaggctcctgtcaaggataaagttaggaaacctgaggagatgatgtcacttactatgtcctcaaactatggctccccaagcagatttcaaaatgaaaattcaggaagctctgccttaaattgtgagacagcaaagaaaaaccatgagatatcgaatgatgcaggtgagctgcgtgtccattgtgagggtgaaggaggaaacgcaggagacggtggaggtgttgtcccccacagacacctgtgccctgtgacgctcgatggggagcgctcggctgaaagccctgtgctcgttgtgacaagaataaccagagaacagggaaatctggagagcgggggtcagaacagagttgcacgtgggcatggtttggaagacttgaaaggtgtccaagaagatcccgttctggggaataaggaaattctgatgaattcacaacatgaaacagaatttattttggaggaggatggcccagcttctgatagcacagttgaaagtagtgatgtctatgaaactataattagtattgatgataaagggcaggccatgtacagttttggtcgatttgactcctccataataagaataaagaaccctgaagatggtgagttgatagaccagtctgaagagggcttgatagcaacgggagtgagaattagtgagctgcccttgaaagactgtgctcaaggtgtgaaaaagaagaaatctgagggcagttccattggtgagtctacacgaattcgctgtgatgattgtggcttcttagcagatggactgagtggactgaatgttcacatagccatgaagcatcctacaaaagagaagcacttccattgtttactctgtggaaagtcgttctataccgaaagcaaccttcaccagcatctggctagtgccggccacatgagaaatgagcaggccagtgtggaggagcttccggagggaggggccacctttaaatgtgtcaagtgcacagagccctttgattctgaacagaatttatttttacatattaaaggacagcatgaggaattgctgcgggaggtgaataagtatatagtggaagacactgagcaaatcaaccgcgagagggaggaaaaccagggaaacgtctgcaagtattgtgggaagatgtgtcgaagcagcaactcgatggccttcctggcacacattcgcactcacacaggatcaaaaccattcaagtgcaagatatgccattttgcaacagctcagcttggagatgccagaaaccatgtgaaaaggcaccttgggatgagggaatacaagtgtcatgtctgtggggttgcttttgtaatgaagaagcacttaaatactcatctactaggcaagcatggagttggcaccccaaaagaaagagtaaaggttgcatatcgaaagatcgggacgttgccaggaatacagaacaacaggaacgcgtcgagtgcctctgaagcccaaagtctttgtgagcacttttcatagtaatgaactagtccgtaacttgaaagtatttcgatttcttggctttatatatcttgtggaaaggacgaatcgccaggagacacgtagttcat

SEQ ID NO: 2101 - DNA, 6848 bp, Homo sapiens
  source 1..6848: mol_type = genomic DNA
accgccaccatgatggatagtgagaataaacccgaaaatgatgaggatgaaaagataaacaaagaagcacaagacttgacaaagctttcatcccataatgaagacggtgggcctgtatctgatgtgatagcaagtttccctgagaattctatgggcaaaagaggtttttcagaatcatcgaactctgatagtgttgttataggagaagacagaaataaacatgcttccaaacgcaggaaattagatgaggcagagccccttaaatctggaaagcaaggtatttgtagattagaaacttctgagagctcagtcacagaagggggtattgcattagatgaaacagggaaggagacctttctgagtgactgcacagttggaggcacatgtctcccaaatgccctctccccttcttgcaattttagcactattgatgttgtttctctgaaaacagacactgaaaaaacatctgctcaggaaatggtttcccttgatctggaaagagaatctcctttccccccgaaagaaattagtgttagttgtaccattgggaatgtagatacagttctcaaatgcagcatctgtgggcatttgttttcttcttgctctgacttggaaaaacatgctgagtctcacatgcagcagcctaaggaacatacctgttgtcactgcagccacaaagcagagagcagctcagcactacatatgcatatcaaacaagcacatgggccacagaaggtcttttcctgtgatctttgtggttttcagtgttcagaagaaaacttgttgaatgcacattatcttggcaaaacacatctccgtcgtcagaatctggctgctcgtggaggatttgtacagatcttaacaaaacaaccttttcctaaaaaatcacgtacaatggcaacaaaaaatgttcactcaaaaccaagaacttctaaatcaatagcaaagaatagtgattcaaaaggattacgaaatgtgggaagcacgtttaaagatttcagaggaagtatttctaaacaaagtggtagtagcagtgagcttcttgttgaaatgatgccttccagaaatactttgtcacaggaagtagagattgttgaagaacatgttacttcccttggtctagctcagaatcctgaaaaccagagtagaaagctagacaccttagtaacctcagagggtctcttagagaaattggaatctacaaaaaatacccttcaggcagcacacggtaacagtgtaacctcgaggccaagacctgagcgaaatattctcgtgttgggtaatagctttcgtcgacgaagcagcactttcaccttgaagggccaggcaaagaaaaggtttaatcttttaggaattaaaagaggtacaagtgaaactcagaggatgtatatgaaacacttgagaacacagatgaaaacacacgatgcagaatcagtgctgaaacacctggaagcgtgcagcagtgtgcagagagtgtgtgtgactacctcagaaacccaggaggcagagcagggccaggggagtgcccgtcctccggactccgggctgcattccctgacagtgaagccagcttctggctctcagacgttgtgtgcttgtacagactgtgggcaagtagctacaaataggacagatttggaaatccatgtgaaaaggtgccatgccagagagatgaaattttactgccgtacttgtgacttctctagtatgtcaagaagggacttagatgaacatttgcacagtaaccagcatcagcaaactgcttctgtcctgagttgtcagtgttgttcatttatatccttggatgaaataaatcttagagaccacatgaaggaaaagcacaatatgcattttctttgcaccccttgtaatctgttctttttgtctgaaaaagatgtggaagaacacaaagccaccgagaagcatattaattcattggttcaaccaaagactttgcaatcatctaacagtgatttggttttacagactttacctttgagtactttagaatcagaaaacgcaaaagagtctatggatgactcaggaaaagcatctcaggaagaacctctgaagtccagggtaagccatggtaatgaagtgaggcattccagtaagcctcagtttcagtgtaagaagtgtttttataaaacaagatcttctactgttctcacgagacatataaagcttcggcatggtcaagactatcattttctttgtaaagcttgtaatctttattcattgagcaaagaaggaatggagaaacacattaaaagaagcaagcatcttgaaaatgctaagaaaaataatattggcttaagctttgaagaatgtattgaaagggtatgtataggtgcaaatgataaaaaagaagagtttgatgtttccggaaatggaaggattgaaggccatataggtgtgcaattacaagagcattcctatcttgagaagggcatgctggcgtctgaggaactgtcacagtctggtggtagcaccaaagatgatgaattagcttcaaccactactccaaagagagggagacctaaaggtaacatctcacggacgtgttcacactgtggccttttggcctctagtattacaaacttgactgttcacattagacgaaaacacagtcaccagtatagttatttatgcaaagtgtgtaagtattacactgtaactaagggagatatggaacgtcattgtgccaccaagaaacataaaggacgggtagaaatagaagcaagtggaaaacacagttcagatatcattgttggccctgaagggggtagccttgaagctggtaaaaagaatgctggctcagcagtgaccatgtcagatgaacatgctaacaaaccagctgagtcacccacctccgttttagagaagccagatcgtggaaactcaattgaagctgaagttgaaaatgtatttcattctctagatggagaagttaacagccatcttcttgataaaaaggagcaaatatcttcagagccagaggacttcgcccagccgggggatgtgtactcccagagagatgttacaggcacaggtgagaataagtgtttgcactgtgagtttagtgctcactcctctgcttctctagagctgcatgtaaaacggaaacatacaaaagagtttgagttttattgcatggcatgcgattactacgcggtgactcgtcgcgagatgaccaggcatgcagcaacagagaagcacaaaatgaaaaggcagtcttatctcaactctgctaatgtagaagctggttctgcagacatgtccaaaaacatcattatgcctgaagaagagcatcaacaaaattctgaggaatttcaaataatttcaggtcaaccatctgatactcttaaatctagaaatgctgcagattgctctattttaaatgagaatactaatttagatatgtctaaagtgctctgcgctgctgactctgtagaagttgagactgaagaagaatctaatttcaatgaagaccattccttttgtgagactttccaacaggctcctgtcaaggataaagttaggaaacctgaggagatgatgtcacttactatgtcctcaaactatggctccccaagcagatttcaaaatgaaaattcaggaagctctgccttaaattgtgagacagcaaagaaaaaccatgagatatcgaatgatgcaggtgagctgcgtgtccattgtgagggtgaaggaggaaacgcaggagacggtggaggtgttgtcccccacagacacctgtgccctgtgacgctcgatggggagcgctcggctgaaagccctgtgctcgttgtgacaagaataaccagagaacagggaaatctggagagcgggggtcagaacagagttgcacgtgggcatggtttggaagacttgaaaggtgtccaagaagatcccgttctggggaataaggaaattctgatgaattcacaacatgaaacagaatttattttggaggaggatggcccagcttctgatagcacagttgaaagtagtgatgtctatgaaactataattagtattgatgataaagggcaggccatgtacagttttggtcgatttgactcctccataataagaataaagaaccctgaagatggtgagttgatagaccagtctgaagagggcttgatagcaacgggagtgagaattagtgagctgcccttgaaagactgtgctcaaggtgtgaaaaagaagaaatctgagggcagttccattggtgagtctacacgaattcgctgtgatgattgtggcttcttagcagatggactgagtggactgaatgttcacatagccatgaagcatcctacaaaagagaagcacttccattgtttactctgtggaaagtcgttctataccgaaagcaaccttcaccagcatctggctagtgccggccacatgagaaatgagcaggccagtgtggaggagcttccggagggaggggccacctttaaatgtgtcaagtgcacagagccctttgattctgaacagaatttatttttacatattaaaggacagcatgaggaattgctgcgggaggtgaataagtatatagtggaagacactgagcaaatcaaccgcgagagggaggaaaaccagggaaacgtctgcaagtattgtgggaagatgtgtcgaagcagcaactcgatggccttcctggcacacattcgcactcacacaggatcaaaaccattcaagtgcaagatatgccattttgcaacagctcagcttggagatgccagaaaccatgtgaaaaggcaccttgggatgagggaatacaagtgtcatgtctgtggggttgcttttgtaatgaagaagcacttaaatactcatctactaggcaagcatggagttggcaccccaaaagaaaggaaatttacatgccacttatgtgatagaagtttcacagagaagtgggccctgaacaaccacatgaaactccacacgggagaaaagccgtttaaatgtacctggcccacgtgccattactcattcctcacagcctccgcaatgaaagaccactacaggacgcacacaggcgagaagtcgtttctgtgtgacctctgcggctttgccggcgggacccgccacgccctcaccaagcatcgcagacagcacacaggagaaaaacctttcaagtgcgatgagtgtaactttgcctccacaactcagtcccatttgactcggcataaacgtgtccacactggagaaaagccctacagatgcccctggtgtgactacaggtcaaactgtgctgaaaatatccgcaaacacattctgcatactggcaaacatgaaggagtcaagatgtacaactgtcccaagtgtgactacgggaccaacgtcccggtggagttccggaaccatttgaaggaacagcatcctgacatcgaaaacccggacctcgcttacctgcatgctggcattgtttccaagtcgtacgagtgccgtctaaagggacaaggagccaccttcgtggagacagacagccccttcaccgcggcggccttggcagaagagcccctcgtcaaggagaagcccctcagaagcagcaggaggccagcgccgccccctgagcaggtgcagcaggtcatcatcttccagggctacgacggggagtttgccctggacccctcggtggaggagacggccgccgccacgctgcagacgctggccatggccggccaggtggcccgggtggtgcatatcacggaggatggccaggtcatcgccacgagtcagagcggggcacatgtaggcagcgtggtgcccggacccatcctccccgagcagctggctgatggagccacccaggtggtcgtcgtggggggctccatggaaggccacggcatggatgagtccctcagtccaggtggcgctgtgatacaacaggtgaccaagcaggagattttaaacctctcggaggctggagtcgctccccccgaggcatcctcagccctggatgcattgctctgtgcggtcactgaattaggggaggtggagggcagggctgggctcgaggagcaaggcaggcccggcgccaaagacgtgctgatccagctgcccgggcaggaggtctcccatgtggctgccgaccccgaggcccccgagatccagatgttcccacaggcccaggagagcccggccgccgtggaggtgctcacccaggtggtccatccctcagcagccatggcctctcaggagcgggcacaggtggccttcaagaagatggtccagggcgtcctccagtttgctgtgtgtgacacggccgcggccggccagttggtcaaggacggtgtcacccaggtggtggtgagcgaagagggtgccgtccacatggtcgccggggagggtgcccagatcatcatgcaggaggcgcagggcgagcacatggatctggtggagtccgacggggagatctcgcagatcatcgtgacggaggagctggtccaggccatggtgcaggagtccagtggcggcttctccgagggcaccacgcactacatcctgacagagctgcccccaggggtgcaggacgagccgggcctgtactcccacaccgtgctggagactgcggactcgcaggaactcctgcaggccggggccacgctaggcacagaggccggggccccaagcagggcagagcagctggccagcgtggtcatctacacccaggagggctcctcggccgcggcggcaattcagagccaaagagaaagcagcgaactccaggaagcatagtaatgaactagtccgtaacttgaaagtatttcgatttcttggctttatatatcttgtggaaaggacgaaagggatgaatagtaatgtcccga

SEQ ID NO: 2102 - DNA, 2006 bp, Homo sapiens
  source 1..2006: mol_type = genomic DNA
accgccaccatgaccgaagaagcatgccgaacacggagtcagaaacgagcgcttgaacgggacccaacagaggacgatgtggagagcaagaaaataaaaatggagagaggattgttggcttcagatttaaacactgacggagacatgagggtgacacctgagccgggagcaggtccaacccaaggattgctgagggcaacagaggccacggccatggccatgggcagaggcgaagggctggtgggcgatgggcccgtggacatgcgcacctcacacagtgacatgaagtccgagaggagacccccctcacctgacgtgattgtgctctccgacaacgagcagccctcgagcccgagagtgaatgggctgaccacggtggccttgaaggagactagcaccgaggccctcatgaaaagcagtcctgaagaacgagaaaggatgatcaagcagctgaaggaagaattgaggttagaagaagcaaaactcgtgttgttgaaaaagttgcggcagagtcaaatacaaaaggaagccaccgcccagaagcccacaggttctgttgggagcaccgtgaccacccctcccccgcttgttcggggcactcagaacattcctgctggcaagccatcactccagacctcttcagctcggatgcccggcagtgtcatacccccgcccctggtccgaggtgggcagcaggcgtcctcgaagctggggccacaggcgagctcacaggtcgtcatgcccccactcgtcaggggggctcagcaaatccacagcattaggcaacattccagcacagggccaccgcccctcctcctggccccccgggcgtcggtgcccagtgtgcagattcagggacagaggatcatccagcagggcctcatccgcgtcgccaatgttcccaacaccagcctgctcgtcaacatcccacagcccaccccagcatcactgaaggggacaacagccacctccgctcaggccaactccacccccactagtgtggcctctgtggtcacctctgccgagtctccagcaagccgacaggcggccgccaagctggcgctgcgcaaacagctggagaagacgctactcgagatccccccacccaagcccccagccccagagatgaacttcctgcccagcgccgccaacaacgagttcatctacctggtcggcctggaggaggtggtgcagaacctactggagacacaagcaggcaggatgtcggccgccactgtgctgtcccgggagccctacatgtgtgcacagtgcaagacggacttcacgtgccgctggcgggaggagaagagcggcgccatcatgtgtgagaactgcatgacaaccaaccagaagaaggcgctcaaggtggagcacaccagccggctgaaggccgcctttgtgaaggcgctgcagcaggaacaggagattgagcagcggctcctgcagcagggcacggcccctgcacaggccaaggccgagcccaccgctgccccacaccccgtgctgaagcaggtcataaaaccccggcgtaagttggcgttccgctcaggagaggcccgcgactggagtaacggggctgtgctacaggcctccagccagctgtcccggggttcggccacgacgccccgaggtgtcctgcacacgttcagtccgtcacccaaactgcagaactcagcctcggccacagccctggtcagcaggaccggcagacattctgagagaaccgtgagcgccggcaagggcagcgccacctccaactggaagaagacgcccctcagcacaggcgggacccttgcgtttgtcagcccaagcctggcggtgcacaagagctcctcggccgtggaccgccagcgagagtacctcctggacatgatcccaccccgctccatcccccagtcagccacgtggaaatagtaatgaactagtccgtaacttgaaagtatttcgatttcttggctttatatatcttgtggaaaggacgacgtcgcccatgtacaagctttgcg

SEQ ID NO: 2103 - DNA, 2003 bp, Homo sapiens
  source 1..2003: mol_type = genomic DNA
accgccaccatgaccgaagaagcatgccgaacacggagtcagaaacgagcgcttgaacgggacccaacagaggacgatgtggagagcaagaaaataaaaatggagagaggattgttggcttcagatttaaacactgacggagacatgagggtgacacctgagccgggagcaggtccaacccaaggattgctgagggcaacagaggccacggccatggccatgggcagaggcgaagggctggtgggcgatgggcccgtggacatgcgcacctcacacagtgacatgaagtccgagaggagacccccctcacctgacgtgattgtgctctccgacaacgagcagccctcgagcccgagagtgaatgggctgaccacggtggccttgaaggagactagcaccgaggccctcatgaaaagcagtcctgaagaacgagaaaggatgatcaagcagctgaaggaagaattgaggttagaagaagcaaaactcgtgttgttgaaaaagttgcggcagagtcaaatacaaaaggaagccaccgcccagaagcccacaggttctgttgggagcaccgtgaccacccctcccccgcttgttcggggcactcagaacattcctgctggcaagccatcactccagacctcttcagctcggatgcccggcagtgtcatacccccgcccctggtccgaggtgggcagcaggcgtcctcgaagctggggccacaggcgagctcacaggtcgtcatgcccccactcgtcaggggggctcagcaaatccacagcattaggcaacattccagcacagggccaccgcccctcctcctggccccccgggcgtcggtgcccagtgtgcagattcagggacagaggatcatccagcagggcctcatccgcgtcgccaatgttcccaacaccagcctgctcgtcaacatcccacagcccaccccagcatcactgaaggggacaacagccacctccgctcaggccaactccacccccactagtgtggcctctgtggtcacctctgccgagtctccagcaagccgacaggcggccgccaagctggcgctgcgcaaacagctggagaagacgctactcgagatccccccacccaagcccccagccccagagatgaacttcctgcccagcgccgccaacaacgagttcatctacctggtcggcctggaggaggtggtgcagaacctactggagacacaaggcaggatgtcggccgccactgtgctgtcccgggagccctacatgtgtgcacagtgcaagacggacttcacgtgccgctggcgggaggagaagagcggcgccatcatgtgtgagaactgcatgacaaccaaccagaagaaggcgctcaaggtggagcacaccagccggctgaaggccgcctttgtgaaggcgctgcagcaggaacaggagattgagcagcggctcctgcagcagggcacggcccctgcacaggccaaggccgagcccaccgctgccccacaccccgtgctgaagcaggtcataaaaccccggcgtaagttggcgttccgctcaggagaggcccgcgactggagtaacggggctgtgctacaggcctccagccagctgtcccggggttcggccacgacgccccgaggtgtcctgcacacgttcagtccgtcacccaaactgcagaactcagcctcggccacagccctggtcagcaggaccggcagacattctgagagaaccgtgagcgccggcaagggcagcgccacctccaactggaagaagacgcccctcagcacaggcgggacccttgcgtttgtcagcccaagcctggcggtgcacaagagctcctcggccgtggaccgccagcgagagtacctcctggacatgatcccaccccgctccatcccccagtcagccacgtggaaatagtaatgaactagtccgtaacttgaaagtatttcgatttcttggctttatatatcttgtggaaaggacgattatttatattgtacatcttgaaa

SEQ ID NO: 2104 - DNA, 3980 bp, Homo sapiens
  source 1..3980: mol_type = genomic DNA
accgccaccatggacgcatcatatgatggtactgaggtaactgtcgtgatggaggaaattgaggaagcctattgttacacctctcctgggccacccaagaagaagaaaaagtataaaatacatggagaaaagacaaagaaacccaggtctgcttaccttctgtactattacgacatctacctgaaagtgcagcaggagctcccccacctccctcagtctgagatcaataagaagattagtgagagttggaggcttctcagcgtggccgagaggagttactacttggagaaagccaaactagagaaggaaggtttggatcctaactctaagctctctgcactgactgctgtggttccggacatcccaggtttccgcaagatcctcccacgctcagattatatcatcatccccaagagcagcctgcaggaggaccggagctgccctcagctagagctatgtgtggctcagaaccagatgtccccgaaaggacctcctcttgtgtccaacactgccccggagacagtgcccagccatgcaggcatggcagagcagtgcctggctgtggaggccctggctgaggaggtgggagcccttacccagtcaggtgctgtacaggagattgccacctcagagatcctcagccaggatgtgctcctagaggacgcttccctagaagtaggggagagccaccaaccttaccagacaagcctggtaattgaagagaccttggtgaatggctcaccagacctccccactggaagcctggctgtgccccacccccaggttggggagagtgtatcagtggtaacagtcatgagggattccagtgagagtagctcctctgcaccagccacacagttcatcatgttgcctctgcctgcctactcggttgtggagaaccccacctccatcaaactgaccactacatatacccgccggggccatgggacatgcaccagcccagggtgctcctttacatatgtcaccaggcacaagccacctaagtgccctacctgtggtaacttcctaggagggaagtggatcccaaaggaaaagccagccaaagtaaaagtggaattggcttctggcgtctcttccaaaggctctgtggtgaaaagaaatcagcaacctgtcaccactgagcaaaattcctctaaggaaaatgcctccaaactgactctggagaattcggaagctgtaagccagctcctgaacgtagctcctcccagagaagtaggtgaggagagtgagtgggaggaagtgatcatctccgatgcccatgttttggttaaggaagctcccgggaattgtggtacagcagtcactaagacgccagtcgtcaaaagtggtgtgcagcctgaggtcactctggggacaactgacaatgacagtcctggagcagacgtaccaacaccatccgaggggacaagtacctccagtccactccctgctcctaaaaaacctacaggagctgacctgcttacccctgggtccagagctccagagcttaaaggcagagcacggggcaagccctcattactggctgcagcaagacccatgagagcaattttgccagccccagttaacgtggggcgaggcagcagcatgggactgcccagggccaggcaggccttttccctgagtgataagactccctctgtgaggacttgtggtctgaagccaagcacactgaagcagctgggccagcccattcaacagccatctggccctggtgaggtgaagctaccaagtggcccatccaacaggacttctcaggtgaaagttgtggaggtcaagcccgatatgtttcctccatataagtacagctgcactgtcacattggatttgggcctggctacatcaagaggccggggaaagtgcaagaatccctcttgtagctatgtctacaccaacaggcacaaacctcgaatttgtcccagctgtggtgttaaccttgccaaagaccggactgagaaaaccaccaaggctatcgaggtgagctcaccactcccagatgtactgaatgccacagagcccctgagcacagcccagagggagatccagcgccagtccacactgcagctgctgcgcaaagtcctgcagattcctgagaatgagtcagagctggctgaggtcttcgccttgattcatgaactcaacagctctcgacttatcttgtccaacgtgagtgaggagacagtcaccatcgagcaaacctcttggtcgaattattatgagtctccgtccacgcagtgccttctctgtagcagcccattattcaaagggggacaaaactccctggctgggccccaggagtgctggctgctgacagccagccgtctgcagacagtgactgcccaggtgaagatgtgtctgaacccccattgtctggccctgcacagcttcatagacatctacacaggtctctttaatgtggggaacaagctgctggtaagcctggacttgctttttgcaatcagaaatcagatcaagctcggagaggaccccagagtgtccatcaatgttgttctgaagtcggtgcaggagcagacagagaagactctgacctcggaggagctgagccagctgcaggagctgctgtgcaatggctattgggcctttgagtgcctcactgtccgagactacaatgacatgatctgtggcatctgtggtgtggcccccaaagtggaaatggctcagaggagtgaagagaatgtgctagcactgaagagcgtggagttcacctggcctgaattcctgggctctaatgaggtaaatgtggaggacttttgggccacgatggagacagaggtgattgagcaggtggcatttcctgccagcatccctatcaccaaatttgatgcgtctgttattgcccccttcttcccaccactcatgagaggagctgtggtcgtcaacactgagaaagacaaaaacctggatgtgcagccagtacctggcagtggcagtgccttggtgaggctgctccaggagggcacctgcaagcttgatgagattggctcctacagtgaagagaagctgcagcacctgctaaggcagtgtggaatcccctttggggcagaagactccaaggaccagctctgcttctccttgttggccctctacgaatctgtacagaatggagctagagctatacggcccccacgtcacttcacaggtggtaaaatctacaaggtgtgcccccatcaggtggtctgcggctccaagtatcttgtgcgaggtgagagtgcccgtgaccatgtggacctgcttgcctcttcccgccactggccgcctgtctatgtggtagatatggccacgtcagtggccctgtgtgctgacctctgctacccagagctgactaaccagatgtgggggaggaaccagggctgtttctctagccccacagagccacctgtgagtgtgtcctgcccagagctcttggaccagcattatactgtggacatgacagaaactgagcactctatccagcacccagtcaccaagactgccacgcggcgcatcgtccatgcaggcctacagcccaatcctggtgaccccagtgctgggcaccactccttggccctgtgccctgaattggcaccttacgcaaccatcctggcctccatcgtggacagcaaaccaaacggtgtccgccagcggcccattgccttcgacaatgccactcactattacctctacaaccgcctcatggacttcctcaccagccgcgaaattgtcaatcgtcagatccatgacattgtacagagctgccagcctggtgaggtggtcattcgtgacaccctctaccgccttggggttgctcagatcaagacagagacagaggaggagggtgaggaagaggaggtggccgcagtggcagaatagtaatgaactagtccgtaacttgaaagtatttcgatttcttggctttatatatcttgtggaaaggacgaaagtgtgtgggtgccatggtatac

SEQ ID NO: 2105 - DNA, 1907 bp, Homo sapiens
  source 1..1907: mol_type = genomic DNA
accgccaccatggcttatgatgactccgtgaagaaagaagattgttttgatggtgatcatacctttgaggacataggacttgcagctggccgaagccaacgagagaaaaaacgttcttacaaagattttttaagggaagaggaagaaattgctgctcaggtcaggaattcttccaagaagaagttgaaggatagtgaactttacttcttggggacggacacacacaagaagaagaggaagcactcctctgatgattactactatggagatatttcgtctttggaatcgtcacagaagaaaaagaaaaagtccagcccacagtctactgatacagctatggacctgttgaaagctatcacttccccactggcagcaggctccaagccctccaaaaagactggggagaaatcctctggctcttcaagccattcggagagtaaaaaggagcaccacaggaagaaagtcagtggaagcagtggggaactacccctagaggatggtggctcccacaaatcgaaaaaaatgaaacctctctatgtgaacacagagacactgacccttcgggagcctgatggtttaaaaatgaaacttattctgtcaccaaaggagaagggaagcagctctgttgatgaggagtcttttcaatatccctcccaacaagcgactgtgaaaaaatcctcaaagaaatcagctcgggatgagcagggtgctttactcctaggacatgagttacagagctttctgaaaacagcccggaaaaagcacaagtcatcctcagacgcacattcatctcctggccctgaaggctgtgggtctgacgcctcccagttcgcagagtcccacagtgctaaccttgatctttcagggcttgaacctattctggtagaatcagactcatcctctggtggggaactagaggctggggagttagtgatagatgattcttaccgagaaatcaagaagaaaaagaagtcaaagaagagcaaaaagaagaaagacaaggagaagcataaagagaagcgacactccaagtccaagagaagtttaggactttctgccgtgccagtgggagaggtcacagtgacatctggccctcctcccagcatcccatacgctggagcagcagcacctcccctgccacttcctggcctccacacagatgggcatagtgaaaaaaaaaagaaaaaagaagagaaggacaaagagagagagagaggagaaaagccaaaaaagaagaacatgtcggcctaccaggtgttctgtaaagagtatcgcgtgaccattgtggctgaccatccaggtatagattttggggaacttagtaaaaaactggctgaggtgtggaagcaattaccagaaaaagacaaactgatttggaagcaaaaagctcagtatctgcagcacaaacagaacaaagcagaagccacaactgtgaaaaggaaagcatccagctcagaaggttccatgaaagtcaaagcctcttctgtaggagtactgtcaccccagaagaagtccccacccaccaccatgctgttaccagcctcaccagccaaagcccctgagacagagcccattgatgttgctgctcatcttcagctgttgggagagtccctaagcctcattggacaccgtctgcaggaaactgagggtatggtggctgtgtctggcagtttgtcagtgcttctggattccattatctgtgcccttggccccttggcatgtctcaccacacaactacctgaattgaatggctgtcccaaacaggtcttgtcaaacacattagacaacattgcttacatcatgccgggactgtagtaatgaactagtccgtaacttgaaagtatttcgatttcttggctttatatatcttgtggaaaggacgagacacctccagatcgagctgttgt

SEQ ID NO: 2106 - DNA, 917 bp, Homo sapiens
  source 1..917: mol_type = genomic DNA
accgccaccatggagaccaactgccgcaaactggtgtcggcgtgtgtgcaattagagaaagataaaagccagcaggggaagaatgaggacgtgggcgccgaggacccgtctaagaagaagcggcaaaggcggcagcggactcactttaccagccagcagctccaggagctggaggccactttccagaggaaccgctacccggacatgtccacacgcgaagaaatcgctgtgtggaccaaccttacggaagcccgagtccgggtttggttcaagaatcgtcgggccaaatggagaaagagggagcgcaaccagcaggccgagctatgcaagaatggcttcgggccgcagttcaatgggctcatgcagccctacgacgacatgtacccaggctattcctacaacaactgggccgccaagggccttacatccgcctccctatccaccaagagcttccccttcttcaactctatgaacgtcaaccccctgtcatcacagagcatgttttccccacccaactctatctcgtccatgagcatgtcgtccagcatggtgccctcagcagtgacaggcgtcccgggctccagtctcaacagcctgaataacttgaacaacctgagtagcccgtcgctgaattccgcggtgccgacgcctgcctgtccttacgcgccgccgactcctccgtatgtttatagggacacgtgtaactcgagcctggccagcctgagactgaaagcaaagcagcactccagcttcggctacgccagcgtgcagaacccggcctccaacctgagtgcttgccagtatgcagtggaccggcccgtgtagtaatgaactagtccgtaacttgaaagtatttcgatttcttggctttatatatcttgtggaaaggacgagtttcggctcctccctaggtcatc

SEQ ID NO: 2107 - DNA, 1055 bp, Homo sapiens
  source 1..1055: mol_type = genomic DNA
accgccaccatggagaccaactgccgcaaactggtgtcggcgtgtgtgcaattaggcgtgcagccggcggccgttgaatgtctcttctccaaagactccgaaatcaaaaaggtcgagttcacggactctcctgagagccgaaaagaggcagccagcagcaagttcttcccgcggcagcatcctggcgccaatgagaaagataaaagccagcaggggaagaatgaggacgtgggcgccgaggacccgtctaagaagaagcggcaaaggcggcagcggactcactttaccagccagcagctccaggagctggaggccactttccagaggaaccgctacccggacatgtccacacgcgaagaaatcgctgtgtggaccaaccttacggaagcccgagtccgggtttggttcaagaatcgtcgggccaaatggagaaagagggagcgcaaccagcaggccgagctatgcaagaatggcttcgggccgcagttcaatgggctcatgcagccctacgacgacatgtacccaggctattcctacaacaactgggccgccaagggccttacatccgcctccctatccaccaagagcttccccttcttcaactctatgaacgtcaaccccctgtcatcacagagcatgttttccccacccaactctatctcgtccatgagcatgtcgtccagcatggtgccctcagcagtgacaggcgtcccgggctccagtctcaacagcctgaataacttgaacaacctgagtagcccgtcgctgaattccgcggtgccgacgcctgcctgtccttacgcgccgccgactcctccgtatgtttatagggacacgtgtaactcgagcctggccagcctgagactgaaagcaaagcagcactccagcttcggctacgccagcgtgcagaacccggcctccaacctgagtgcttgccagtatgcagtggaccggcccgtgtagtaatgaactagtccgtaacttgaaagtatttcgatttcttggctttatatatcttgtggaaaggacgatgggtgaaccatactcatggcaaa

SEQ ID NO: 2108 - DNA, 1010 bp, Homo sapiens
  source 1..1010: mol_type = genomic DNA
accgccaccatggagttcggcctgctcagcgaggcagaggcccggagccctgccctgtcgctgtcagacgctggcactccgcacccccagctcccagagcacggctgcaagggccaggagcacagcgactcagaaaaggcctcggcttcgctgcccggcggctccccagaggacggttcgctgaaaaagaagcagcggcggcagcgcacgcacttcaccagccagcagctacaggagctagaggcgaccttccagaggaaccgctaccccgacatgagcacgcgcgaggagatcgccgtgtggaccaacctcaccgaggcccgcgtgcgggtgtggttcaagaaccggcgcgccaaatggcggaagcgcgagcgcagccagcaggccgagctatgcaaaggcagcttcgcggcgccgctcggggggctggtgccgccctacgaggaggtgtaccccggctactcgtacggcaactggccgcccaaggctcttgccccgccgctcgccgccaagacctttccattcgccttcaactcggtcaacgtggggcctctggcttcgcagcccgtcttctcgccacccagctccatcgccgcctccatggtgccctccgccgcggctgccccgggcaccgtgccagggcctggggccctgcagggcctgggcgggggcccccccgggctggctccggccgccgtgtcctccggggccgtgtcctgcccttatgcctcggccgccgccgccgccgcggctgccgcctcttccccctacgtctatcgggacccgtgtaactcgagcctggccagcctgcggctcaaagccaaacagcacgcctccttcagctaccccgctgtgcacgggccgcccccggcagccaaccttagtccgtgccagtacgccgtggaaaggcccgtatagtaatgaactagtccgtaacttgaaagtatttcgatttcttggctttatatatcttgtggaaaggacgattggaggcgggaatagcgaactgc

SEQ ID NO: 2109 - DNA, 2132 bp, Homo sapiens
  source 1..2132: mol_type = genomic DNA
accgccaccatgtctcggcggacgcgctgcgaggatctggatgagctgcactaccaggacacagattcagatgtgccggagcagagggatagcaagtgcaaggtcaaatggacccatgaggagaaccgcactgaccagcaatgccagtacaggtggctgagagttttgaatccagaccttgtcaaggggccatggaccaaagaggaagaccaaaaagtcatcgagctggttaagaagtatggcacaaagcagtggacactgattgccaagcacctgaagggccggctggggaagcagtgccgtgaacgctggcacaaccacctcaaccctgaggtgaagaagtcttgctggaccgaggaggaggaccgcatcatctgcgaggcccacaaggtgctgggcaaccgctgggccgagatcgccaagatgttgccagggaggacagacaatgctgtgaagaatcactggaactctaccatcaaaaggaaggtggacacaggaggcttcttgagcgagtccaaagactgcaagcccccagtgtacttgctgctggagctcgaggacaaggacggcctccagagtgcccagcccacggaaggccagggaagtcttctgaccaactggccctccgtccctcctaccataaaggaggaggaaaacagtgaggaggaacttgcagcagccaccacatcgaaggaacaggagcccatcggtacagatctggacgcagtgcgaacaccagagcccttggaggaattcccgaagcgtgaggaccaggaaggctccccaccagaaacgagcctgccttacaagtgggtggtggaggcagctaacctcctcatccctgctgtgggttctagcctctctgaagccctggacttgatcgagtcggaccctgatgcttggtgtgacctgagtaaatttgacctccctgaggaaccatctgcagaggacagtatcaacaacagcctagtgcagctgcaagcgtcacatcagcagcaagtcctgccaccccgccagccttccgccctggtgcccagtgtgaccgagtaccgcctggatggccacaccatctcagacctgagccggagcagccggggcgagctgatccccatctcccccagcactgaagtcgggggctctggcattggcacaccgccctctgtgctcaagcggcagaggaagaggcgtgtggctctgtcccctgtcactgagaatagcaccagtctgtccttcctggattcctgtaacagcctcacgcccaagagcacacctgttaagaccctgcccttctcgccctcccagtttctgaacttctggaacaaacaggacacattggagctggagagcccctcgctgacatccaccccagtgtgcagccagaaggtggtggtcaccacaccactgcaccgggacaagacacccctgcaccagaaacatgctgcgtttgtaaccccagatcagaagtactccatggacaacactccccacacgccaaccccgttcaagaacgccctggagaagtacggacccctgaagcccctgccacagaccccgcacctggaggaggacttgaaggaggtgctgcgttctgaggctggcatcgaactcatcatcgaggacgacatcaggcccgagaagcagaagaggaagcctgggctgcggcggagccccatcaagaaagtccggaagtctctggctcttgacattgtggatgaggatgtgaagctgatgatgtccacactgcccaagtctctatccttgccgacaactgccccttcaaactcttccagcctcaccctgtcaggtatcaaagaagacaacagcttgctcaaccagggcttcttgcaggccaagcccgagaaggcagcagtggcccagaagccccgaagccacttcacgacacctgcccctatgtccagtgcctggaagacggtggcctgcggggggaccagggaccagcttttcatgcaggagaaagcccggcagctcctgggccgcctgaagcccagccacacatctcggaccctcatcttgtcctagtaatgaactagtccgtaacttgaaagtatttcgatttcttggctttatatatcttgtggaaaggacgacggtcgcttaaggtcataatgggt

SEQ ID NO: 2110 - DNA, 2204 bp, Homo sapiens
  source 1..2204: mol_type = genomic DNA
accgccaccatgtctcggcggacgcgctgcgaggatctggatgagctgcactaccaggacacagattcagatgtgccggagcagagggatagcaagtgcaaggtcaaatggacccatgaggaggacgagcagctgagggccctggtgaggcagtttggacagcaggactggaagttcctggccagccacttccctaaccgcactgaccagcaatgccagtacaggtggctgagagttttgaatccagaccttgtcaaggggccatggaccaaagaggaagaccaaaaagtcatcgagctggttaagaagtatggcacaaagcagtggacactgattgccaagcacctgaagggccggctggggaagcagtgccgtgaacgctggcacaaccacctcaaccctgaggtgaagaagtcttgctggaccgaggaggaggaccgcatcatctgcgaggcccacaaggtgctgggcaaccgctgggccgagatcgccaagatgttgccagggaggacagacaatgctgtgaagaatcactggaactctaccatcaaaaggaaggtggacacaggaggcttcttgagcgagtccaaagactgcaagcccccagtgtacttgctgctggagctcgaggacaaggacggcctccagagtgcccagcccacggaaggccagggaagtcttctgaccaactggccctccgtccctcctaccataaaggaggaggaaaacagtgaggaggaacttgcagcagccaccacatcgaaggaacaggagcccatcggtacagatctggacgcagtgcgaacaccagagcccttggaggaattcccgaagcgtgaggaccaggaaggctccccaccagaaacgagcctgccttacaagtgggtggtggaggcagctaacctcctcatccctgctgtgggttctagcctctctgaagccctggacttgatcgagtcggaccctgatgcttggtgtgacctgagtaaatttgacctccctgaggaaccatctgcagaggacagtatcaacaacagcctagtgcagctgcaagcgtcacatcagcagcaagtcctgccaccccgccagccttccgccctggtgcccagtgtgaccgagtaccgcctggatggccacaccatctcagacctgagccggagcagccggggcgagctgatccccatctcccccagcactgaagtcgggggctctggcattggcacaccgccctctgtgctcaagcggcagaggaagaggcgtgtggctctgtcccctgtcactgagaatagcaccagtctgtccttcctggattcctgtaacagcctcacgcccaagagcacacctgttaagaccctgcccttctcgccctcccagtttctgaacttctggaacaaacaggacacattggagctggagagcccctcgctgacatccaccccagtgtgcagccagaaggtggtggtcaccacaccactgcaccgggacaagacacccctgcaccagaaacatgctgcgtttgtaaccccagatcagaagtactccatggacaacactccccacacgccaaccccgttcaagaacgccctggagaagtacggacccctgaagcccctgccacagaccccgcacctggaggaggacttgaaggaggtgctgcgttctgaggctggcatcgaactcatcatcgaggacgacatcaggcccgagaagcagaagaggaagcctgggctgcggcggagccccatcaagaaagtccggaagtctctggctcttgacattgtggatgaggatgtgaagctgatgatgtccacactgcccaagtctctatccttgccgacaactgccccttcaaactcttccagcctcaccctgtcaggtatcaaagaagacaacagcttgctcaaccagggcttcttgcaggccaagcccgagaaggcagcagtggcccagaagccccgaagccacttcacgacacctgcccctatgtccagtgcctggaagacggtggcctgcggggggaccagggaccagcttttcatgcaggagaaagcccggcagctcctgggccgcctgaagcccagccacacatctcggaccctcatcttgtcctagtaatgaactagtccgtaacttgaaagtatttcgatttcttggctttatatatcttgtggaaaggacgatttctggcttggttcctttcagat

SEQ ID NO: 2111 - DNA, 806 bp, Homo sapiens
  source 1..806: mol_type = genomic DNA
accgccaccatgtaccgctccaccaagggcgcctccaaggcgcgccgggaccagatcaacgccgagatccggaacctcaaggagctgctgccgctggccgaagcggacaaggtccggctgtcctacctgcacatcatgagcctcgcctgcatctacactcgcaagggcgtcttcttcgctggtggcactcctctggcgggccccacggggcttctctcagctcaagagcttgaggacatcgtagcggcactacccggctttctgcttgtgttcacagccgaggggaaattgctctacctgtctgagagtgtgagcgagcatctgggccactccatggtggacctggttgcccagggtgacagcatctacgacatcattgacccagctgaccacctcactgtgcgccagcaactcaccctgccctctgccctggacactgatcgcctcttccgctgccgcttcaacacctccaagtccctcaggcgccagagtgcaggcaacaaactcgtgcttattcgaggccgattccatgctcacccacctggagcctactgggcaggaaatcccgtgttcacagctttctgtgcccctctggagccgagaccccgcccaggtcctggccctggccctggccctgcctcgctcttcctggccatgttccagagccgccatgctaaagacctggctctactggacatctccgagagtggctagtaatgaactagtccgtaacttgaaagtatttcgatttcttggctttatatatcttgtggaaaggacgagtgatacagactaaatcgccactt

SEQ ID NO: 2112 - DNA, 2510 bp, Homo sapiens
  source 1..2510: mol_type = genomic DNA
accgccaccatgtaccgctccaccaagggcgcctccaaggcgcgccgggaccagatcaacgccgagatccggaacctcaaggagctgctgccgctggccgaagcggacaaggtccggctgtcctacctgcacatcatgagcctcgcctgcatctacactcgcaagggcgtcttcttcgctggtggcactcctctggcgggccccacggggcttctctcagctcaagagcttgaggacatcgtagcggcactacccggctttctgcttgtgttcacagccgaggggaaattgctctacctgtctgagagtgtgagcgagcatctgggccactccatggtggacctggttgcccagggtgacagcatctacgacatcattgacccagctgaccacctcactgtgcgccagcaactcaccctgccctctgccctggacactgatcgcctcttccgctgccgcttcaacacctccaagtccctcaggcgccagagtgcaggcaacaaactcgtgcttattcgaggccgattccatgctcacccacctggagcctactgggcaggaaatcccgtgttcacagctttctgtgcccctctggagccgagaccccgcccaggtcctggccctggccctggccctgcctcgctcttcctggccatgttccagagccgccatgctaaagacctggctctactggacatctccgagagtgtcctaatctacctgggctttgagcgcagtgaactgctttgtaaatcatggtatggactgctgcaccccgaggacctggcccacgcttctgctcaacactaccgcctgttggctgagagtggagatattcaggcagagatggtggtgaggctacaggccaagactggaggctgggcatggatttactgcctgttatactcagaaggtccagagggacccattactgccaataactacccaatcagtgacatggaagcctggagcctccgccagcagttgaactctgaagacacccaggcagcttatgtcctgggcactccgaccatgctgccctcattccctgaaaacattctttcccaggaagagtgctccagcactaacccactcttcaccgcagcactgggggctcccagaagcaccagcttccccagtgctcctgaactgagtgttgtctctgcatcagaagagcttccccgaccctccaaagaactggacttcagttacctgacattcccttctgggcctgagccttctctccaagcagaactaagcaaggatcttgtgtgcactccaccttacacgccccatcagccaggaggctgtgccttcctcttcagcctccatgagcccttccagacccatttgcccaccccatccagcactcttcaagaacagctgactccaagcactgcgaccttctctgatcagttgacgcccagcagtgcaaccttcccagatccactaactagcccactgcaaggccagttgactgaaacctcggtcagaagctatgaagaccagttgactccctgcacctccaccttcccagaccagctgcttcccagcacagccaccttcccagagcctctgggcagccctgcccatgaacagctgactcctcccagcacagcattccaagcacacctggacagccccagccaaaccttcccagagcaactgagccccaaccctaccaagacttactttgcccaggagggatgcagttttctctatgagaagttgcccccaagtcctagcagccctggtaatggggactgcacgctcttggccctagcccagctccggggccccctctctgtggatgtccccctggtgcccgaaggcctgctcacacctgaggcctctccagtcaagcagagtttcttccactactctgaaaaggagcagaatgagatagaccgtctcatccagcagattagccaattggctcagggcatggacagacccttctcagctgaggctggcactggcggactagagccacttggaggactggagcccctggactccaacctgtccctgtcaggggcaggcccccctgtgctcagcctggacctgaaaccctggaaatgccaggagctggacttcctggctgaccctgataacatgttcctggaagagacgcccgtggaagacatcttcatggatctctctaccccagatcccagtgaggaatggggctcaggggatcctgaggcagagggcccaggaggggccccatcgccttgcaacaacctgtccccagaagaccacagcttcctggaggacctggccacatatgaaaccgcctttgagacaggtgtctcagcattcccctatgatgggtttactgatgagttgcatcaactccagagccaagttcaagacagcttccatgaagatggaagtggaggggaaccaacgttttagtaatgaactagtccgtaacttgaaagtatttcgatttcttggctttatatatcttgtggaaaggacgaaaactcgcgtcgcgtaaattcggg

SEQ ID NO: 2113 - DNA, 2864 bp, Homo sapiens
  source 1..2864: mol_type = genomic DNA
accgccaccatggcgcccaccaagcccagctttcagcaggatccttccaggcgagaacgtttacaagcattgagaaaggagaaatcccgagatgctgctcgctcccgccggggaaaagaaaactttgagttctatgaattggccaagttgttgcctcttcctgcagccattaccagccagctcgacaaggcatccatcattcgacttacaattagctatctgaaaatgagggactttgctaaccagggggaccctccgtggaacttgcgaatggaaggccctccacctaacacatcagtaaaagggatacaaatgtggaaatctgaactctgcatgagaaagacaccatgtgaagttataggtgcacagcgaaggagaagccccagtgcactagccattgaagtatttgaagcacatttgggaagccacattttgcagtccctggatggctttgtatttgcactaaatcaggaaggaaaatttttgtacatttccgaaacagtctccatctacctaggcctctcacaagtggagctgacaggcagcagtgtctttgactatgtccaccccggagatcacgtggagatggctgagcagctgggcatgaagctcccccctgggcggggtctcctgtcacagggcactgctgaggacggagccagctcagcatcttcctcctctcagtcggagacccccgagccagtggagtcaaccagccccagtctgctaaccactgacaacactcttgagcgttcctttttcatccgaatgaaatctactctgaccaaacgcggtgtgcacatcaaatcatcaggatataaggtgattcacataacaggccggctacgcctgagagtgtcgctgtcccacgggaggaccgtccccagccaaatcatgggtctcgtggttgttgcgcatgccttgcctccccctacgatcaatgaagtcagaattgactgccatatgttcgtcactcgagtaaatatggacctcaatatcatttactgtgaaaataggattagtgattatatggatctgacccctgtagatatcgtagggaagagatgctaccacttcatccatgctgaagacgtggagggcatcaggcacagtcacttggacttgctgaataagggtcagtgtgtgacaaagtactatcgctggatgcagaagaacggaggatatatttggatacagtccagtgccaccatagctattaatgccaagaatgcaaatgaaaagaatatcatctgggtgaattaccttcttagcaatcctgagtacaaggacacacccatggacatcgcacagctcccccatctgccggagaaaacttccgaatcctcggagacatccgactctgagtcagactctaaagacacctcaggtattacagaggacaacgagaactccaagtccgacgagaaggggaaccagtccgagaacagcgaagacccggagcccgaccggaagaagtcgggcaacgcgtgtgacaacgacatgaactgcaacgacgacggccacagctccagtaacccggacagccgcgacagcgacgacagcttcgagcactcggactttgagaaccccaaggcgggcgaggacggcttcggtgctctgggcgcgatgcagatcaaggtggagcgctacgtggagagcgagtcggacctgcggctgcagaactgcgagtcactcacgtccgacagcgccaaggactcggacagcgcaggcgaggcgggcgcgcaggcctccagcaagcaccagaagcgcaagaaaaggcggaaacggcaaaagggcggcagcgccagccgccggcgcctgtccagcgcgtcgagcccaggcggcctggacgcgggcctggtggagcccccgcggctgctgtcctcccccaacagtgcctcggtgctcaagatcaagacggagatctcagaacccatcaatttcgacaatgacagcagcatctggaactacccgcccaaccgggagatctccaggaacgagtccccctacagcatgaccaagccccccagctctgagcacttcccgtccccgcagggcggcggcggtgggggtggcggtggcggggggctgcacgtggccattcccgactcggtcctcaccccgcccggcgccgacggcgcggccgcccgcaagactcagttcggcgcctcggccaccgcggccctggcccccgtcgcctccgacccgctgtcacccccgctctcggcgtccccgcgggacaagcaccccgggaacggcggcgggggcgggggcgggggcggcggcgcggggggcggcggccccagcgcgtccaactccttgctgtacactggggacctggaggcgctgcagaggttgcaggcgggcaacgtcgtgctcccgctggtgcacagggtgaccgggaccctggccgccaccagcacggccgcgcagagggtctacaccacgggcaccatccgctacgcgcccgccgaggtgaccctggccatgcagagcaacctgctgcccaacgcgcacgctgttaacttcgtggacgttaacagccccggctttggcctcgaccccaagacgcccatggagatgctctaccaccacgtgcaccggctcaacatgtcaggaccgttcggcggcgcagtgagcgcagctagcctgacgcagatgcccgccggcaacgtgttcaccacggccgagggactcttctccacgctgcccttccccgtctacagcaacggcatccacgcggcacagactctggagcgcaaggaggactagtaatgaactagtccgtaacttgaaagtatttcgatttcttggctttatatatcttgtggaaaggacgactatggatttgggctgtcggagcg

SEQ ID NO: 2114 - DNA, 2807 bp, Homo sapiens
  source 1..2807: mol_type = genomic DNA
accgccaccatggcgcccaccaagcccagctttcagcaggatccttccaggcgagaacgtttacaagcattgagaaaggagaaatcccgagatgctgctcgctcccgccggggaaaagaaaactttgagttctatgaattggccaagttgttgcctcttcctgcagccattaccagccagctcgacaaggcatccatcattcgacttacaattagctatctgaaaatgagggactttgctaaccagggggaccctccgtggaacttgcgaatggaaggccctccacctaacacatcagtaaaaggtgcacagcgaaggagaagccccagtgcactagccattgaagtatttgaagcacatttgggaagccacattttgcagtccctggatggctttgtatttgcactaaatcaggaaggaaaatttttgtacatttccgaaacagtctccatctacctaggcctctcacaagtggagctgacaggcagcagtgtctttgactatgtccaccccggagatcacgtggagatggctgagcagctgggcatgaagctcccccctgggcggggtctcctgtcacagggcactgctgaggacggagccagctcagcatcttcctcctctcagtcggagacccccgagccagtggagtcaaccagccccagtctgctaaccactgacaacactcttgagcgttcctttttcatccgaatgaaatctactctgaccaaacgcggtgtgcacatcaaatcatcaggatataaggtgattcacataacaggccggctacgcctgagagtgtcgctgtcccacgggaggaccgtccccagccaaatcatgggtctcgtggttgttgcgcatgccttgcctccccctacgatcaatgaagtcagaattgactgccatatgttcgtcactcgagtaaatatggacctcaatatcatttactgtgaaaataggattagtgattatatggatctgacccctgtagatatcgtagggaagagatgctaccacttcatccatgctgaagacgtggagggcatcaggcacagtcacttggacttgctgaataagggtcagtgtgtgacaaagtactatcgctggatgcagaagaacggaggatatatttggatacagtccagtgccaccatagctattaatgccaagaatgcaaatgaaaagaatatcatctgggtgaattaccttcttagcaatcctgagtacaaggacacacccatggacatcgcacagctcccccatctgccggagaaaacttccgaatcctcggagacatccgactctgagtcagactctaaagacacctcaggtattacagaggacaacgagaactccaagtccgacgagaaggggaaccagtccgagaacagcgaagacccggagcccgaccggaagaagtcgggcaacgcgtgtgacaacgacatgaactgcaacgacgacggccacagctccagtaacccggacagccgcgacagcgacgacagcttcgagcactcggactttgagaaccccaaggcgggcgaggacggcttcggtgctctgggcgcgatgcagatcaaggtggagcgctacgtggagagcgagtcggacctgcggctgcagaactgcgagtcactcacgtccgacagcgccaaggactcggacagcgcaggcgaggcgggcgcgcaggcctccagcaagcaccagaagcgcaagaaaaggcggaaacggcaaaagggcggcagcgccagccgccggcgcctgtccagcgcgtcgagcccaggcggcctggacgcgggcctggtggagcccccgcggctgctgtcctcccccaacagtgcctcggtgctcaagatcaagacggagatctcagaacccatcaatttcgacaatgacagcagcatctggaactacccgcccaaccgggagatctccaggaacgagtccccctacagcatgaccaagccccccagctctgagcacttcccgtccccgcagggcggcggcggtgggggtggcggtggcggggggctgcacgtggccattcccgactcggtcctcaccccgcccggcgccgacggcgcggccgcccgcaagactcagttcggcgcctcggccaccgcggccctggcccccgtcgcctccgacccgctgtcacccccgctctcggcgtccccgcgggacaagcaccccgggaacggcggcgggggcgggggcgggggcggcggcgcggggggcggcggccccagcgcgtccaactccttgctgtacactggggacctggaggcgctgcagaggttgcaggcgggcaacgtcgtgctcccgctggtgcacagggtgaccgggaccctggccgccaccagcacggccgcgcagagggtctacaccacgggcaccatccgctacgcgcccgccgaggtgaccctggccatgcagagcaacctgctgcccaacgcgcacgctgttaacttcgtggacgttaacagccccggctttggcctcgaccccaagacgcccatggagatgctctaccaccacgtgcaccggctcaacatgtcaggaccgttcggcggcgcagtgagcgcagctagcctgacgcagatgcccgccggcaacgtgttcaccacggccgagggactcttctccacgctgcccttccccgtctacagcaacggcatccacgcggcacagactctggagcgcaaggaggactagtaatgaactagtccgtaacttgaaagtatttcgatttcttggctttatatatcttgtggaaaggacgatatgaggaatgctgtgagcatgag

SEQ ID NO: 2115 - DNA, 2813 bp, Homo sapiens
  source 1..2813: mol_type = genomic DNA
accgccaccatggcgcccaccaagcccagctttcagcaggatccttccaggcgagaacgtttacaagcattgagaaaggagaaatcccgagatgctgctcgctcccgccggggaaaagaaaactttgagttctatgaattggccaagttgttgcctcttcctgcagccattaccagccagctcgacaaggcatccatcattcgacttacaattagctatctgaaaatgagggactttgctaaccagggggaccctccgtggaacttgcgaatggaaggccctccacctaacacatcagtaaaagttataggtgcacagcgaaggagaagccccagtgcactagccattgaagtatttgaagcacatttgggaagccacattttgcagtccctggatggctttgtatttgcactaaatcaggaaggaaaatttttgtacatttccgaaacagtctccatctacctaggcctctcacaagtggagctgacaggcagcagtgtctttgactatgtccaccccggagatcacgtggagatggctgagcagctgggcatgaagctcccccctgggcggggtctcctgtcacagggcactgctgaggacggagccagctcagcatcttcctcctctcagtcggagacccccgagccagtggagtcaaccagccccagtctgctaaccactgacaacactcttgagcgttcctttttcatccgaatgaaatctactctgaccaaacgcggtgtgcacatcaaatcatcaggatataaggtgattcacataacaggccggctacgcctgagagtgtcgctgtcccacgggaggaccgtccccagccaaatcatgggtctcgtggttgttgcgcatgccttgcctccccctacgatcaatgaagtcagaattgactgccatatgttcgtcactcgagtaaatatggacctcaatatcatttactgtgaaaataggattagtgattatatggatctgacccctgtagatatcgtagggaagagatgctaccacttcatccatgctgaagacgtggagggcatcaggcacagtcacttggacttgctgaataagggtcagtgtgtgacaaagtactatcgctggatgcagaagaacggaggatatatttggatacagtccagtgccaccatagctattaatgccaagaatgcaaatgaaaagaatatcatctgggtgaattaccttcttagcaatcctgagtacaaggacacacccatggacatcgcacagctcccccatctgccggagaaaacttccgaatcctcggagacatccgactctgagtcagactctaaagacacctcaggtattacagaggacaacgagaactccaagtccgacgagaaggggaaccagtccgagaacagcgaagacccggagcccgaccggaagaagtcgggcaacgcgtgtgacaacgacatgaactgcaacgacgacggccacagctccagtaacccggacagccgcgacagcgacgacagcttcgagcactcggactttgagaaccccaaggcgggcgaggacggcttcggtgctctgggcgcgatgcagatcaaggtggagcgctacgtggagagcgagtcggacctgcggctgcagaactgcgagtcactcacgtccgacagcgccaaggactcggacagcgcaggcgaggcgggcgcgcaggcctccagcaagcaccagaagcgcaagaaaaggcggaaacggcaaaagggcggcagcgccagccgccggcgcctgtccagcgcgtcgagcccaggcggcctggacgcgggcctggtggagcccccgcggctgctgtcctcccccaacagtgcctcggtgctcaagatcaagacggagatctcagaacccatcaatttcgacaatgacagcagcatctggaactacccgcccaaccgggagatctccaggaacgagtccccctacagcatgaccaagccccccagctctgagcacttcccgtccccgcagggcggcggcggtgggggtggcggtggcggggggctgcacgtggccattcccgactcggtcctcaccccgcccggcgccgacggcgcggccgcccgcaagactcagttcggcgcctcggccaccgcggccctggcccccgtcgcctccgacccgctgtcacccccgctctcggcgtccccgcgggacaagcaccccgggaacggcggcgggggcgggggcgggggcggcggcgcggggggcggcggccccagcgcgtccaactccttgctgtacactggggacctggaggcgctgcagaggttgcaggcgggcaacgtcgtgctcccgctggtgcacagggtgaccgggaccctggccgccaccagcacggccgcgcagagggtctacaccacgggcaccatccgctacgcgcccgccgaggtgaccctggccatgcagagcaacctgctgcccaacgcgcacgctgttaacttcgtggacgttaacagccccggctttggcctcgaccccaagacgcccatggagatgctctaccaccacgtgcaccggctcaacatgtcaggaccgttcggcggcgcagtgagcgcagctagcctgacgcagatgcccgccggcaacgtgttcaccacggccgagggactcttctccacgctgcccttccccgtctacagcaacggcatccacgcggcacagactctggagcgcaaggaggactagtaatgaactagtccgtaacttgaaagtatttcgatttcttggctttatatatcttgtggaaaggacgagttgtcgctaaccaactgcaaggc

SEQ ID NO: 2116 - DNA, 2903 bp, Homo sapiens
  source 1..2903: mol_type = genomic DNA
accgccaccatggcgcccaccaagcccagctttcagcaggatccttccaggcgagaacgaataactgcccagcatcctctgcccaaccaatcagaatgtaggaaaatctacagatatgacggaatctactgtgaatctacctaccagaatttacaagcattgagaaaggagaaatcccgagatgctgctcgctcccgccggggaaaagaaaactttgagttctatgaattggccaagttgttgcctcttcctgcagccattaccagccagctcgacaaggcatccatcattcgacttacaattagctatctgaaaatgagggactttgctaaccagggggaccctccgtggaacttgcgaatggaaggccctccacctaacacatcagtaaaagttataggtgcacagcgaaggagaagccccagtgcactagccattgaagtatttgaagcacatttgggaagccacattttgcagtccctggatggctttgtatttgcactaaatcaggaaggaaaatttttgtacatttccgaaacagtctccatctacctaggcctctcacaagtggagctgacaggcagcagtgtctttgactatgtccaccccggagatcacgtggagatggctgagcagctgggcatgaagctcccccctgggcggggtctcctgtcacagggcactgctgaggacggagccagctcagcatcttcctcctctcagtcggagacccccgagccagtggagtcaaccagccccagtctgctaaccactgacaacactcttgagcgttcctttttcatccgaatgaaatctactctgaccaaacgcggtgtgcacatcaaatcatcaggatataaggtgattcacataacaggccggctacgcctgagagtgtcgctgtcccacgggaggaccgtccccagccaaatcatgggtctcgtggttgttgcgcatgccttgcctccccctacgatcaatgaagtcagaattgactgccatatgttcgtcactcgagtaaatatggacctcaatatcatttactgtgaaaataggattagtgattatatggatctgacccctgtagatatcgtagggaagagatgctaccacttcatccatgctgaagacgtggagggcatcaggcacagtcacttggacttgctgaataagggtcagtgtgtgacaaagtactatcgctggatgcagaagaacggaggatatatttggatacagtccagtgccaccatagctattaatgccaagaatgcaaatgaaaagaatatcatctgggtgaattaccttcttagcaatcctgagtacaaggacacacccatggacatcgcacagctcccccatctgccggagaaaacttccgaatcctcggagacatccgactctgagtcagactctaaagacacctcaggtattacagaggacaacgagaactccaagtccgacgagaaggggaaccagtccgagaacagcgaagacccggagcccgaccggaagaagtcgggcaacgcgtgtgacaacgacatgaactgcaacgacgacggccacagctccagtaacccggacagccgcgacagcgacgacagcttcgagcactcggactttgagaaccccaaggcgggcgaggacggcttcggtgctctgggcgcgatgcagatcaaggtggagcgctacgtggagagcgagtcggacctgcggctgcagaactgcgagtcactcacgtccgacagcgccaaggactcggacagcgcaggcgaggcgggcgcgcaggcctccagcaagcaccagaagcgcaagaaaaggcggaaacggcaaaagggcggcagcgccagccgccggcgcctgtccagcgcgtcgagcccaggcggcctggacgcgggcctggtggagcccccgcggctgctgtcctcccccaacagtgcctcggtgctcaagatcaagacggagatctcagaacccatcaatttcgacaatgacagcagcatctggaactacccgcccaaccgggagatctccaggaacgagtccccctacagcatgaccaagccccccagctctgagcacttcccgtccccgcagggcggcggcggtgggggtggcggtggcggggggctgcacgtggccattcccgactcggtcctcaccccgcccggcgccgacggcgcggccgcccgcaagactcagttcggcgcctcggccaccgcggccctggcccccgtcgcctccgacccgctgtcacccccgctctcggcgtccccgcgggacaagcaccccgggaacggcggcgggggcgggggcgggggcggcggcgcggggggcggcggccccagcgcgtccaactccttgctgtacactggggacctggaggcgctgcagaggttgcaggcgggcaacgtcgtgctcccgctggtgcacagggtgaccgggaccctggccgccaccagcacggccgcgcagagggtctacaccacgggcaccatccgctacgcgcccgccgaggtgaccctggccatgcagagcaacctgctgcccaacgcgcacgctgttaacttcgtggacgttaacagccccggctttggcctcgaccccaagacgcccatggagatgctctaccaccacgtgcaccggctcaacatgtcaggaccgttcggcggcgcagtgagcgcagctagcctgacgcagatgcccgccggcaacgtgttcaccacggccgagggactcttctccacgctgcccttccccgtctacagcaacggcatccacgcggcacagactctggagcgcaaggaggactagtaatgaactagtccgtaacttgaaagtatttcgatttcttggctttatatatcttgtggaaaggacgatacgcctcacatgtgaagatacta

SEQ ID NO: 2117 - DNA, 2576 bp, Homo sapiens
  source 1..2576: mol_type = genomic DNA
accgccaccatggatgaagatgagaaagacagagccaagagagcttctcgaaacaagtctgagaagaagcgtcgggaccagttcaatgttctcatcaaagagctcagttccatgctccctggcaacacgcggaaaatggacaaaaccaccgtgttggaaaaggtcatcggatttttgcagaaacacaatgaagtctcagcgcaaacggaaatctgtgacattcagcaagactggaagccttcattcctcagtaatgaagaattcacccagctgatgttggaggcattagatggcttcattatcgcagtgacaacagacggcagcatcatctatgtctctgacagtatcacgcctctccttgggcatttaccgtcggatgtcatggatcagaatttgttaaatttcctcccagaacaagaacattcagaagtttataaaatcctttcttcccatatgcttgtgacggattccccctccccagaatacttaaaatctgacagcgatttagagttttattgccatcttctcagaggcagcttgaacccaaaggaatttccaacttatgaatacataaaatttgtaggaaattttcgctcttacaacaatgtgcctagcccctcctgtaatggttttgacaacaccctttcaagaccttgccgggtgccactaggaaaggaggtttgcttcattgccaccgttcgtctggcaacaccacaattcttaaaggaaatgtgcatagttgacgaacctttagaggaattcacttcaaggcatagcttggaatggaaatttttatttctggatcacagagcacctccaatcataggatacctgccttttgaagtgctgggaacctcaggctatgactactaccacattgatgacctggagctcctggccaggtgtcaccagcacctgatgcagtttggcaaagggaagtcgtgttgctaccggtttctgaccaaaggtcagcagtggatctggctgcagactcactactacatcacctaccatcagtggaactccaagcccgagttcatcgtgtgcacacactcggtggtcagttacgcagatgtccgggtggaaaggaggcaggagctggctctggaagacccgccatccgaggccctccactcctcagcactaaaggacaagggctcaagcctggaacctcggcagcactttaacacactcgacgtgggtgcctcgggccttaataccagtcattcgccatcggcgtcctcaagaagttcccacaaatcctcgcacacagccatgtcagaacccacctccactcccaccaagctgatggcagaggccagcaccccggctttgccaagatcagccaccctgccccaagagttacctgtccccgggctcagccaggcagccaccatgccggcccctctgccttccccatcgtcctgcgacctcacacagcagctcctgcctcagaccgttctgcagagcacgcccgctcccatggcacagttttcggcacagttcagcatgttccagaccatcaaagaccagctagagcagcggacgcggatcctgcaggccaatatccggtggcaacaggaagagctccacaagatccaggagcagctctgcctggtccaggactccaacgtccagatgttcctgcagcagccagctgtatccctgagcttcagcagcacccagcgacctgaggctcagcagcagctacagcaaaggtcagctgcagtgactcagccccagctcggggcgggcccccaacttccagggcagatctcctctgcccaggtcacaagccagcacctgctcagagaatcaagtgtgatatcaacccagggtccaaagccaatgagaagctcacagctaatgcagagcagcggccgctctggaagcagcctagtgtccccgttcagcagcgccacagctgcgctcccgccaagtctgaatctgaccacacctgcttccacctcccaggatgccagccagtgccagcccagcccagacttcagccatgatcggcagctcaggctgttgctgagccagcccatccagcccatgatgcccgggtcctgtgacgcaaggcagccctcggaagtcagcaggacgggacggcaagtcaagtacgcccagagccagaccgtgtttcaaaatccagacgcacaccccgccaacagcagcagcgccccgatgcccgtcctgctgatggggcaggcggtgctccaccccagcttccctgcctcccaaccatcgcccctgcagcctgcacaggcccggcagcagccaccgcagcactacctgcaggtacaggcaccaacctctttgcacagtgagcagcaggactcgctacttctctccacctactcacaacagccagggaccctgggctacccccaaccacccccagcacagccccagcccctacgtcctccccgaagggtcagcagtctgtctgagtcgtcaggcctccagcagccgccccgatagtaatgaactagtccgtaacttgaaagtatttcgatttcttggctttatatatcttgtggaaaggacgaggactaagagaggttccgatcgaa

SEQ ID NO: 2118 - DNA, 806 bp, Homo sapiens
  source 1..806: mol_type = genomic DNA
accgccaccatgacgggcagcagcgtcttcgactacattcaccctggggaccactcagaggtgctggagcaactggggctgcggacgccgacgcccggccccccaaccccgccctccgtctcctcttcctcctcctcttcctcttcgcttgcagatacccccgagatcgaggccagcctcaccaaggtgcccccctcctccctggtccaggagcgctccttctttgtccgcatgaaatccacgctcaccaagagggggctgcacgtcaaggcctcagggtacaaggtcatccacgtgactgggcgccttcgggcccacgccctgggccttgtggccctcgggcacacgttgcccccggcccccctggctgagctgccactccatggacacatgatcgtcttccgtctcagcctgggtctcaccatccttgcttgtgagagcagagtcagcgaccacatggacctggggccctcagagctggtgggccgcagctgctaccagtttgtccacggacaggacgccacgaggatccgccagagccacgtggactcgtgccgggggcttcgtgtggctgcagtctgtggccacagtggctgggagcgggaagagccccggggagcaccatgtgctttgggtcagccacgtgctcagccaagccgagggtggccaaactcctttggatgccttccagcttccagccagcgtggcctgtagtaatgaactagtccgtaacttgaaagtatttcgatttcttggctttatatatcttgtggaaaggacgaatcacaggttccctcaacatcatg

SEQ ID NO: 2119 - DNA, 3260 bp, Homo sapiens
  source 1..3260: mol_type = genomic DNA
accgccaccatgtcgtccgcggccgagcctccgccacccccgcctcccgagagcgcgccttccaagcccgcagcctcgatcgccagcggcgggagcaacagcagcaacaaaggcggccccgaaggcgtcgcggcgcaggcggttgcgtctgcggccagcgctggtcccgcagacgccgagatggaggaaatatttgatgatgcgtcacctggaaagcaaaaggaaatccaagaaccagatcctacctatgaagaaaaaatgcaaactgaccgggcaaatagattcgagtatttattaaagcagacagaactttttgcacatttcattcaacctgctgctcagaagactccaacttcacctttgaagatgaaaccagggcgcccacgaataaaaaaagatgagaagcagaacttactatccgttggcgattaccgacaccgtagaacagagcaagaggaggatgaagagctattaacagaaagctccaaagcaaccaatgtttgcactcgatttgaagactctccatcgtatgtaaaatggggtaaactgagagattatcaggtccgaggattaaactggctcatttctttgtatgagaatggcatcaatggtatccttgcagatgaaatgggcctaggaaagactcttcaaacaatttctcttcttgggtacatgaaacattatagaaacattcctgggcctcatatggttttggttcctaagtctacattacacaactggatgagtgaattcaagagatgggtaccaacacttagatctgtttgtttgataggagataaagaacaaagagctgcttttgtcagagacgttttattaccgggagaatgggatgtatgtgtaacatcttatgaaatgcttattaaagagaagtctgtgttcaaaaaatttaattggagatacttagtaatagatgaagctcacaggatcaaaaatgaaaaatctaagttgtcagaaatagtgagggaattcaagactacaaatagactattattaactggaacacctcttcagaacaacttgcatgagctgtggtcacttcttaactttctgttgccagatgtgtttaattcagcagatgactttgattcctggtttgatacaaacaactgccttggggatcaaaaactagttgagaggcttcatatggttttgcgtccattcctccttcgtcgaattaaggctgatgttgaaaagagtttgcctccaaagaaggaagtaaaaatctatgtgggcctcagcaaaatgcaaagggaatggtatactcggatattaatgaaggatatagatatactcaactcagcaggcaagatggacaaaatgaggttattgaacatcctaatgcagttgagaaaatgttgtaatcatccatatctctttgatggagcagaacctggtccaccttatacaacagatatgcatctagtaaccaacagtggcaaaatggtggttttagacaagctgctccctaagttaaaagaacaaggttcacgagtactaatcttcagtcaaatgacaagggtattggacattttggaagattattgcatgtggagaaattatgagtactgcaggttggatggtcagacaccccatgatgagagacaagactccatcaatgcatacaatgaaccaaacagcacaaagtttgttttcatgttaagcacgcgtgctggtggtcttggcatcaatcttgcgactgctgatgtagtaattttgtatgattctgattggaatccccaagtagatcttcaggctatggaccgagcacatagaattgggcagactaagacagtcagagtgttccgctttataactgataacactgtagaagaaagaatagtagaacgtgctgagatgaaactcagactggattcaatagtcattcaacaagggaggcttgtggatcagaatctgaacaaaattgggaaagatgaaatgcttcaaatgattagacatggagcaacacatgtgtttgcttcaaaggaaagtgagatcactgatgaagatatcgatggtattttggaaagaggtgcaaagaagactgcagagatgaatgaaaagctctccaagatgggcgaaagttcacttagaaactttacaatggatacagagtcaagtgtttataacttcgaaggagaagactatagagaaaaacaaaagattgcattcacagagtggattgaaccacctaaacgagaaagaaaagccaactatgccgttgatgcatatttcagggaagctcttcgtgttagtgaacctaaagcacccaaggctcctcgacctccaaaacaacccaatgttcaggatttccagttctttcctccacgtttatttgaattactggaaaaagaaattctgttttacagaaaaactattgggtacaaggtacctcgaaatcctgagctgcctaatgcagcacaggcacaaaaagaagaacagcttaaaattgatgaagctgaatcccttaatgatgaagagttagaggaaaaagagaagcttctaacacagggatttaccaattggaataagagagattttaaccagtttatcaaagctaatgagaagtggggtcgtgatgatattgaaaatatagcaagagaagtagaaggcaaaactccagaagaagtcattgaatattcagctgtgttttgggaaaggtgcaacgagctccaggacatagagaagattatggctcagattgaaaggggagaggcgagaattcaaagaagaataagcatcaagaaagcacttgacacaaagattggacggtacaaagcaccttttcatcagctgagaatatcatatggtactaacaaaggaaaaaactatactgaagaagaagatcgttttctgatttgtatgcttcacaaacttggatttgacaaagaaaatgtttatgatgaattgcgacagtgtattcgcaactctcctcagttcagatttgactggtttcttaagtccagaactgcaatggagctccagaggagatgtaataccttaattactttgattgaaagagaaaacatggaactagaagaaaaggagaaggcagagaaaaagaaacgaggaccaaagccttcaacacagaaacgtaaaatggatggcgcacctgatggtcgaggaagaaaaaagaagctgaaactatagtaatgaactagtccgtaacttgaaagtatttcgatttcttggctttatatatcttgtggaaaggacgagaggtaatacgttcaatacatagg

SEQ ID NO: 2120 - DNA, 827 bp, Homo sapiens
  source 1..827: mol_type = genomic DNA
accgccaccatggaggccgctgcggacggcccggctgagacccaaagcccggtggaaaaagacagcccggcgaagacccaaagcccagcccaagacacctcaatcatgtcgagaaataacgcagatacaggcagagttcttgccttaccagagcacaagaagaagcgcaagggaaacttgccagccgagtccgttaagatcctccgcgactggatgtataagcatcggtttaaggcctacccttcagaagaagagaagcaaatgctgtcagagaagaccaatttgtctttgttgcagatttctaactggtttatcaatgctcgcagacgcattctcccggatatgcttcaacagcgtagaaacgaccccatcattggccacaaaacgggcaaagatgcccatgccacccacctgcagagcaccgaggcgtctgtgccggccaagtcagggcccagtggtccagacaatgtacaaagcctgcccctgtggcccttgccaaagggccagatgtcaagagagaagcaaccagatccggagtcggcccctagccagaagctcaccggaatagcccagccgaagaaaaaggtcaaggtttctgtcacatccccgtcttctccagaacttgtgtctccagaggagcacgccgacttcagcagcttcctgctgctagtcgatgcagcagtacaaagggctgccgagctggagctagagaagaagcaagagcctaatccatagtaatgaactagtccgtaacttgaaagtatttcgatttcttggctttatatatcttgtggaaaggacgatgtactctagcatactcgtgccat

SEQ ID NO: 2121 - DNA, 2579 bp, Homo sapiens
  source 1..2579: mol_type = genomic DNA
accgccaccatgttggatatttgcttggaaaaacgtgtgggtacgaccttggctgcccccaagtgtaactccagcactgtgaggtttcagggattggcagaggggaccaaggggaccatgaaaatggacatggaggatgcggatatgactctgtggacagaggctgagtttgaagagaagtgtacatacattgtgaacgaccacccctgggattctggtgctgatggcggtacttcggttcaggcggaggcatccttaccaaggaatctgcttttcaagtatgccaccaacagtgaagaggttattggagtgatgagtaaagaatacataccaaagggcacacgttttggacccctaataggtgaaatctacaccaatgacacagttcctaagaacgccaacaggaaatatttttggaggatctattccagaggggagcttcaccacttcattgacggctttaatgaagagaaaagcaactggatgcgctatgtgaatccagcacactctccccgggagcaaaacctggctgcgtgtcagaacgggatgaacatctacttctacaccattaagcccatccctgccaaccaggaacttcttgtgtggtattgtcgggactttgcagaaaggcttcactacccttatcccggagagctgacaatgatgaatctcacacaaacacagagcagtctaaagcaaccgagcactgagaaaaatgaactctgcccaaagaatgtcccaaagagagagtacagcgtgaaagaaatcctaaaattggactccaacccctccaaaggaaaggacctctaccgttctaacatttcacccctcacatcagaaaaggacctcgatgactttagaagacgtgggagccccgaaatgcccttctaccctcgggtcgtttaccccatccgggcccctctgccagaagactttttgaaagcttccctggcctacgggatcgagagacccacgtacatcactcgctcccccattccatcctccaccactccaagcccctctgcaagaagcagccccgaccaaagcctcaagagctccagccctcacagcagccctgggaatacggtgtcccctgtgggccccggctctcaagagcaccgggactcctacgcttacttgaacgcgtcctacggcacggaaggtttgggctcctaccctggctacgcacccctgccccacctcccgccagctttcatcccctcgtacaacgctcactaccccaagttcctcttgcccccctacggcatgaattgtaatggcctgagcgctgtgagcagcatgaatggcatcaacaactttggcctcttcccgaggctgtgccctgtctacagcaatctcctcggtgggggcagcctgccccaccccatgctcaaccccacttctctcccgagctcgctgccctcagatggagcccggaggttgctccagccggagcatcccagggaggtgcttgtcccggcgccccacagtgccttctcctttaccggggccgccgccagcatgaaggacaaggcctgtagccccacaagcgggtctcccacggcgggaacagccgccacggcagaacatgtggtgcagcccaaagctacctcagcagcgatggcagcccccagcagcgacgaagccatgaatctcattaaaaacaaaagaaacatgaccggctacaagacccttccctacccgctgaagaagcagaacggcaagatcaagtacgaatgcaacgtttgcgccaagactttcggccagctctccaatctgaaggtccacctgagagtgcacagtggagaacggcctttcaaatgtcagacttgcaacaagggctttactcagctcgcccacctgcagaaacactacctggtacacacgggagaaaagccacatgaatgccaggtctgccacaagagatttagcagcaccagcaatctcaagacccacctgcgactccattctggagagaaaccataccaatgcaaggtgtgccctgccaagttcacccagtttgtgcacctgaaactgcacaagcgtctgcacacccgggagcggccccacaagtgctcccagtgccacaagaactacatccatctctgtagcctcaaggttcacctgaaagggaactgcgctgcggccccggcgcctgggctgcccttggaagatctgacccgaatcaatgaagaaatcgagaagtttgacatcagtgacaatgctgaccggctcgaggacgtggaggatgacatcagtgtgatctctgtagtggagaaggaaattctggccgtggtcagaaaagagaaagaagaaactggcctgaaagtgtctttgcaaagaaacatggggaatggactcctctcctcagggtgcagcctttatgagtcatcagatctacccctcatgaagttgcctcccagcaacccactacctctggtacctgtaaaggtcaaacaagaaacagttgaaccaatggatccttagtaatgaactagtccgtaacttgaaagtatttcgatttcttggctttatatatcttgtggaaaggacgattgagtgtctgtttggcttctcct

SEQ ID NO: 2122 - DNA, 2471 bp, Homo sapiens
  source 1..2471: mol_type = genomic DNA
accgccaccatgaaaatggacatggaggatgcggatatgactctgtggacagaggctgagtttgaagagaagtgtacatacattgtgaacgaccacccctgggattctggtgctgatggcggtacttcggttcaggcggaggcatccttaccaaggaatctgcttttcaagtatgccaccaacagtgaagaggttattggagtgatgagtaaagaatacataccaaagggcacacgttttggacccctaataggtgaaatctacaccaatgacacagttcctaagaacgccaacaggaaatatttttggaggatctattccagaggggagcttcaccacttcattgacggctttaatgaagagaaaagcaactggatgcgctatgtgaatccagcacactctccccgggagcaaaacctggctgcgtgtcagaacgggatgaacatctacttctacaccattaagcccatccctgccaaccaggaacttcttgtgtggtattgtcgggactttgcagaaaggcttcactacccttatcccggagagctgacaatgatgaatctcacacaaacacagagcagtctaaagcaaccgagcactgagaaaaatgaactctgcccaaagaatgtcccaaagagagagtacagcgtgaaagaaatcctaaaattggactccaacccctccaaaggaaaggacctctaccgttctaacatttcacccctcacatcagaaaaggacctcgatgactttagaagacgtgggagccccgaaatgcccttctaccctcgggtcgtttaccccatccgggcccctctgccagaagactttttgaaagcttccctggcctacgggatcgagagacccacgtacatcactcgctcccccattccatcctccaccactccaagcccctctgcaagaagcagccccgaccaaagcctcaagagctccagccctcacagcagccctgggaatacggtgtcccctgtgggccccggctctcaagagcaccgggactcctacgcttacttgaacgcgtcctacggcacggaaggtttgggctcctaccctggctacgcacccctgccccacctcccgccagctttcatcccctcgtacaacgctcactaccccaagttcctcttgcccccctacggcatgaattgtaatggcctgagcgctgtgagcagcatgaatggcatcaacaactttggcctcttcccgaggctgtgccctgtctacagcaatctcctcggtgggggcagcctgccccaccccatgctcaaccccacttctctcccgagctcgctgccctcagatggagcccggaggttgctccagccggagcatcccagggaggtgcttgtcccggcgccccacagtgccttctcctttaccggggccgccgccagcatgaaggacaaggcctgtagccccacaagcgggtctcccacggcgggaacagccgccacggcagaacatgtggtgcagcccaaagctacctcagcagcgatggcagcccccagcagcgacgaagccatgaatctcattaaaaacaaaagaaacatgaccggctacaagacccttccctacccgctgaagaagcagaacggcaagatcaagtacgaatgcaacgtttgcgccaagactttcggccagctctccaatctgaaggtccacctgagagtgcacagtggagaacggcctttcaaatgtcagacttgcaacaagggctttactcagctcgcccacctgcagaaacactacctggtacacacgggagaaaagccacatgaatgccaggtctgccacaagagatttagcagcaccagcaatctcaagacccacctgcgactccattctggagagaaaccataccaatgcaaggtgtgccctgccaagttcacccagtttgtgcacctgaaactgcacaagcgtctgcacacccgggagcggccccacaagtgctcccagtgccacaagaactacatccatctctgtagcctcaaggttcacctgaaagggaactgcgctgcggccccggcgcctgggctgcccttggaagatctgacccgaatcaatgaagaaatcgagaagtttgacatcagtgacaatgctgaccggctcgaggacgtggaggatgacatcagtgtgatctctgtagtggagaaggaaattctggccgtggtcagaaaagagaaagaagaaactggcctgaaagtgtctttgcaaagaaacatggggaatggactcctctcctcagggtgcagcctttatgagtcatcagatctacccctcatgaagttgcctcccagcaacccactacctctggtacctgtaaaggtcaaacaagaaacagttgaaccaatggatccttagtaatgaactagtccgtaacttgaaagtatttcgatttcttggctttatatatcttgtggaaaggacgaccaggaacctgtcaggctaattcg

SEQ ID NO: 2123 - DNA, 902 bp, Homo sapiens
  source 1..902: mol_type = genomic DNA
accgccaccatgggcagcaaaaccttgccggcgccggtgcctatccacccttccctgcagctcaccaactactccttccttcaggcagtgaacggcctgcccacagtgccttcggaccatctgcccaacctgtatggtttcagcgcgttgcacgctgtgcacctgcatcagtggacgctgggctacccggccatgcacttgccgcgctcttctttctccaaagtgccgggcacggtgtccagcttggtggatgcgcgcttccagctgcccgcctttccctggttccctcatgtcattcaacccaagcccgagatcaccgctggaggcagcgttccagcgctcaagaccaagccgcgctttgattttgccaacctggccttggcagcaacgcaagaagatccggccaagctcggtcgcggggagggcccaggctcccctgcaggtgggctgggtgccctcctcgacgtgaccaagctgtctccagaaaagaagcccacaaggggacgtctgccttccaagaccaagaaggaattcgtctgcaagttctgtggccgccacttcaccaagtcctacaacctacttatccatgagcggacgcacaccgacgagcggccctacacctgtgacatctgccacaaagccttccggaggcaagaccacctgcgagaccacagatatattcactccaaagagaagcccttcaagtgtcaagagtgtgggaaaggattctgccagtccaggactctcgctgtccacaagacgctacactcacaggtgaaggagctcaaaacctccaagatcaaatgctagtaatgaactagtccgtaacttgaaagtatttcgatttcttggctttatatatcttgtggaaaggacgaattgtagttattaattcggcgggt

SEQ ID NO: 2124 - DNA, 1403 bp, Homo sapiens
  source 1..1403: mol_type = genomic DNA
accgccaccatggggctgagggcagaggaaggaaaaagaaaacctccgaggtcagtgcggggcgaggtgagcccctcccagggccctctggcccaggaggatgaagcgcgccggcttcgctcttgcacgccggcttgccatccgggtaagcgcgggaaaggcggccacagggcgcggcggcagcgcagcgcgtgggatctcacgacccatccgttaacccaccgttcccaggagctccgaggcgcagcggcgacagagggctttctctacgtgctgttgtctcactgggtttttgtcggagccccacgccctccggcctctgattcctggaagaaagggttggtcccctcagcacccccagcatcccggaaaatggggagcaaggctctgccagcgcccatcccgctccacccgtcgctgcagctcaccaattactccttcctgcaggccgtgaacaccttcccggccacggtggaccacctgcagggcctgtacggtctcagcgcggtacagaccatgcacatgaaccactggacgctggggtatcccaatgtgcacgagatcacccgctccaccatcacggagatggcggcggcgcagggcctcgtggacgcgcgcttccccttcccggccctgccttttaccacccacctattccaccccaagcagggggccattgcccacgtcctcccagccctgcacaaggaccggccccgttttgactttgccaatttggcggtggctgccacgcaagaggatccgcctaagatgggagacctgagcaagctgagcccaggactgggtagccccatctcgggcctcagtaaattgactccggacagaaagccctctcgaggaaggttgccctccaaaacgaaaaaagagtttatctgcaagttttgcggcagacactttaccaaatcctacaatttgctcatccatgagaggacccacacggacgagaggccgtacacgtgtgacatctgccacaaggccttccggaggcaagatcacctgcgggatcacagatacatccattccaaagaaaaacccttcaaatgtcaggagtgtgggaaaggattttgtcagtctagaactctagcagttcacaaaactttacacatgcaggaatctccacacaaatgtcccacatgtggaagaacctttaatcagagaagtaatctgaaaactcaccttctcacccatacagacatcaagccctacagctgcgagcagtgcggcaaagtgttcaggcgaaactgtgatctgcggcggcacagcctgactcacaccccgcggcaggacttctagtaatgaactagtccgtaacttgaaagtatttcgatttcttggctttatatatcttgtggaaaggacgacgtcgagccatgggacagataggt

SEQ ID NO: 2125 - DNA, 1040 bp, Homo sapiens
  source 1..1040: mol_type = genomic DNA
accgccaccatggggagcaaggctctgccagcgcccatcccgctccacccgtcgctgcagctcaccaattactccttcctgcaggccgtgaacaccttcccggccacggtggaccacctgcagggcctgtacggtctcagcgcggtacagaccatgcacatgaaccactggacgctggggtatcccaatgtgcacgagatcacccgctccaccatcacggagatggcggcggcgcagggcctcgtggacgcgcgcttccccttcccggccctgccttttaccacccacctattccaccccaagcagggggccattgcccacgtcctcccagccctgcacaaggaccggccccgttttgactttgccaatttggcggtggctgccacgcaagaggatccgcctaagatgggagacctgagcaagctgagcccaggactgggtagccccatctcgggcctcagtaaattgactccggacagaaagccctctcgaggaaggttgccctccaaaacgaaaaaagagtttatctgcaagttttgcggcagacactttaccaaatcctacaatttgctcatccatgagaggacccacacggacgagaggccgtacacgtgtgacatctgccacaaggccttccggaggcaagatcacctgcgggatcacagatacatccattccaaagaaaaacccttcaaatgtcaggagtgtgggaaaggattttgtcagtctagaactctagcagttcacaaaactttacacatgcaggaatctccacacaaatgtcccacatgtggaagaacctttaatcagagaagtaatctgaaaactcaccttctcacccatacagacatcaagccctacagctgcgagcagtgcggcaaagtgttcaggcgaaactgtgatctgcggcggcacagcctgactcacaccccgcggcaggacttctagtaatgaactagtccgtaacttgaaagtatttcgatttcttggctttatatatcttgtggaaaggacgagcatacgttcatccttatcgctat

SEQ ID NO: 2126 - DNA, 5885 bp, Homo sapiens
  source 1..5885: mol_type = genomic DNA
accgccaccatgcctggggagcagatggaccctactggaagtcagttggattcagatttctctcagcaagatactccttgcctgataattgaagattctcagcctgaaagccaggttctagaggatgattctggttctcacttcagtatgctatctcgacaccttcctaatctccagacgcacaaagaaaatcctgtgttggatgttgtgtccaatcctgaacaaacagctggagaagaacgaggagacggtaatagtgggttcaatgaacatttgaaagaaaacaaggttgcagaccctgtggattcttctaacttggacacatgtggttccatcagtcaggtcattgagcagttacctcagccaaacaggacaagcagtgttctgggaatgtcagtggaatctgctcctgctgtggaggaagagaagggagaagagttggaacagaaggagaaagagaaggaagaagatacttcaggcaatactacacattcccttggtgctgaagatactgcctcatcacagttgggttttggggttctggaactctcccagagccaggatgttgaggaaaatactgtgccatatgaagtggacaaagagcagctacaatcagtaaccaccaactctggttataccaggctgtctgatgtggatgctaatactgcaattaagcatgaagaacagtccaacgaagatatccccatagcagaacagtccagcaaggacatccctgtgacagcacagcccagtaaggatgtacatgttgtaaaagagcaaaatccaccacctgcaaggtcagaggacatgccttttagccccaaagcatctgttgctgctatggaagcaaaagaacagttgtctgcacaagaacttatggaaagtggactgcagattcagaagtcaccagagcctgaggttttgtcaactcaggaagacttgtttgaccagagcaataaaacagtatcttctgatggttgctctactccttcaagggaggaaggtgggtgttctttggcttccactcctgccaccactctgcatctcctgcagctctctggtcagaggtcccttgttcaggacagtctttccacgaattcttcagatcttgttgctccttctcctgatgctttccgatctactccttttatcgttcctagcagtcccacagagcaagaagggagacaagataagccaatggacacgtcagtgttatctgaagaaggaggagagccttttcagaagaaacttcaaagtggtgaaccagtggagttagaaaacccccctctcctgcctgagtccactgtatcaccacaagcctcaacaccaatatctcagagcacaccagtcttccctcctgggtcacttcctatcccatcccagcctcagttttctcatgacatttttattccttccccaagtctggaagaacaatcaaatgatgggaagaaagatggagatatgcatagttcatctttgacagttgagtgttctaaaacttcagagattgaaccaaagaattcccctgaggatcttgggctatctttgacaggggattcttgcaagttgatgctttctacaagtgaatatagtcagtccccaaagatggagagcttgagttctcacagaattgatgaagatggagaaaacacacagattgaggatacggaacccatgtctccagttctcaattctaaatttgttcctgctgaaaatgatagtatcctgatgaatccagcacaggatggtgaagtacaactgagtcagaatgatgacaaaacaaagggagatgatacagacaccagggatgacattagtattttagccactggttgcaagggcagagaagaaacggtagcagaagatgtttgtattgatctcacttgtgattcggggagtcaggcagttccgtcaccagctactcgatctgaggcactttctagtgtgttagatcaggaggaagctatggaaattaaagaacaccatccagaggaggggtcttcagggtctgaggtggaagaaatccctgagacaccttgtgaaagtcaaggagaggaactcaaagaagaaaatatggagagtgttccgttgcacctttctctgactgaaactcagtcccaagggttgtgtcttcaaaaggaaatgccaaaaaaagaatgctcagaagctatggaagttgaaaccagtgtgattagtattgattcccctcaaaagttggcaatacttgaccaagaattggaacataaggaacaggaagcttgggaagaagctacttcagaggactccagtgttgtcattgtagatgtgaaagagccatctcccagagttgatgtttcttgtgaacctttggagggagtggagaagtgctcagattcccagtcatgggaggatattgctccagaaatagaaccatgtgctgagaatagattagacaccaaggaagaaaagagtgtagaatatgaaggagatctgaaatcagggactgcagaaacagaacctgtagagcaagattcttcacagccttccttacctttagtgagagcagatgatcctttaagacttgaccaggagttgcagcagccccaaactcaggagaaaacaagtaattcattaacagaagactcaaaaatggctaatgcaaagcagctaagctcagatgcagaggcccagaagctggggaagccctctgcccatgcctcacaaagcttctgtgaaagttctagtgaaaccccatttcatttcactttgcctaaagaaggtgatatcatcccaccattgactggtgcaaccccacctcttattgggcacctaaaattggagcccaagagacacagtactcctattggtattagcaactatccagaaagcaccatagcaaccagtgatgtcatgtctgaaagcatggtggagacccatgatcccatacttgggagtggaaaaggggattctggggctgccccagacgtggatgataaattatgtctaagaatgaaactggttagtcctgagactgaggcgagtgaagagtctttgcagttcaacctggaaaagcctgcaactggtgaaagaaaaaatggatctactgctgttgctgagtctgttgccagtccccagaagaccatgtctgtgttgagctgtatctgtgaagccaggcaagagaatgaggctcgaagtgaggatccccccaccacacccatcagggggaacttgctccactttccaagttctcaaggagaagaggagaaagaaaaattggagggtgaccatacaatcaggcagagtcaacagcctatgaagcccattagtcctgtcaaggaccctgtttctcctgcttcccagaagatggtcatacaagggccatccagtcctcaaggagaggcaatggtgacagatgtgctagaagaccagaaagaaggacggagtactaataaggaaaatcctagtaaggccttgattgaaaggcccagccaaaataacataggaatccaaaccatggagtgttccttgagggtcccagaaactgtttcagcagcaacccagactataaagaatgtgtgtgagcaggggaccagtacagtggaccagaactttggaaagcaagatgccacagttcagactgagagggggagtggtgagaaaccagtcagtgctcctggggatgatacagagtcgctccatagccagggagaagaagagtttgatatgcctcagcctccacatggccatgtcttacatcgtcacatgagaacaatccgggaagtacgcacacttgtcactcgtgtcattacagatgtgtattatgtggatggaacagaagtagaaagaaaagtaactgaggagactgaagagccaattgtagagtgtcaggagtgtgaaactgaagtttccccttcacagactgggggctcctcaggtgacctgggggatatcagctccttctcctccaaggcatccagcttacaccgcacatcaagtgggacaagtctctcagctatgcacagcagtggaagctcagggaaaggagccggaccactcagagggaaaaccagcgggacagaacccgcagattttgccttacccagctcccgaggaggcccaggaaaactgagagaaacagctgtgcctggccccttgggcatagaggacatttcacctaacttgtcaccagatgataaatccttcagccgtgtcgtgccccgagtgccagactccaccagacgaacagatgtgggtgctggtgctttgcgtcgtagtgactctccagaaattcctttccaggctgctgctggcccttctgatggcttagatgcctcctctccaggaaatagctttgtagggctccgtgttgtagccaagtggtcatccaatggctacttttactctgggaaaatcacacgagatgtcggagctgggaagtataaattgctctttgatgatgggtacgaatgtgatgtgttgggcaaagacattctgttatgtgaccccatcccgctggacactgaagtgacggccctctcggaggatgagtatttcagtgcaggagtggtgaaaggacataggaaggagtctggggaactgtactacagcattgaaaaagaaggccaaagaaagtggtataagcgaatggctgtcatcctgtccttggagcaaggaaacagactgagagagcagtatgggcttggcccctatgaagcagtaacacctcttacaaaggcagcagatatcagcttagacaatttggtggaagggaagcggaaacggcgcagtaacgtcagctccccagccacccctactgcctccagtagcagcagcacaacccctacccgaaagatcacagaaagtcctcgtgcctccatgggagttctctcaggcaaaagaaaacttatcacttctgaagaggaacggtcccctgccaagcgaggtcgcaagtctgccacagtaaaacctggtgcagtaggggcaggagagtttgtgagcccctgtgagagtggagacaacaccggtgaaccctctgccctggaagagcagagagggcctttgcctctcaacaagaccttgtttctgggctacgcatttctccttaccatggccacaaccagtgacaagttggccagccgctccaaactgccagatggtcctacaggaagcagtgaagaagaggaggaatttttggaaattcctcctttcaacaagcagtatacagaatcccagcttcgagcaggagctggctatatccttgaagatttcaatgaagcccagtgtaacacagcttaccagtgtcttctaattgcggatcagcattgtcgaacccggaagtacttcctgtgccttgccagtgggattccttgtgtgtctcatgtctgggtccatgatagttgccatgccaaccagctccagaactaccgtaattatctgttgccagctgggtacagccttgaggagcaaagaattctggactggcaaccccgtgaaaatcctttccagaatctgaaggtactcttggtatcagaccaacagcagaacttcctggagctctggtctgagatcctcatgactggtggtgcagcctctgtgaagcagcaccattcaagtgcccataacaaagatattgctttaggggtatttgatgtggtggtgacggacccctcatgcccagcctcggtgctgaagtgtgctgaagcattgcagctgcctgtggtgtcacaagagtgggtgatccagtgcctcattgttggggagagaattggattcaagcagcatccaaaatataaacacgattatgtttctcactagtaatgaactagtccgtaacttgaaagtatttcgatttcttggctttatatatcttgtggaaaggacgaggctttggttaatatcaacccggc

SEQ ID NO: 2127 - DNA, 6029 bp, Homo sapiens
  source 1..6029: mol_type = genomic DNA
accgccaccatgcctggggagcagatggaccctactggaagtcagttggattcagatttctctcagcaagatactccttgcctgataattgaagattctcagcctgaaagccaggttctagaggatgattctggttctcacttcagtatgctatctcgacaccttcctaatctccagacgcacaaagaaaatcctgtgttggatgttgtgtccaatcctgaacaaacagctggagaagaacgaggagacggtaatagtgggttcaatgaacatttgaaagaaaacaaggttgcagaccctgtggattcttctaacttggacacatgtggttccatcagtcaggtcattgagcagttacctcagccaaacaggacaagcagtgttctgggaatgtcagtggaatctgctcctgctgtggaggaagagaagggagaagagttggaacagaaggagaaagagaaggaagaagatacttcaggcaatactacacattcccttggtgctgaagatactgcctcatcacagttgggttttggggttctggaactctcccagagccaggatgttgaggaaaatactgtgccatatgaagtggacaaagagcagctacaatcagtaaccaccaactctggttataccaggctgtctgatgtggatgctaatactgcaattaagcatgaagaacagtccaacgaagatatccccatagcagaacagtccagcaaggacatccctgtgacagcacagcccagtaaggatgtacatgttgtaaaagagcaaaatccaccacctgcaaggtcagaggacatgccttttagccccaaagcatctgttgctgctatggaagcaaaagaacagttgtctgcacaagaacttatggaaagtggactgcagattcagaagtcaccagagcctgaggttttgtcaactcaggaagacttgtttgaccagagcaataaaacagtatcttctgatggttgctctactccttcaagggaggaaggtgggtgttctttggcttccactcctgccaccactctgcatctcctgcagctctctggtcagaggtcccttgttcaggacagtctttccacgaattcttcagatcttgttgctccttctcctgatgctttccgatctactccttttatcgttcctagcagtcccacagagcaagaagggagacaagataagccaatggacacgtcagtgttatctgaagaaggaggagagccttttcagaagaaacttcaaagtggtgaaccagtggagttagaaaacccccctctcctgcctgagtccactgtatcaccacaagcctcaacaccaatatctcagagcacaccagtcttccctcctgggtcacttcctatcccatcccagcctcagttttctcatgacatttttattccttccccaagtctggaagaacaatcaaatgatgggaagaaagatggagatatgcatagttcatctttgacagttgagtgttctaaaacttcagagattgaaccaaagaattcccctgaggatcttgggctatctttgacaggggattcttgcaagttgatgctttctacaagtgaatatagtcagtccccaaagatggagagcttgagttctcacagaattgatgaagatggagaaaacacacagattgaggatacggaacccatgtctccagttctcaattctaaatttgttcctgctgaaaatgatagtatcctgatgaatccagcacaggatggtgaagtacaactgagtcagaatgatgacaaaacaaagggagatgatacagacaccagggatgacattagtattttagccactggttgcaagggcagagaagaaacggtagcagaagatgtttgtattgatctcacttgtgattcggggagtcaggcagttccgtcaccagctactcgatctgaggcactttctagtgtgttagatcaggaggaagctatggaaattaaagaacaccatccagaggaggggtcttcagggtctgaggtggaagaaatccctgagacaccttgtgaaagtcaaggagaggaactcaaagaagaaaatatggagagtgttccgttgcacctttctctgactgaaactcagtcccaagggttgtgtcttcaaaaggaaatgccaaaaaaagaatgctcagaagctatggaagttgaaaccagtgtgattagtattgattcccctcaaaagttggcaatacttgaccaagaattggaacataaggaacaggaagcttgggaagaagctacttcagaggactccagtgttgtcattgtagatgtgaaagagccatctcccagagttgatgtttcttgtgaacctttggagggagtggagaagtgctcagattcccagtcatgggaggatattgctccagaaatagaaccatgtgctgagaatagattagacaccaaggaagaaaagagtgtagaatatgaaggagatctgaaatcagggactgcagaaacagaacctgtagagcaagattcttcacagccttccttacctttagtgagagcagatgatcctttaagacttgaccaggagttgcagcagccccaaactcaggagaaaacaagtaattcattaacagaagactcaaaaatggctaatgcaaagcagctaagctcagatgcagaggcccagaagctggggaagccctctgcccatgcctcacaaagcttctgtgaaagttctagtgaaaccccatttcatttcactttgcctaaagaaggtgatatcatcccaccattgactggtgcaaccccacctcttattgggcacctaaaattggagcccaagagacacagtactcctattggtattagcaactatccagaaagcaccatagcaaccagtgatgtcatgtctgaaagcatggtggagacccatgatcccatacttgggagtggaaaaggggattctggggctgccccagacgtggatgataaattatgtctaagaatgaaactggttagtcctgagactgaggcgagtgaagagtctttgcagttcaacctggaaaagcctgcaactggtgaaagaaaaaatggatctactgctgttgctgagtctgttgccagtccccagaagaccatgtctgtgttgagctgtatctgtgaagccaggcaagagaatgaggctcgaagtgaggatccccccaccacacccatcagggggaacttgctccactttccaagttctcaaggagaagaggagaaagaaaaattggagggtgaccatacaatcaggcagagtcaacagcctatgaagcccattagtcctgtcaaggaccctgtttctcctgcttcccagaagatggtcatacaagggccatccagtcctcaaggagaggcaatggtgacagatgtgctagaagaccagaaagaaggacggagtactaataaggaaaatcctagtaaggccttgattgaaaggcccagccaaaataacataggaatccaaaccatggagtgttccttgagggtcccagaaactgtttcagcagcaacccagactataaagaatgtgtgtgagcaggggaccagtacagtggaccagaactttggaaagcaagatgccacagttcagactgagagggggagtggtgagaaaccagtcagtgctcctggggatgatacagagtcgctccatagccagggagaagaagagtttgatatgcctcagcctccacatggccatgtcttacatcgtcacatgagaacaatccgggaagtacgcacacttgtcactcgtgtcattacagatgtgtattatgtggatggaacagaagtagaaagaaaagtaactgaggagactgaagagccaattgtagagtgtcaggagtgtgaaactgaagtttccccttcacagactgggggctcctcaggtgacctgggggatatcagctccttctcctccaaggcatccagcttacaccgcacatcaagtgggacaagtctctcagctatgcacagcagtggaagctcagggaaaggagccggaccactcagagggaaaaccagcgggacagaacccgcagattttgccttacccagctcccgaggaggcccaggaaaactgagtcctagaaaaggggtcagtcagacagggacgccagtgtgtgaggaggatggtgatgcaggccttggcatcagacagggagggaaggctccagtcacgcctcgtgggcgtgggcgaaggggccgcccaccttctcggaccactggaaccagagaaacagctgtgcctggccccttgggcatagaggacatttcacctaacttgtcaccagatgataaatccttcagccgtgtcgtgccccgagtgccagactccaccagacgaacagatgtgggtgctggtgctttgcgtcgtagtgactctccagaaattcctttccaggctgctgctggcccttctgatggcttagatgcctcctctccaggaaatagctttgtagggctccgtgttgtagccaagtggtcatccaatggctacttttactctgggaaaatcacacgagatgtcggagctgggaagtataaattgctctttgatgatgggtacgaatgtgatgtgttgggcaaagacattctgttatgtgaccccatcccgctggacactgaagtgacggccctctcggaggatgagtatttcagtgcaggagtggtgaaaggacataggaaggagtctggggaactgtactacagcattgaaaaagaaggccaaagaaagtggtataagcgaatggctgtcatcctgtccttggagcaaggaaacagactgagagagcagtatgggcttggcccctatgaagcagtaacacctcttacaaaggcagcagatatcagcttagacaatttggtggaagggaagcggaaacggcgcagtaacgtcagctccccagccacccctactgcctccagtagcagcagcacaacccctacccgaaagatcacagaaagtcctcgtgcctccatgggagttctctcaggcaaaagaaaacttatcacttctgaagaggaacggtcccctgccaagcgaggtcgcaagtctgccacagtaaaacctgtaggggcaggagagtttgtgagcccctgtgagagtggagacaacaccggtgaaccctctgccctggaagagcagagagggcctttgcctctcaacaagaccttgtttctgggctacgcatttctccttaccatggccacaaccagtgacaagttggccagccgctccaaactgccagatggtcctacaggaagcagtgaagaagaggaggaatttttggaaattcctcctttcaacaagcagtatacagaatcccagcttcgagcaggagctggctatatccttgaagatttcaatgaagcccagtgtaacacagcttaccagtgtcttctaattgcggatcagcattgtcgaacccggaagtacttcctgtgccttgccagtgggattccttgtgtgtctcatgtctgggtccatgatagttgccatgccaaccagctccagaactaccgtaattatctgttgccagctgggtacagccttgaggagcaaagaattctggactggcaaccccgtgaaaatcctttccagaatctgaaggtactcttggtatcagaccaacagcagaacttcctggagctctggtctgagatcctcatgactggtggtgcagcctctgtgaagcagcaccattcaagtgcccataacaaagatattgctttaggggtatttgatgtggtggtgacggacccctcatgcccagcctcggtgctgaagtgtgctgaagcattgcagctgcctgtggtgtcacaagagtgggtgatccagtgcctcattgttggggagagaattggattcaagcagcatccaaaatataaacacgattatgtttctcactagtaatgaactagtccgtaacttgaaagtatttcgatttcttggctttatatatcttgtggaaaggacgatggacatcgggcggacggttgcac

SEQ ID NO: 2128 - DNA, 6020 bp, Homo sapiens
  source 1..6020: mol_type = genomic DNA
accgccaccatggaccctactggaagtcagttggattcagatttctctcagcaagatactccttgcctgataattgaagattctcagcctgaaagccaggttctagaggatgattctggttctcacttcagtatgctatctcgacaccttcctaatctccagacgcacaaagaaaatcctgtgttggatgttgtgtccaatcctgaacaaacagctggagaagaacgaggagacggtaatagtgggttcaatgaacatttgaaagaaaacaaggttgcagaccctgtggattcttctaacttggacacatgtggttccatcagtcaggtcattgagcagttacctcagccaaacaggacaagcagtgttctgggaatgtcagtggaatctgctcctgctgtggaggaagagaagggagaagagttggaacagaaggagaaagagaaggaagaagatacttcaggcaatactacacattcccttggtgctgaagatactgcctcatcacagttgggttttggggttctggaactctcccagagccaggatgttgaggaaaatactgtgccatatgaagtggacaaagagcagctacaatcagtaaccaccaactctggttataccaggctgtctgatgtggatgctaatactgcaattaagcatgaagaacagtccaacgaagatatccccatagcagaacagtccagcaaggacatccctgtgacagcacagcccagtaaggatgtacatgttgtaaaagagcaaaatccaccacctgcaaggtcagaggacatgccttttagccccaaagcatctgttgctgctatggaagcaaaagaacagttgtctgcacaagaacttatggaaagtggactgcagattcagaagtcaccagagcctgaggttttgtcaactcaggaagacttgtttgaccagagcaataaaacagtatcttctgatggttgctctactccttcaagggaggaaggtgggtgttctttggcttccactcctgccaccactctgcatctcctgcagctctctggtcagaggtcccttgttcaggacagtctttccacgaattcttcagatcttgttgctccttctcctgatgctttccgatctactccttttatcgttcctagcagtcccacagagcaagaagggagacaagataagccaatggacacgtcagtgttatctgaagaaggaggagagccttttcagaagaaacttcaaagtggtgaaccagtggagttagaaaacccccctctcctgcctgagtccactgtatcaccacaagcctcaacaccaatatctcagagcacaccagtcttccctcctgggtcacttcctatcccatcccagcctcagttttctcatgacatttttattccttccccaagtctggaagaacaatcaaatgatgggaagaaagatggagatatgcatagttcatctttgacagttgagtgttctaaaacttcagagattgaaccaaagaattcccctgaggatcttgggctatctttgacaggggattcttgcaagttgatgctttctacaagtgaatatagtcagtccccaaagatggagagcttgagttctcacagaattgatgaagatggagaaaacacacagattgaggatacggaacccatgtctccagttctcaattctaaatttgttcctgctgaaaatgatagtatcctgatgaatccagcacaggatggtgaagtacaactgagtcagaatgatgacaaaacaaagggagatgatacagacaccagggatgacattagtattttagccactggttgcaagggcagagaagaaacggtagcagaagatgtttgtattgatctcacttgtgattcggggagtcaggcagttccgtcaccagctactcgatctgaggcactttctagtgtgttagatcaggaggaagctatggaaattaaagaacaccatccagaggaggggtcttcagggtctgaggtggaagaaatccctgagacaccttgtgaaagtcaaggagaggaactcaaagaagaaaatatggagagtgttccgttgcacctttctctgactgaaactcagtcccaagggttgtgtcttcaaaaggaaatgccaaaaaaagaatgctcagaagctatggaagttgaaaccagtgtgattagtattgattcccctcaaaagttggcaatacttgaccaagaattggaacataaggaacaggaagcttgggaagaagctacttcagaggactccagtgttgtcattgtagatgtgaaagagccatctcccagagttgatgtttcttgtgaacctttggagggagtggagaagtgctcagattcccagtcatgggaggatattgctccagaaatagaaccatgtgctgagaatagattagacaccaaggaagaaaagagtgtagaatatgaaggagatctgaaatcagggactgcagaaacagaacctgtagagcaagattcttcacagccttccttacctttagtgagagcagatgatcctttaagacttgaccaggagttgcagcagccccaaactcaggagaaaacaagtaattcattaacagaagactcaaaaatggctaatgcaaagcagctaagctcagatgcagaggcccagaagctggggaagccctctgcccatgcctcacaaagcttctgtgaaagttctagtgaaaccccatttcatttcactttgcctaaagaaggtgatatcatcccaccattgactggtgcaaccccacctcttattgggcacctaaaattggagcccaagagacacagtactcctattggtattagcaactatccagaaagcaccatagcaaccagtgatgtcatgtctgaaagcatggtggagacccatgatcccatacttgggagtggaaaaggggattctggggctgccccagacgtggatgataaattatgtctaagaatgaaactggttagtcctgagactgaggcgagtgaagagtctttgcagttcaacctggaaaagcctgcaactggtgaaagaaaaaatggatctactgctgttgctgagtctgttgccagtccccagaagaccatgtctgtgttgagctgtatctgtgaagccaggcaagagaatgaggctcgaagtgaggatccccccaccacacccatcagggggaacttgctccactttccaagttctcaaggagaagaggagaaagaaaaattggagggtgaccatacaatcaggcagagtcaacagcctatgaagcccattagtcctgtcaaggaccctgtttctcctgcttcccagaagatggtcatacaagggccatccagtcctcaaggagaggcaatggtgacagatgtgctagaagaccagaaagaaggacggagtactaataaggaaaatcctagtaaggccttgattgaaaggcccagccaaaataacataggaatccaaaccatggagtgttccttgagggtcccagaaactgtttcagcagcaacccagactataaagaatgtgtgtgagcaggggaccagtacagtggaccagaactttggaaagcaagatgccacagttcagactgagagggggagtggtgagaaaccagtcagtgctcctggggatgatacagagtcgctccatagccagggagaagaagagtttgatatgcctcagcctccacatggccatgtcttacatcgtcacatgagaacaatccgggaagtacgcacacttgtcactcgtgtcattacagatgtgtattatgtggatggaacagaagtagaaagaaaagtaactgaggagactgaagagccaattgtagagtgtcaggagtgtgaaactgaagtttccccttcacagactgggggctcctcaggtgacctgggggatatcagctccttctcctccaaggcatccagcttacaccgcacatcaagtgggacaagtctctcagctatgcacagcagtggaagctcagggaaaggagccggaccactcagagggaaaaccagcgggacagaacccgcagattttgccttacccagctcccgaggaggcccaggaaaactgagtcctagaaaaggggtcagtcagacagggacgccagtgtgtgaggaggatggtgatgcaggccttggcatcagacagggagggaaggctccagtcacgcctcgtgggcgtgggcgaaggggccgcccaccttctcggaccactggaaccagagaaacagctgtgcctggccccttgggcatagaggacatttcacctaacttgtcaccagatgataaatccttcagccgtgtcgtgccccgagtgccagactccaccagacgaacagatgtgggtgctggtgctttgcgtcgtagtgactctccagaaattcctttccaggctgctgctggcccttctgatggcttagatgcctcctctccaggaaatagctttgtagggctccgtgttgtagccaagtggtcatccaatggctacttttactctgggaaaatcacacgagatgtcggagctgggaagtataaattgctctttgatgatgggtacgaatgtgatgtgttgggcaaagacattctgttatgtgaccccatcccgctggacactgaagtgacggccctctcggaggatgagtatttcagtgcaggagtggtgaaaggacataggaaggagtctggggaactgtactacagcattgaaaaagaaggccaaagaaagtggtataagcgaatggctgtcatcctgtccttggagcaaggaaacagactgagagagcagtatgggcttggcccctatgaagcagtaacacctcttacaaaggcagcagatatcagcttagacaatttggtggaagggaagcggaaacggcgcagtaacgtcagctccccagccacccctactgcctccagtagcagcagcacaacccctacccgaaagatcacagaaagtcctcgtgcctccatgggagttctctcaggcaaaagaaaacttatcacttctgaagaggaacggtcccctgccaagcgaggtcgcaagtctgccacagtaaaacctggtgcagtaggggcaggagagtttgtgagcccctgtgagagtggagacaacaccggtgaaccctctgccctggaagagcagagagggcctttgcctctcaacaagaccttgtttctgggctacgcatttctccttaccatggccacaaccagtgacaagttggccagccgctccaaactgccagatggtcctacaggaagcagtgaagaagaggaggaatttttggaaattcctcctttcaacaagcagtatacagaatcccagcttcgagcaggagctggctatatccttgaagatttcaatgaagcccagtgtaacacagcttaccagtgtcttctaattgcggatcagcattgtcgaacccggaagtacttcctgtgccttgccagtgggattccttgtgtgtctcatgtctgggtccatgatagttgccatgccaaccagctccagaactaccgtaattatctgttgccagctgggtacagccttgaggagcaaagaattctggactggcaaccccgtgaaaatcctttccagaatctgaaggtactcttggtatcagaccaacagcagaacttcctggagctctggtctgagatcctcatgactggtggtgcagcctctgtgaagcagcaccattcaagtgcccataacaaagatattgctttaggggtatttgatgtggtggtgacggacccctcatgcccagcctcggtgctgaagtgtgctgaagcattgcagctgcctgtggtgtcacaagagtgggtgatccagtgcctcattgttggggagagaattggattcaagcagcatccaaaatataaacacgattatgtttctcactagtaatgaactagtccgtaacttgaaagtatttcgatttcttggctttatatatcttgtggaaaggacgattacttcgtgcacctacagcgcat

SEQ ID NO: 2129 - DNA, 6035 bp, Homo sapiens
  source 1..6035: mol_type = genomic DNA
accgccaccatgcctggggagcagatggaccctactggaagtcagttggattcagatttctctcagcaagatactccttgcctgataattgaagattctcagcctgaaagccaggttctagaggatgattctggttctcacttcagtatgctatctcgacaccttcctaatctccagacgcacaaagaaaatcctgtgttggatgttgtgtccaatcctgaacaaacagctggagaagaacgaggagacggtaatagtgggttcaatgaacatttgaaagaaaacaaggttgcagaccctgtggattcttctaacttggacacatgtggttccatcagtcaggtcattgagcagttacctcagccaaacaggacaagcagtgttctgggaatgtcagtggaatctgctcctgctgtggaggaagagaagggagaagagttggaacagaaggagaaagagaaggaagaagatacttcaggcaatactacacattcccttggtgctgaagatactgcctcatcacagttgggttttggggttctggaactctcccagagccaggatgttgaggaaaatactgtgccatatgaagtggacaaagagcagctacaatcagtaaccaccaactctggttataccaggctgtctgatgtggatgctaatactgcaattaagcatgaagaacagtccaacgaagatatccccatagcagaacagtccagcaaggacatccctgtgacagcacagcccagtaaggatgtacatgttgtaaaagagcaaaatccaccacctgcaaggtcagaggacatgccttttagccccaaagcatctgttgctgctatggaagcaaaagaacagttgtctgcacaagaacttatggaaagtggactgcagattcagaagtcaccagagcctgaggttttgtcaactcaggaagacttgtttgaccagagcaataaaacagtatcttctgatggttgctctactccttcaagggaggaaggtgggtgttctttggcttccactcctgccaccactctgcatctcctgcagctctctggtcagaggtcccttgttcaggacagtctttccacgaattcttcagatcttgttgctccttctcctgatgctttccgatctactccttttatcgttcctagcagtcccacagagcaagaagggagacaagataagccaatggacacgtcagtgttatctgaagaaggaggagagccttttcagaagaaacttcaaagtggtgaaccagtggagttagaaaacccccctctcctgcctgagtccactgtatcaccacaagcctcaacaccaatatctcagagcacaccagtcttccctcctgggtcacttcctatcccatcccagcctcagttttctcatgacatttttattccttccccaagtctggaagaacaatcaaatgatgggaagaaagatggagatatgcatagttcatctttgacagttgagtgttctaaaacttcagagattgaaccaaagaattcccctgaggatcttgggctatctttgacaggggattcttgcaagttgatgctttctacaagtgaatatagtcagtccccaaagatggagagcttgagttctcacagaattgatgaagatggagaaaacacacagattgaggatacggaacccatgtctccagttctcaattctaaatttgttcctgctgaaaatgatagtatcctgatgaatccagcacaggatggtgaagtacaactgagtcagaatgatgacaaaacaaagggagatgatacagacaccagggatgacattagtattttagccactggttgcaagggcagagaagaaacggtagcagaagatgtttgtattgatctcacttgtgattcggggagtcaggcagttccgtcaccagctactcgatctgaggcactttctagtgtgttagatcaggaggaagctatggaaattaaagaacaccatccagaggaggggtcttcagggtctgaggtggaagaaatccctgagacaccttgtgaaagtcaaggagaggaactcaaagaagaaaatatggagagtgttccgttgcacctttctctgactgaaactcagtcccaagggttgtgtcttcaaaaggaaatgccaaaaaaagaatgctcagaagctatggaagttgaaaccagtgtgattagtattgattcccctcaaaagttggcaatacttgaccaagaattggaacataaggaacaggaagcttgggaagaagctacttcagaggactccagtgttgtcattgtagatgtgaaagagccatctcccagagttgatgtttcttgtgaacctttggagggagtggagaagtgctcagattcccagtcatgggaggatattgctccagaaatagaaccatgtgctgagaatagattagacaccaaggaagaaaagagtgtagaatatgaaggagatctgaaatcagggactgcagaaacagaacctgtagagcaagattcttcacagccttccttacctttagtgagagcagatgatcctttaagacttgaccaggagttgcagcagccccaaactcaggagaaaacaagtaattcattaacagaagactcaaaaatggctaatgcaaagcagctaagctcagatgcagaggcccagaagctggggaagccctctgcccatgcctcacaaagcttctgtgaaagttctagtgaaaccccatttcatttcactttgcctaaagaaggtgatatcatcccaccattgactggtgcaaccccacctcttattgggcacctaaaattggagcccaagagacacagtactcctattggtattagcaactatccagaaagcaccatagcaaccagtgatgtcatgtctgaaagcatggtggagacccatgatcccatacttgggagtggaaaaggggattctggggctgccccagacgtggatgataaattatgtctaagaatgaaactggttagtcctgagactgaggcgagtgaagagtctttgcagttcaacctggaaaagcctgcaactggtgaaagaaaaaatggatctactgctgttgctgagtctgttgccagtccccagaagaccatgtctgtgttgagctgtatctgtgaagccaggcaagagaatgaggctcgaagtgaggatccccccaccacacccatcagggggaacttgctccactttccaagttctcaaggagaagaggagaaagaaaaattggagggtgaccatacaatcaggcagagtcaacagcctatgaagcccattagtcctgtcaaggaccctgtttctcctgcttcccagaagatggtcatacaagggccatccagtcctcaaggagaggcaatggtgacagatgtgctagaagaccagaaagaaggacggagtactaataaggaaaatcctagtaaggccttgattgaaaggcccagccaaaataacataggaatccaaaccatggagtgttccttgagggtcccagaaactgtttcagcagcaacccagactataaagaatgtgtgtgagcaggggaccagtacagtggaccagaactttggaaagcaagatgccacagttcagactgagagggggagtggtgagaaaccagtcagtgctcctggggatgatacagagtcgctccatagccagggagaagaagagtttgatatgcctcagcctccacatggccatgtcttacatcgtcacatgagaacaatccgggaagtacgcacacttgtcactcgtgtcattacagatgtgtattatgtggatggaacagaagtagaaagaaaagtaactgaggagactgaagagccaattgtagagtgtcaggagtgtgaaactgaagtttccccttcacagactgggggctcctcaggtgacctgggggatatcagctccttctcctccaaggcatccagcttacaccgcacatcaagtgggacaagtctctcagctatgcacagcagtggaagctcagggaaaggagccggaccactcagagggaaaaccagcgggacagaacccgcagattttgccttacccagctcccgaggaggcccaggaaaactgagtcctagaaaaggggtcagtcagacagggacgccagtgtgtgaggaggatggtgatgcaggccttggcatcagacagggagggaaggctccagtcacgcctcgtgggcgtgggcgaaggggccgcccaccttctcggaccactggaaccagagaaacagctgtgcctggccccttgggcatagaggacatttcacctaacttgtcaccagatgataaatccttcagccgtgtcgtgccccgagtgccagactccaccagacgaacagatgtgggtgctggtgctttgcgtcgtagtgactctccagaaattcctttccaggctgctgctggcccttctgatggcttagatgcctcctctccaggaaatagctttgtagggctccgtgttgtagccaagtggtcatccaatggctacttttactctgggaaaatcacacgagatgtcggagctgggaagtataaattgctctttgatgatgggtacgaatgtgatgtgttgggcaaagacattctgttatgtgaccccatcccgctggacactgaagtgacggccctctcggaggatgagtatttcagtgcaggagtggtgaaaggacataggaaggagtctggggaactgtactacagcattgaaaaagaaggccaaagaaagtggtataagcgaatggctgtcatcctgtccttggagcaaggaaacagactgagagagcagtatgggcttggcccctatgaagcagtaacacctcttacaaaggcagcagatatcagcttagacaatttggtggaagggaagcggaaacggcgcagtaacgtcagctccccagccacccctactgcctccagtagcagcagcacaacccctacccgaaagatcacagaaagtcctcgtgcctccatgggagttctctcaggcaaaagaaaacttatcacttctgaagaggaacggtcccctgccaagcgaggtcgcaagtctgccacagtaaaacctggtgcagtaggggcaggagagtttgtgagcccctgtgagagtggagacaacaccggtgaaccctctgccctggaagagcagagagggcctttgcctctcaacaagaccttgtttctgggctacgcatttctccttaccatggccacaaccagtgacaagttggccagccgctccaaactgccagatggtcctacaggaagcagtgaagaagaggaggaatttttggaaattcctcctttcaacaagcagtatacagaatcccagcttcgagcaggagctggctatatccttgaagatttcaatgaagcccagtgtaacacagcttaccagtgtcttctaattgcggatcagcattgtcgaacccggaagtacttcctgtgccttgccagtgggattccttgtgtgtctcatgtctgggtccatgatagttgccatgccaaccagctccagaactaccgtaattatctgttgccagctgggtacagccttgaggagcaaagaattctggactggcaaccccgtgaaaatcctttccagaatctgaaggtactcttggtatcagaccaacagcagaacttcctggagctctggtctgagatcctcatgactggtggtgcagcctctgtgaagcagcaccattcaagtgcccataacaaagatattgctttaggggtatttgatgtggtggtgacggacccctcatgcccagcctcggtgctgaagtgtgctgaagcattgcagctgcctgtggtgtcacaagagtgggtgatccagtgcctcattgttggggagagaattggattcaagcagcatccaaaatataaacacgattatgtttctcactagtaatgaactagtccgtaacttgaaagtatttcgatttcttggctttatatatcttgtggaaaggacgaatttgttcgtctagacgttgatag

SEQ ID NO: 2130 - DNA, 3506 bp, Homo sapiens
  source 1..3506: mol_type = genomic DNA
accgccaccatgcggttcgggtccaagatgatgccgatgtttcttaccgtgtatctcagtaacaatgagcagcacttcacagaagttccagttactccagaaacaatatgcagagacgtggtggatctgtgcaaagaacccggcgagagtgattgccatttggctgaagtgtggtgtggctctgaacgtccagttgcggataatgagcgaatgtttgatgttcttcaacgatttggaagtcagaggaacgaagttcgcttcttccttcgtcatgaacgcccccctggcagggacattgtgagtggaccaagatctcaggatccaagtttaaaaagaaatggtgtaaaagttcctggtgaatatcgaagaaaggagaacggtgttaatagtcctaggatggatctgactcttgctgaacttcaggaaatggcatctcgccagcagcaacagattgaagcccagcaacaattgctggcaactaaggaacagcgcttaaagtttttgaaacaacaagatcagcgacaacagcaacaagttgctgagcaggagaaacttaaaaggctaaaagaaatagctgagaatcaggaagctaagctaaaaaaagtgagagcacttaaaggccacgtggaacagaagagactaagcaatgggaaacttgtggaggaaattgaacagatgaataatttgttccagcaaaaacagagggagctcgtcctggctgtgtcaaaagtagaagaactgaccaggcagctagagatgctcaagaacggcaggatcgacagccaccatgacaatcagtctgcagtggctgagcttgatcgcctctataaggagctgcagctaagaaacaaattgaatcaagagcagaatgccaagctacaacaacagagggagtgtttgaataagcgtaattcagaagtggcagtcatggataagcgtgttaatgagctgagggaccggctgtggaagaagaaggcagctctacagcaaaaagaaaatctaccagtttcatctgatggaaatcttccccagcaagccgcgtcagccccaagccgtgtggctgcagtaggtccctatatccagtcgtctactatgcctcggatgccctcaaggcctgaattgctggtgaagccagccctgccggatggttccttggtcattcaggcttcagaggggccgatgaaaatacagacactgcccaacatgagatctggggctgcttcacaaactaaaggctctaaaatccatccagttggccctgattggagtccttcaaatgcagatcttttcccaagccaaggctctgcttctgtacctcaaagcactgggaatgctctggatcaagttgatgatggagaggttccgctgagggagaaagagaagaaagtgcgtccgttctcaatgtttgatgcagtagaccagtccaatgccccaccttcctttggtactctgaggaagaaccagagcagtgaagatatcttgcgggatgctcaggttgcaaataaaaatgtggctaaagtaccacctcctgttcctacaaaaccaaaacagattaatttgccttattttggacaaactaatcagccaccttcagacattaagccagacggaagttctcagcagttgtcaacagttgttccgtccatgggaactaaaccaaaaccagcagggcagcagccgagagtgctgctatctcccagcataccttcggttggccaagaccagaccctttctccaggttctaagcaagaaagtccacctgctgctgccgtccggccctttactccccagccttccaaagacaccttacttccacccttcagaaaaccccagaccgtggcagcaagttcaatatattccatgtatacgcaacagcaggcgccaggaaaaaacttccagcaggctgtgcagagcgcgttgaccaagactcataccagagggccacacttttcaagtgtatatggtaagcctgtaattgctgctgcccagaatcaacagcagcacccagagaacatttattccaatagccagggcaagcctggcagtccagaacctgaaacagagcctgtttcttcagttcaggagaaccatgaaaacgaaagaattcctcggccactcagcccaactaaattactgcctttcttatctaatccttaccgaaaccagagtgatgctgacctagaagccttacgaaagaaactgtctaacgcaccaaggcctctaaagaaacgtagttctattacagagccagagggtcctaatgggccaaatattcagaagcttttatatcagaggaccaccatagcggccatggagaccatctctgtcccatcatacccatccaagtcagcttctgtgactgccagctcagaaagcccagtagaaatccagaatccatatttacatgtggagcccgaaaaggaggtggtctctctggttcctgaatcattgtccccagaggatgtggggaatgccagtacagagaacagtgacatgccagctccttctccaggccttgattatgagcctgagggagtcccagacaacagcccaaatctccagaataacccagaagaaccaaatccagaggctccacatgtgcttgatgtgtacctggaggagtaccctccatacccacccccaccatacccatctggggagcctgaagggcccggagaagactcggtgagcatgcgcccgcctgaaatcaccgggcaggtctctctgcctcctggtaaaaggacaaacttgcgtaaaactggctcagagcgtatcgctcatggaatgagggtgaaattcaacccccttgctttactgctagattcgtctttggagggagaatttgaccttgtacagagaattatttatgaggttgatgacccaagcctccccaatgatgaaggcatcacggctcttcacaatgctgtgtgtgcaggccacacagaaatcgttaagttcctggtacagtttggtgtaaatgtaaatgctgctgatagtgatggatggactccattacattgtgctgcctcatgtaacaacgtccaagtgtgtaagtttttggtggagtcaggagccgctgtgtttgccatgacctacagtgacatgcagactgctgcagataagtgcgaggaaatggaggaaggctacactcagtgctcccaatttctttatggagttcaggagaagatgggcataatgaataaaggagtcatttatgcgctttgggattatgaacctcagaatgatgatgagctgcccatgaaagaaggagactgcatgacaatcatccacagggaagacgaagatgaaatcgaatggtggtgggcgcgccttaatgataaggagggatatgttccacgtaacttgctgggactgtacccaagaattaaaccaagacaaaggagcttggcctagtaatgaactagtccgtaacttgaaagtatttcgatttcttggctttatatatcttgtggaaaggacgattcgatgaaggagcgccgatatgc

SEQ ID NO: 2131 - DNA, 3374 bp, Homo sapiens
  source 1..3374: mol_type = genomic DNA
accgccaccatgaacatggagggtctggtgatgttccaagatttaagcatcgactttagccaagaagagtgggagtgtttagatgccgcacaaaaagatttatatcgcgatgttatgatggagaactatagctctttagtgtctttaggtttaagcatcccgaagccggatgttatttctttattagagcaaggtaaggagccgtggatggttagtcgcgacgttttaggtggctggtgccgcgatagcgaattccgctgcaaaaccaaggatagttgtttaccgaaagagatctacgaagtgaccagcagtcagtgggtgcgcatggaaaaatgccacagtctggtgggcagcagcgttcgcgatgattgggagtgcaaaggccagttccagcaccaagacattaatcaagaacgttatttagagaaagccattatgacatatgagaccaccccgaccttctgtttacagacctctttaaccttgcatcatcgcatccatccgggtgagaaactgtataaaagtacagagtgtatggcatttaaatatggtagcgagttaacccagcagcaagaaacccatactggtgaaaagctgtataagtgcaaggaatgcggcaaagcctttcaccatttcagctatttagtgaagcaccaacgcattcacaccggtgagaagccgtgcgcttgtaaggaatacggcaaagcttttatcagcggcagtcatttaattcagcaccagaaaatgtacaccgacgaacgccctcatgaatgccaagaaagcgtgaaagcatttcgtccgagcgcccatttaatccaacactggcgcatccatactggcgataagccgtacgaatgtaaggaatgcggcaagtctttcactagcggcagcaccttaaaccagcatcaacaaattcacaccggtgagaaaccctaccattgtaagcagtgtggcaaatctttcacagttggtagcacattaattcgtcaccaacagatccacaccggcgaaaagccttatgactgcaaagaatgcggcaagagttttgccagcggttctgctttaatccgccaccagcgcattcatactggtgagaagccttatgactgtaaagaatgtggcaagtccttcacctttcacagcgctttaatccgccatcaacgcatccataccggcgaaaagccctatgactgcaaggagtgtggcaaatcttttacctttcgtagcggtttaattggccaccaagctatccatactggcgaaaagccttacgactgtaaagagtgtggtaaaagctttaccgccggctctaccttgatccagcaccagcgtatccacaccggtgagaagccttacgattgtaaagagtgtggtaagtccttcgcctctggtagcgcattactgcaacaccaacgcattcacactggtgagaaaccgtattgctgtaaggaatgtggcaagtcttttaccttccgtagcacccgtaaccgtcatcagcgcattcacaccggcgaaaaaccctacaattgtaaggagtgtggcaaaagctttgcaagcggcagcgcactgttgcagcatcagcgtattcacaccggcgagaaaccgtatcactgcaaagaatgtggcaagtcttttacttttcgcagtggtttaatcggccatcaagctgttcataccggcgagaagccttatgattgcaaggaatgcggtaagtcttttactagtcgcagtgctttaattcaacaccagcgtattcacaccggcgagaagccttaccactgtaaagagtgtggcaagagcttcacagtgggcagtactttactgcagcaccaacaaatccataccggcgaaaaaccctatgactgcaaagaatgtggcaaagcttttcgcttacgcttacgtttaactcagcatcagcaaattcataccggcgaaaaaccttaccaatgccaagaatgcggcaaggccttcgttagcgttagtggtttaacacaacatcaccgtatccataccggcgagaagccgtacgagtgtccggattgtggcaaagctttccgccagcgtacatatctgaatcaacaccgtcgtattcacactggtgagaaaccctatgagtgcaaagaatgtggtaaaagttttacattctgtagtggcttaattcaacatcaacagaatcataccgacgaaaagccctacgacggcaaggaatgcggcaagtcttttaccagccatagcactttgatccaacatcaacagatccatactggtgaaaagccctacgattgtaaagagtgcggcaaatcttttacaagtcacagtacactgattcaacatcaacaaatccacaccggtgaaaaactgtatgattgcaaggaatgcggcaaatcttttaccagccacagcaccttaattcagcatcagcctctgcatactggcgagaagccctaccattgtaaggagtgtggtaagtccttcactttacgcagtgctttaattcaacaccgtccggttcacactggtgagaaacgctacagctgtaaagaatgtggcaaatcctttaccagccgcagcacactgattgaacatcaacgtattcatactggtgagaaaccttatcattgtaaagagtgcggtaaatctttcgccttccgcagcgccatcattcagcaccgccgcatccataccggcgagaagccttacgactgcaaggaatgcggtaaggctttccgccgtcgtagcaagctgacacagcatcaacgtatccacactggcgaaaagccctatcgttgtcacgaatgcggtaaagcattcgtgcgctttagcggcttaaccaagcatcatagcattcacactggtgagaagccctacgagtgcaaaacttgtggtaaaagtttccgtcagcgcacccatctgacactgcaccaacgcatccacaccggtgatcgcccgtatgagtgtaaggagtgcggcaaatctttcacttgtggcagcgaactgattcgtcaccagcgtacacacactggtgaaaaaccctacgactgcaaggaatgcggtaaggcatttcgttgcccgagtcagctgagtcagcataaacgtattcatactggtgaaaagacctatcaatgtccggagtgtggtaaagccttcttttatgcaagcggtctgagccgccaccagagtgttcacaccggcgaaaagccttacgagtgtaaaacttgtggtaaggccttcaagcagctgacccagctgacacgccaccaacgcattcatgacttaacctagtaatgaactagtccgtaacttgaaagtatttcgatttcttggctttatatatcttgtggaaaggacgaggttggctatatgtttgtgctttg

SEQ ID NO: 2132 - DNA, 3278 bp, Homo sapiens
  source 1..3278: mol_type = genomic DNA
accgccaccatgaacatggagggtttagttatgtttcaagatttaagcatcgatttcagccaagaagaatgggagtgtttagatgccgcccagaaggatctgtatcgcgacgtgatgatggagaattacagctctttagtttctttagacagtgagttccgctgtaaaaccaaagacagttgtttaccgaaagaaatctatgaggttaccagcagccaatgggtgcgtatggagaaatgccatagtctggtgggcagcagtgttcgtgatgattgggagtgcaaaggccagttccaacatcaagatattaatcaagagcgctacttagagaaggccatcatgacctacgagaccaccccgacattttgcttacagacaagtttaaccttacatcatcgcatccatccgggtgagaagctgtataaaagtaccgagtgtatggccttcaagtacggtagcgagctgacccagcagcaagaaacccatactggtgaaaagctgtacaagtgcaaggagtgcggcaaagcctttcatcatttcagctatttagttaaacatcagcgtatccacaccggcgagaaaccgtgcgcttgtaaagagtatggcaaggcctttatcagcggtagccatttaatccagcaccagaagatgtacaccgatgaacgtccgcatgaatgccaagaaagtgtcaaggccttccgcccgagcgcccacttaattcaacactggcgtattcataccggtgataaaccctatgagtgtaaagagtgcggcaagagtttcaccagcggcagcaccttaaatcagcaccagcaaatccacactggcgaaaagccgtaccattgcaagcaatgtggtaagtctttcaccgtgggttctactttaattcgtcatcaacagatccacaccggcgagaaaccttacgattgtaaagaatgtggtaagagcttcgcaagtggtagcgccttaatccgtcatcaacgtatccataccggcgaaaaaccttatgactgtaaggaatgtggcaagagctttacctttcatagcgcactgattcgtcaccaacgcatccacaccggtgagaagccttatgactgtaaggagtgtggtaagagcttcacctttcgcagcggcttaatcggtcatcaagctattcacaccggtgaaaagccctacgattgcaaggagtgtggtaagagttttacagctggtagcactttaattcaacaccaacgcatccatactggcgaaaagccttatgactgcaaagaatgcggcaagagctttgccagcggtagcgctttattacaacaccaacgcattcacactggcgaaaagccttattgttgcaaggaatgtggtaaatcttttacattccgtagcacccgcaatcgccaccaacgtatccacactggtgagaagccgtacaattgtaaggagtgcggcaagagcttcgccagtggtagcgcattactgcaacaccagcgcattcataccggcgaaaaaccttatcactgcaaggagtgtggtaaatcctttacctttcgtagcggtttaatcggccaccaagctgttcatactggtgaaaagccttacgactgcaaagaatgtggtaagtcttttaccagccgctctgctttaatccagcaccaacgcattcataccggcgaaaaaccctaccattgcaaagaatgtggcaaatccttcaccgttggtagtactttactgcagcatcagcagattcataccggtgagaaaccctatgattgcaaagagtgcggcaaggcttttcgcttacgtttacgtttaacccaacatcagcaaattcacactggtgagaaaccgtaccaatgtcaagaatgtggtaaagcatttgtgagcgttagtggtttaacacagcaccatcgtatccacactggtgagaagccctacgagtgccccgattgcggtaaggctttccgccagcgcacctatttaaatcaacatcgtcgtatccacactggtgagaagccttacgagtgcaaagaatgtggcaagtcttttaccttctgcagtggcttaatccaacaccaacagaaccacaccgacgagaagccctatgatggtaaagaatgtggcaagagcttcacaagccacagcactttaattcaacatcaacaaatccacactggtgagaagccctacgactgcaaggagtgcggcaaatccttcaccagccatagtacactgattcaacaccaacaaatccatactggcgagaaactgtatgattgcaaagaatgtggtaagtctttcaccagtcattctactttgattcagcaccagcctttacatactggtgagaaaccttaccattgcaaagagtgcggcaagtcctttaccttacgcagcgctctgatccaacaccgcccggtgcacactggtgaaaaacgctattcttgtaaagaatgtggcaaatcttttacttctcgcagtactctgattgagcaccagcgcatccacactggtgagaaaccgtatcattgtaaggagtgtggtaagagtttcgccttccgcagtgcaattatccagcaccgccgtatccacactggcgagaaaccctacgattgtaaagaatgcggtaaagcattccgtcgccgtagcaaactgactcagcatcaacgcatccacactggtgagaaaccttaccgttgccatgagtgcggcaaagcttttgtgcgcttcagcggtctgacaaaacaccatagcatccataccggcgagaaaccctatgaatgcaagacttgtggtaaaagttttcgccagcgtacacacttaactttacatcaacgtattcacactggcgatcgtccttacgagtgtaaggaatgcggcaagtccttcacttgcggtagtgagctgatccgccatcagcgcacacacaccggcgaaaagccttacgattgcaaagagtgtggtaaagcttttcgttgcccgagccagctgagtcaacacaagcgcatccataccggtgaaaaaacataccagtgtccggaatgcggcaaggccttcttctacgccagtggtctgagtcgccaccaaagcgtccacaccggtgaaaagccgtatgagtgtaaaacatgtggcaaagccttcaagcaactgacccaactgacacgccaccaacgtatccatgatctgacatagtaatgaactagtccgtaacttgaaagtatttcgatttcttggctttatatatcttgtggaaaggacgatagtcacattaacatgaaccagca

SEQ ID NO: 2133 - DNA, 1883 bp, Homo sapiens
  source 1..1883: mol_type = genomic DNA
accgccaccatgaaactacaggccgtgatggagacgctgttgcagcggcagcagcgggcgcgccaggagctggaggcccggcagcagctgccccccgatccccctgctgcaccccccggccgggcccgggctgcccccgacgaggacagagagcccgagagtgcccggatgcagcgggctcagatggccgcactggcagccatgcgggctgcagctgcgggcctgggacacccagccagccccggcggctctgaggatgggcccccaggctcggaggaggaggacgcggcccgggaggggacaccgggctcacccgggcgaggcagagaagggccaggagaggagcactttgaggacatggcctccgacgaggacatgaagcccaaatgggaggaggaggagatggaggaagacctcggggaggatgaggaggaggaggaggaggattacgaggatgaggaggaggaggaggacgaggaggggctgggccccccaggccctgccagcttgggcaccacggcactgttcccccgaaaggcccagccaccccaggccttccgcggcgatggcgttcccagggtgctggggggccaggagcggccggggcctggccctgcccaccccggaggggccgcccacgtagccccgcagctgcagccgcctgaccacggcgactggacttacgaggagcagtttaagcagctctacgaactcgacggggaccccaagaggaaggaattcctggatgacttgttcagcttcatgcagaagcgagggacacctgtgaaccgcatccccatcatggccaaacaggtccttgacctgttcatgctgtacgtgctggtgacggagaagggcggcctcgtggaggtcatcaacaagaagctgtggcgtgagatcaccaagggcctcaacctgcccacgtccatcaccagtgcagccttcaccctgcggacccaatacatgaagtacctgtacccctacgagtgtgagaagcggggcctcagtaaccccaatgagctccaggcagccatagacagcaaccgacgggagggccggcgccagagctttggtggctccctctttgcctactcgccaggcggggcacacggcatgctctcctcacccaagctacccgtgtcctccctgggcctggccgcaagcaccaatggcagctccatcacccccgcccctaagatcaagaaagaggaggactcagccatccccatcacagtccctggccgcctgcctgtgtccctggcgggccaccctgtggtggcagcccaggcagcagctgtgcaagcagcagccgcccaagcagctgtggccgcacaggcagctgccctggaacagctgcgggagaagctggagtctgcagagcctccggagaagaagatggccctggtggccgatgagcagcaacggctgatgcaacgtgcactccagcagaacttcctggccatggcggcccagctgcccatgagcattcggatcaacagccaagcctccgaaagccgccaggactctgctgtgaacctgacgggcaccaacggcagcaacagcatcagcatgtcggtggagatcaacggcatcatgtacacaggagttctgtttgctcagccgccggcccccacgccaacctctgctcccaacaaaggaggcggcggcggcggcggcagcagcagcaacgcaggcggccggggaggaaacaccggaaccagcggcggccaggctgggccagcggggctgtccacaccctccacatctacctcaaataactcgttgccttagtaatgaactagtccgtaacttgaaagtatttcgatttcttggctttatatatcttgtggaaaggacgattagaggctgccctctttagccac

SEQ ID NO: 2134 - DNA, 1340 bp, Homo sapiens
  source 1..1340: mol_type = genomic DNA
accgccaccatggaggccctgcagaagcagcaggcagctcggctggcccagggggtggggccattggcccctgcatgcccgctgctgccaccgcagcctcccctgcctgaccaccggaccctacaggcccctgagggggccttggggaatgttggggctgaggaagaggaagatgctgaagaagatgaggagaagcgggaggaagccggggcagaggaggaggcagctgaggagagccgtccaggggcccagggccccagctcgccttctagccagccccctggactccatccccacgagtggacctacgaggaacaattcaagcagctgtatgagctcgatgcagaccccaagaggaaggaatttctggatgacctgtttagcttcatgcaaaagagggggacgccagtgaaccgcgtgcccatcatggcgaagcaggtgctcgacctgtacgctctgtttcgcctggtgaccgccaagggcggcctggtggaagtcatcaaccgcaaagtgtggcgggaagtcacgcgcggcctcagcctacccaccaccatcacctcggccgccttcactctacgcacccagtacatgaagtacctgtacccgtacgagtgcgagactcgagcgctcagctccccaggggagctccaggccgccatagacagcaatcggcgcgagggccgtcgccaggcttacaccgctactccgctcttcggcttggcagggccgccccctcggggcgctcaggacccagccttgggtcccggccccgcccctccggcgacccagtccagccctggcccagcccagggttccacctccggcctgccagcgcatgcatgcgctcagctgagtccaagccctattaagaaagaggagagtggaattccaaacccttgtctggcactgcctgtgggcctggcactgggacctacacgggagaaattggcaccagaggagcccccagagaagagagctgtgctgatggggcctatggacccacctcgaccttgcatgccccccagtttcctgccccgtggcaaggttcccctgagggaagagcggctggatgggcctcttaatctggcaggcagtggcatcagcagtatcaacatggccctagagatcaacggggtggtctacactggtgtcctctttgcccgccgccagcctgtgccagcttcccagggtccaaccaaccctgcacccccaccctccacagggcccccttccagcatcttgccctagtaatgaactagtccgtaacttgaaagtatttcgatttcttggctttatatatcttgtggaaaggacgatgttgcagggcgtttctgaagatg

SEQ ID NO: 2135 - DNA, 1787 bp, Homo sapiens
  source 1..1787: mol_type = genomic DNA
accgccaccatggagccacttcagcagcagcagcagcagcagcagcaacaacagaagcagccacacctggctcctctgcagatggatgccagagagaagcagggccagcagatgagagaagcccagttcttgtatgcccaaaagctggtcacacagccgactctcctttccgccacagctgggagaccttctggcagcactcccttaggtcccttagccagagttccacccaccgcagcagtggcccaagtgtttgaacggggcaacatgaactcagagcctgaggaagaggacggaggtttggaagatgaggatggggatgatgaagttgcagaggtggctgagaaagaaacccaggctgcttcaaaatattttcatgtgcagaaagtagctcgccaagatcccagagtggcacccatgtccaatctacttccagcaccagggctcccaccacatggacaacaagctaaagaagaccataccaaagatgcttccaaggcctcaccttctgtctccacagcaggacagccgaactggaatctggatgagcagctcaagcagaatggtggtttggcctggagtgatgatgcagatggaggccggggaagagagatctctcgagattttgccaagctgtatgaactggacggtgatcctgaaaggaaagagttcctggatgacctcttcgtctttatgcagaagagggggacccccatcaaccgaatccccatcatggccaaacagatcctggacctgtacatgctgtataagctggtgaccgagaagggaggcctggtggagatcatcaacaagaagatctggagggagatcaccaaaggcctaaacctgcccacatccatcaccagcgccgccttcaccctcaggacgcagtacatgaagtatctgtatgcctatgagtgtgagaagaaagccttgagttccccagccgagctccaggcagcaattgatggcaaccgcagggagggccggcggcccagctacagctcctccctctttggctactcacctgctgcggctactgctgctgccgctgccggggcccctgcccttctctccccacccaagatccgctttcccatccttgggcttggctccagcagtggtaccaataccagtagccctcggatatccccagcaaccactctcaggaaaggtgatggagccccagtgacaacagtgcctgtgccaaatcgtctggctgtgcccgtgaccttggcaagccagcaggctggtactcggaccgccgcactggagcagctgcgggagcggctggagtcaggggagcctgctgagaagaaggcatcgaggctgtctgaggaggagcagcgcctggtgcagcaggccttccagcgcaactttttcagcatggcacggcagctccccatgaagatcaggatcaacggcagggcagaagacagagcagaggcctcggctgcagcactgaacctgaccacgagtagcattgggagcattaacatgtctgtggacatcgatggcaccacctatgcaggtgtgctgtttgcccagaagcctgtggtccacctcatcacggggtctgctccccagagcctcggcagcagcgccagcagcagcagcagctctcactgttcaccaagtcctacctcatcccggggcacccccagcgcagagccctccaccagctggtccctctagtaatgaactagtccgtaacttgaaagtatttcgatttcttggctttatatatcttgtggaaaggacgattattgacgcacatatacgcttct

SEQ ID NO: 2136 - DNA, 1784 bp, Homo sapiens
  source 1..1784: mol_type = genomic DNA
accgccaccatggagccacttcagcagcagcagcagcagcagcagcaacaacagaagcagccacacctggctcctctgcagatggatgccagagagaagcagggccagcagatgagagaagcccagttcttgtatgcccaaaagctggtcacacagccgactctcctttccgccacagctgggagaccttctggcagcactcccttaggtcccttagccagagttccacccaccgcagcagtggcccaagtgtttgaacggggcaacatgaactcagagcctgaggaagaggacggaggtttggaagatgaggatggggatgatgaagttgcagaggtggctgagaaagaaacccaggctgcttcaaaatattttcatgtgcagaaagtagctcgccaagatcccagagtggcacccatgtccaatctacttccagcaccagggctcccaccacatggacaacaagctaaagaagaccataccaaagatgcttccaaggcctcaccttctgtctccacagcaggacagccgaactggaatctggatgagcagctcaagcagaatggtggtttggcctggagtgatgatgcagatggaggccggggaagagagatctctcgagattttgccaagctgtatgaactggacggtgatcctgaaaggaaagagttcctggatgacctcttcgtctttatgcagaagagggggacccccatcaaccgaatccccatcatggccaaacagatcctggacctgtacatgctgtataagctggtgaccgagaagggaggcctggtggagatcatcaacaagaagatctggagggagatcaccaaaggcctaaacctgcccacatccatcaccagcgccgccttcaccctcaggacgcagtacatgaagtatctgtatgcctatgagtgtgagaagaaagccttgagttccccagccgagctccaggcagcaattgatggcaaccgcagggagggccggcggcccagctacagctcctccctctttggctactcacctgctgcggctactgctgctgccgctgccggggcccctgcccttctctccccacccaagatccgctttcccatccttgggcttggctccagcagtggtaccaataccagtagccctcggatatccccagcaaccactctcaggaaaggtgatggagccccagtgacaacagtgcctgtgccaaatcgtctggctgtgcccgtgaccttggcaagccagcaggctggtactcggaccgccgcactggagcagctgcgggagcggctggagtcaggggagcctgctgagaagaaggcatcgaggctgtctgaggaggagcagcgcctggtgcagcaggccttccagcgcaactttttcagcatggcacggcagctccccatgaagatcaggatcaacggcagggaagacagagcagaggcctcggctgcagcactgaacctgaccacgagtagcattgggagcattaacatgtctgtggacatcgatggcaccacctatgcaggtgtgctgtttgcccagaagcctgtggtccacctcatcacggggtctgctccccagagcctcggcagcagcgccagcagcagcagcagctctcactgttcaccaagtcctacctcatcccggggcacccccagcgcagagccctccaccagctggtccctctagtaatgaactagtccgtaacttgaaagtatttcgatttcttggctttatatatcttgtggaaaggacgatcttagtgataactgattgccggc

SEQ ID NO: 2137 - DNA, 2171 bp, Homo sapiens
  source 1..2171: mol_type = genomic DNA
accgccaccatggaggatactggcatccagcgaggcatctgggatggagatgccaaggctgtccaacaatgtctgacagatatttttaccagcgtttacaccacctgcgacatccctgagaatgctatatttggtccctgtgtcctgagccatacttccctatatgacagcatagctttcatagctctcaagtctactgacaagagaacagtaccgtatatctttcgggtagacacctcagcagcaaatggttcctcagaaggtctcatgtggctgcggttggtccaatcggccagagataaggaagagcagaaccttgaagcctacataaaaaacggacagctgttctaccgctctctccgcaggattgccaaagacgaggagttactagtttggtacgggaaagaactgactgagttactcttgctctgcccctctagatcccacaacaaaatgaatgggtcgtccccttacacatgcctggaatgcagccaacgtttccagtttgagttcccctatgtggcgcatctgcgtttccgctgccccaagagacttcacagcgctgatataagtccccaagacgaacaaggcggcggcgtgggcaccaaggaccacgggggcggcggcggcggtggcaaagaccagcagcagcagcagcaggaagccccgctgggcccgggcccgaaattctgcaaagccggcccgctgcatcactatccgagtccgagcccggaaagcagcaatccaagcgcggcggcgggtggtagcagcgccaaaccaagcaccgatttccataatctggcgcgcgaactggaaaatagtcgcggtggcagcagctgcagcccggcccagagtctgagtagtggcagcggtagcggtggcggtggtggtcatcaagaagcggaactgagcccagatggcattgccaccggtggcggcaaaggcaaacgcaaattcccggaggaagccgcggaaggtggtggtggtgccggtctggttggcggtcgtggccgctttgttgaacgcccactgccggccagcaaagaagatctggtgtgcaccccgcagcagtatcgtgcgagcggcagctacttcggtctggaagaaaatggtcgtctgttcgccccgccaagcccagaaaccggcgaagccaaacgcagtgccttcgtggaagttaaaaaagcggcccgcgccgcgagtctgcaagaagaaggtaccgccgatggtgcgggtgttgccagcgaagatcaagatgccggcggtggtggcggtagtagtacgccagcggccgccagtccagttggcgcggaaaaactgctggccccacgtccgggcggcccactgccaagtcgtctggaaggtggtagcccagcccgcggtagcgcctttacttcggtgccgcagctgggcagcgcgggcagcacctctggcggtggtggtaccggtgctggtgctgctggtggtgctggtggtggtcaaggtgctgcttctgatgaacgtaagtctgctttttctcaaccggctcgttccttttctcaactctctccactcgttctcggtcaaaaactcggtgctctggaaccgtgtcatccggctgatggtgttggtccgactcgtctgtacccggctgctgctgatccgctggctgttaaactgcaaggtgctgctgatctcaatggtggctgtggttctctcccatctggtggtggtggtctcccgaaacaatctccgtttctctatgctactgctttttggccgaaatcttctgcagctgcagctgctgctgcagctgctgctgctgctggtccgctgcaactccaactcccgtctgctctgaccctcctcccaccgtcttttacttctctctgcctcccggctcaaaattggtgtgctaaatgtaacgcttcttttcgtatgacttctgatctcgtttatcacatgcgttctcatcataagaaagaatacgctatggaaccgctggttaaacgtcgtcgtgaagaaaagctgaaatgtccgatttgtaacgaatcttttcgtgaacgtcatcatctgtctcgtcatatgacttctcacaactagtaatgaactagtccgtaacttgaaagtatttcgatttcttggctttatatatcttgtggaaaggacgaacctcccacaggaccgttagaaag

SEQ ID NO: 2138 - DNA, 2786 bp, Homo sapiens
  source 1..2786: mol_type = genomic DNA
accgccaccatgagccctgaaaagtcccaagaggagagcccagaagaagacacagagagaacagagcggaagcccatggtcaaagatgccttcaaagacatttccatatacttcaccaaggaagaatgggcagagatgggagactgggagaaaactcgctataggaatgtgaaaaggaactataatgcactgattactataggtctcagagccactcgaccagctttcatgtgtcaccgaaggcaggccatcaaactccaggtggatgacacagaagattctgatgaagaatggacccctaggcagcaagtcaaacctccttggatggccttaagagtggaacagcgtaaacaccagaagggaatgcccaaggcgtcattcagtaatgaatctagtttgaaagaattgtcaagaacagcaaatttactgaatgcaagtggctcagagcaggctcagaaaccagtgtccccttctggagaagcaagtacctctggacagcactcaagactaaaactggaactcaggaagaaggagactgaaagaaagatgtatagcctgcgagaaagaaagggtcatgcatacaaagaggtcagcgagccgcaggatgatgattacctctattgtgagatgtgtcagaacttcttcattgacagctgtgctgcccatgggccccctacatttgtaaaggacagtgcagtggacaaggggcaccccaaccgttcagccctcagtctgcccccagggctgagaattgggccatcaggcatccctcaggctgggcttggagtatggaatgaggcatctgatctgccgctgggtctgcactttggcccttatgagggccgaattacagaagacgaagaggcagccaacaatggatactcctggctgatcaccaaggggagaaactgctatgagtatgtggatggaaaagataaatcctgggccaactggatgaggtatgtgaactgtgcccgggatgatgaagagcagaacctggtggccttccagtaccacaggcagatcttctatagaacctgccgagtcattaggccaggctgtgaactgctggtctggtatggggatgaatacggccaggaactgggcatcaagtggggcagcaagtggaagaaagagctcatggcagggagagaaccaaagccagagatccatccatgtccctcatgctgtctggccttttcaagtcagaaatttctcagtcaacatgtagaacgcaatcactcctctcagaacttcccaggaccatctgcaagaaaactcctccaaccagagaatccctgcccaggggatcagaatcaggagcagcaatatccagatccacacagccgtaatgacaaaaccaaaggtcaagagatcaaagaaaggtccaaactcttgaataaaaggacatggcagagggagatttcaagggccttttctagcccacccaaaggacaaatggggagctgtagagtgggaaaaagaataatggaagaagagtccagaacaggccagaaagtgaatccagggaacacaggcaaattatttgtgggggtaggaatctcaagaattgcaaaagtcaagtatggagagtgtggacaaggtttcagtgttaaatcagatgttattacacaccaaaggacacatacaggggagaagctctacgtctgcagggagtgtgggcggggctttagctggaagtcacacctcctcattcaccagaggatacacacaggggagaagccctatgtctgcagggagtgtgggcggggctttagctggcagtcagtcctcctcactcaccagaggacacacacaggggagaagccctatgtctgcagggagtgtgggcggggctttagccggcagtcagtcctcctcactcaccagaggagacacacaggggagaagccctatgtctgcagggagtgtgggcggggctttagccggcagtcagtcctcctcactcaccagaggagacacacaggggagaagccctatgtctgcagggagtgtgggcggggctttagctggcagtcagtcctcctcactcaccagaggacacacacaggggagaagccctatgtctgcagggagtgtgggcggggctttagctggcagtcagtcctcctcactcaccagaggacacacacaggggagaagccctatgtctgcagggagtgtgggcggggctttagcaataagtcacacctcctcagacaccagaggacacacacaggggagaagccctatgtctgcagggagtgtgggcggggctttcgcgataagtcacacctcctcagacaccagaggacacacacaggggagaagccctatgtctgcagggagtgtgggcggggctttagagataagtcaaacctcctcagtcaccagaggacacacacaggggagaagccctatgtctgcagggagtgtgggcggggctttagcaataagtcacacctcctcagacaccagaggacacacacaggggagaagccctatgtctgcagggagtgtgggcggggctttcgcaataagtcacacctcctcagacaccagaggacacacacaggggagaagccctacgtctgcagggagtgtgggcggggctttagcgataggtcaagcctctgctatcaccagaggacacacacaggggagaagccctacgtctgcagggaggatgagtagtaatgaactagtccgtaacttgaaagtatttcgatttcttggctttatatatcttgtggaaaggacgaaagacaatcagcgagtgtcttaac

SEQ ID NO: 2139 - DNA, 1070 bp, Homo sapiens
  source 1..1070: mol_type = genomic DNA
accgccaccatggcggaccgagacagcggcagcgagcagggtggtgcggcgctgggttcgggcggctccctggggcaccccggctcgggctcaggctccggcgggggcggtggtggcggcgggggcggcggcggcagtggcggcggcggcggcggggccccaggggggctgcagcacgagacgcaggagctggcctccaagcgggtggacatccagaacaagcgcttctacctggacgtgaagcagaacgccaagggccgcttcctgaagatcgccgaggtgggcgcgggcggcaacaagagccgccttactctctccatgtcagtggccgtggagttccgcgactacctgggcgacttcatcgagcactacgcgcagctgggccccagccagccgccggacctggcccaggcgcaggacgagccgcgccgggcgctcaaaagcgagttcctggtgcgcgagaaccgcaagtactacatggatctcaaggagaaccagcgcggccgcttcctgcgcatccgccagacggtcaaccgggggcctggcctgggctccacgcagggccagaccattgcgctgcccgcgcaggggctcatcgagttccgtgacgctctggccaagctcatcgacgactacggagtggaggaggagccggccgagctgcccgagggcacctccttgactgtggacaacaagcgcttcttcttcgatgtgggctccaacaagtacggcgtgtttatgcgagtgagcgaggtgaagcccacctatcgcaactccatcaccgtgccctacaaggtgtgggccaagttcggacacaccttctgcaagtactcggaggagatgaagaagattcaagagaagcagagggagaagcgggctgcctgtgagcagcttcaccagcagcaacagcagcagcaggaggagaccgccgctgccaccctgctactgcagggtgaggaagaaggggaagaagattagtaatgaactagtccgtaacttgaaagtatttcgatttcttggctttatatatcttgtggaaaggacgaactaaacctagcataatctgttag

SEQ ID NO: 2140 - DNA, 2213 bp, Homo sapiens
  source 1..2213: mol_type = genomic DNA
accgccaccatggcggagctgatgctgctcagcgagattgctgacccgacgcgtttcttcaccgacaacctgcttagcccggaggactggggtctgcagaacagcaccttgtattctggcctagatgaagtggccgaggagcagacgcagctcttccgttgcccggagcaggatgtcccgtttgacggcagctccctggacgtggggatggatgtcagcccctctgagcccccatgggaactcctgccgatcttcccagatcttcaggtgaagtctgagccatcttccccctgctcttcctcctccctcagctccgagtcatcgcgtctctccacagagccatccagcgaggctcttggggtaggggaggtgctccatgtgaagacagagtccttggcacccccactgtgtctcctgggagatgacccaacatcctcatttgaaaccgtccagatcaacgttatccccacctctgatgattcctcagatgtccagaccaagatagaacctgtctctccatgttcttccgtcaactctgaggcctccctgctctcagccgactcctccagccaggcttttataggagaggaggtcctggaagtgaagacagagtccctgtccccttcaggatgcctcctgtgggatgtcccagccccctcacttggagctgtccagatcagcatgggcccatcccttgatggctcctcaggcaaagccctgcccacccggaagccgccactgcagcccaaacctgtagtgctaaccactgtcccaatgccatccagagctgtgcctcccagcaccacagtccttctgcagtccctcgtccagccacccccagtgtccccagttgtcctcatccagggtgctattcgagtccagcctgaagggccggctccctctctaccacggcctgagaggaagagcatcgttcccgctcctatgcctggaaactcctgcccgcctgaagtggatgcaaagctgctgaagcggcagcagcgaatgatcaagaaccgggagtcagcctgccagtcccggagaaagaagaaagagtatctgcagggactggaggctcggctgcaagcagtactggctgacaaccagcagctccgccgagagaatgctgccctccggcggcggctggaggccctgctggctgaaaacagcgagctcaagttagggtctggaaacaggaaggtggtctgcatcatggtcttccttctcttcattgccttcaactttggacctgtcagcatcagtgagcctccttcagctcccatctctcctcggatgaacaagggggagcctcaaccccggagacacttgctggggttctcagagcaagagccagttcagggagttgaacctctccaggggtcctcccagggccctaaggagccccagcccagccccacagaccagcccagtttcagcaacctgacagccttccctgggggcgccaaggagctactactaagagacctagaccagctcttcctctcctctgattgccggcacttcaaccgcactgagtccctgaggcttgctgacgagttgagtggctgggtccagcgccaccagagaggccggaggaagatccctcagagggcccaggagagacagaagtctcagccacggaagaagtcacctccagttaaggcagtccccatccaaccccctggacccccagaaagggattctgtgggccagctgcaactatatcgccacccagaccgttcgcagccagcattcttggatgcaattgaccgacgggaagacacattttatgttgtctctttccgaagggaccacctgctgctcccagccatcagccacaacaagacctcccggcccaagatgtccctggtgatgcctgccatggcccccaatgagaccctgtcaggccgtggggccccgggggactatgaggagatgatgcagatcgagtgtgaggtcatggacaccagggtgattcacatcaagacctccacagtgcccccctcgctccgaaaacagccatccccaaccccaggcaatgccacaggtggccccttgccagtctctgcagccagccaggcccaccaggcctcccaccagcccctctacctcaatcatccctagtaatgaactagtccgtaacttgaaagtatttcgatttcttggctttatatatcttgtggaaaggacgagttcaattccctagtgcggcactt

SEQ ID NO: 2141 - DNA, 2204 bp, Homo sapiens
  source 1..2204: mol_type = genomic DNA
accgccaccatggcggagctgatgctgctcagcgagattgctgacccgacgcgtttcttcaccgacaacctgcttagcccggaggactgggacagcaccttgtattctggcctagatgaagtggccgaggagcagacgcagctcttccgttgcccggagcaggatgtcccgtttgacggcagctccctggacgtggggatggatgtcagcccctctgagcccccatgggaactcctgccgatcttcccagatcttcaggtgaagtctgagccatcttccccctgctcttcctcctccctcagctccgagtcatcgcgtctctccacagagccatccagcgaggctcttggggtaggggaggtgctccatgtgaagacagagtccttggcacccccactgtgtctcctgggagatgacccaacatcctcatttgaaaccgtccagatcaacgttatccccacctctgatgattcctcagatgtccagaccaagatagaacctgtctctccatgttcttccgtcaactctgaggcctccctgctctcagccgactcctccagccaggcttttataggagaggaggtcctggaagtgaagacagagtccctgtccccttcaggatgcctcctgtgggatgtcccagccccctcacttggagctgtccagatcagcatgggcccatcccttgatggctcctcaggcaaagccctgcccacccggaagccgccactgcagcccaaacctgtagtgctaaccactgtcccaatgccatccagagctgtgcctcccagcaccacagtccttctgcagtccctcgtccagccacccccagtgtccccagttgtcctcatccagggtgctattcgagtccagcctgaagggccggctccctctctaccacggcctgagaggaagagcatcgttcccgctcctatgcctggaaactcctgcccgcctgaagtggatgcaaagctgctgaagcggcagcagcgaatgatcaagaaccgggagtcagcctgccagtcccggagaaagaagaaagagtatctgcagggactggaggctcggctgcaagcagtactggctgacaaccagcagctccgccgagagaatgctgccctccggcggcggctggaggccctgctggctgaaaacagcgagctcaagttagggtctggaaacaggaaggtggtctgcatcatggtcttccttctcttcattgccttcaactttggacctgtcagcatcagtgagcctccttcagctcccatctctcctcggatgaacaagggggagcctcaaccccggagacacttgctggggttctcagagcaagagccagttcagggagttgaacctctccaggggtcctcccagggccctaaggagccccagcccagccccacagaccagcccagtttcagcaacctgacagccttccctgggggcgccaaggagctactactaagagacctagaccagctcttcctctcctctgattgccggcacttcaaccgcactgagtccctgaggcttgctgacgagttgagtggctgggtccagcgccaccagagaggccggaggaagatccctcagagggcccaggagagacagaagtctcagccacggaagaagtcacctccagttaaggcagtccccatccaaccccctggacccccagaaagggattctgtgggccagctgcaactatatcgccacccagaccgttcgcagccagcattcttggatgcaattgaccgacgggaagacacattttatgttgtctctttccgaagggaccacctgctgctcccagccatcagccacaacaagacctcccggcccaagatgtccctggtgatgcctgccatggcccccaatgagaccctgtcaggccgtggggccccgggggactatgaggagatgatgcagatcgagtgtgaggtcatggacaccagggtgattcacatcaagacctccacagtgcccccctcgctccgaaaacagccatccccaaccccaggcaatgccacaggtggccccttgccagtctctgcagccagccaggcccaccaggcctcccaccagcccctctacctcaatcatccctagtaatgaactagtccgtaacttgaaagtatttcgatttcttggctttatatatcttgtggaaaggacgacatgtaatgagtgcttaaatgaaa

SEQ ID NO: 2142 - DNA, 2054 bp, Homo sapiens
  source 1..2054: mol_type = genomic DNA
accgccaccatggcctcgccggctgacagctgtatccagttcacccgccatgccagtgatgttcttctcaaccttaatcgtctccggagtcgagacatcttgactgatgttgtcattgttgtgagccgtgagcagtttagagcccataaaacggtcctcatggcctgcagtggcctgttctatagcatctttacagaccagttgaaatgcaaccttagtgtgatcaatctagatcctgagatcaaccctgagggattctgcatcctcctggacttcatgtacacatctcggctcaatttgcgggagggcaacatcatggctgtgatggccacggctatgtacctgcagatggagcatgttgtggacacttgccggaagtttattaaggccagtgaagcagagatggtttctgccatcaagcctcctcgtgaagagttcctcaacagccggatgctgatgccccaagacatcatggcctatcggggtcgtgaggtggtggagaacaacctgccactgaggagcgcccctgggtgtgagagcagagcctttgcccccagcctgtacagtggcctgtccacaccgccagcctcttattccatgtacagccacctccctgtcagcagcctcctcttctccgatgaggagtttcgggatgtccggatgcctgtggccaaccccttccccaaggagcgggcactcccatgtgatagtgccaggccagtccctggtgagtacagccggccgactttggaggtgtcccccaatgtgtgccacagcaatatctattcacccaaggaaacaatcccagaagaggcacgaagtgatatgcactacagtgtggctgagggcctcaaacctgctgccccctcagcccgaaatgccccctacttcccttgtgacaaggccagcaaagaagaagagagaccctcctcggaagatgagattgccctgcatttcgagccccccaatgcacccctgaaccggaagggtctggttagtccacagagcccccagaaatctgactgccagcccaactcgcccacagagtcctgcagcagtaagaatgcctgcatcctccaggcttctggctcccctccagccaagagccccactgaccccaaagcctgcaactggaagaaatacaagttcatcgtgctcaacagcctcaaccagaatgccaaaccagaggggcctgagcaggctgagctgggccgcctttccccacgagcctacacggccccacctgcctgccagccacccatggagcctgagaaccttgacctccagtccccaaccaagctgagtgccagcggggaggactccaccatcccacaagccagccggctcaataacatcgttaacaggtccatgacgggctctccccgcagcagcagcgagagccactcaccactctacatgcaccccccgaagtgcacgtcctgcggctctcagtccccacagcatgcagagatgtgcctccacaccgctggccccacgttccctgaggagatgggagagacccagtctgagtactcagattctagctgtggtgagaaaccctatcgttgcaacatctgtggggcccagttcaaccggccagccaacctgaaaacccacactcgaattcactctggagagaagccctacaaatgcgaaacctgcggagccagatttgtacaggtggcccacctccgtgcccatgtgcttatccacactggtgagaagccctatccctgtgaaatctgtggcacccgtttccggcaccttcagactctgaagagccacctgcgaatccacacaggagagaaaccttaccattgtgagaagtgtaacctgcatttccgtcacaaaagccagctgcgacttcacttgcgccagaagcatggcgccatcaccaacaccaaggtgcaataccgcgtgtcagccactgacctgcctccggagctccccaaagcctgctagtaatgaactagtccgtaacttgaaagtatttcgatttcttggctttatatatcttgtggaaaggacgagtttaagctgggttggccagtatt

SEQ ID NO: 2143 - DNA, 2222 bp, Homo sapiens
  source 1..2222: mol_type = genomic DNA
accgccaccatggcctcgccggctgacagctgtatccagttcacccgccatgccagtgatgttcttctcaaccttaatcgtctccggagtcgagacatcttgactgatgttgtcattgttgtgagccgtgagcagtttagagcccataaaacggtcctcatggcctgcagtggcctgttctatagcatctttacagaccagttgaaatgcaaccttagtgtgatcaatctagatcctgagatcaaccctgagggattctgcatcctcctggacttcatgtacacatctcggctcaatttgcgggagggcaacatcatggctgtgatggccacggctatgtacctgcagatggagcatgttgtggacacttgccggaagtttattaaggccagtgaagcagagatggtttctgccatcaagcctcctcgtgaagagttcctcaacagccggatgctgatgccccaagacatcatggcctatcggggtcgtgaggtggtggagaacaacctgccactgaggagcgcccctgggtgtgagagcagagcctttgcccccagcctgtacagtggcctgtccacaccgccagcctcttattccatgtacagccacctccctgtcagcagcctcctcttctccgatgaggagtttcgggatgtccggatgcctgtggccaaccccttccccaaggagcgggcactcccatgtgatagtgccaggccagtccctggtgagtacagccggccgactttggaggtgtcccccaatgtgtgccacagcaatatctattcacccaaggaaacaatcccagaagaggcacgaagtgatatgcactacagtgtggctgagggcctcaaacctgctgccccctcagcccgaaatgccccctacttcccttgtgacaaggccagcaaagaagaagagagaccctcctcggaagatgagattgccctgcatttcgagccccccaatgcacccctgaaccggaagggtctggttagtccacagagcccccagaaatctgactgccagcccaactcgcccacagagtcctgcagcagtaagaatgcctgcatcctccaggcttctggctcccctccagccaagagccccactgaccccaaagcctgcaactggaagaaatacaagttcatcgtgctcaacagcctcaaccagaatgccaaaccagaggggcctgagcaggctgagctgggccgcctttccccacgagcctacacggccccacctgcctgccagccacccatggagcctgagaaccttgacctccagtccccaaccaagctgagtgccagcggggaggactccaccatcccacaagccagccggctcaataacatcgttaacaggtccatgacgggctctccccgcagcagcagcgagagccactcaccactctacatgcaccccccgaagtgcacgtcctgcggctctcagtccccacagcatgcagagatgtgcctccacaccgctggccccacgttccctgaggagatgggagagacccagtctgagtactcagattctagctgtgagaacggggccttcttctgcaatgagtgtgactgccgcttctctgaggaggcctcactcaagaggcacacgctgcagacccacagtgacaaaccctacaagtgtgaccgctgccaggcctccttccgctacaagggcaacctcgccagccacaagaccgtccataccggtgagaaaccctatcgttgcaacatctgtggggcccagttcaaccggccagccaacctgaaaacccacactcgaattcactctggagagaagccctacaaatgcgaaacctgcggagccagatttgtacaggtggcccacctccgtgcccatgtgcttatccacactggtgagaagccctatccctgtgaaatctgtggcacccgtttccggcaccttcagactctgaagagccacctgcgaatccacacaggagagaaaccttaccattgtgagaagtgtaacctgcatttccgtcacaaaagccagctgcgacttcacttgcgccagaagcatggcgccatcaccaacaccaaggtgcaataccgcgtgtcagccactgacctgcctccggagctccccaaagcctgctagtaatgaactagtccgtaacttgaaagtatttcgatttcttggctttatatatcttgtggaaaggacgatcgcatccgcgacagacgcatgtg

SEQ ID NO: 2144 - DNA, 1466 bp, Homo sapiens
  source 1..1466: mol_type = genomic DNA
accgccaccatgccccgatgccccgcgggggccatggacgaggggcccgtggacctgcgcacccggcccaaggccgccggactcccgggcgccgcgctgccgctccgcaagcgcccgctgcgcgcgccctccccggagcccgccgctccccgcggcgctgcgggccttgtcgtccccctggaccctctgcgcggcggctgcgacctgccggcggtccccgggcccccccacggcctggcccggccggaggcgctttactaccccggagccttactgcctttgtaccccactcgggccatgggctccccgtttcctctggtgaacctgcctacacccctataccccatgatgtgccccatggaacaccccctttctgctgacatcgccatggccacccgtgcagatgaggacggagacacgcctctccatattgctgtggtgcagggtaacctgccagctgtgcaccggctggtcaacctcttccagcaggggggccgggagctcgacatctacaacaacctacggcagacaccgctccacctggctgtgatcaccacattaccgtctgtggtccggctcctggtgacagctggtgccagccccatggcgctggaccgccatggccagacggccgctcacctggcgtgcgagcaccgcagcccgacctgcctgcgagccctgctggacagcgcagctccgggcacgttggacctggaggcccgcaattatgacgggctcaccgccctgcacgtggcagtgaacaccgagtgccaagaaaccgtgcagctcttgctagagcgcggtgccgacatcgacgcagtggacattaagagcggccgctccccgctcatccacgccgtggaaaacaacagccttagcatggtgcagctgctgctgcagcacggcgccaacgtgaacgcgcaaatgtactccggcagctccgccctgcactcagcgtccggccgcgggctcctcccgctggtgcgcacgctggtccgcagcggcgctgacagcagcctcaagaactgccacaacgacacgccgctcatggtggcgcgcagccgcagggtcatcgacatcctgagggggaaggccacccggcctgcttccacctcccagccagacccctcccctgaccggagcgccaacacctcccccgagagcagcagccgcctcagctccaatggtcttctctccgcatcaccatcctcctcaccctcccagtctccccccagggacccccctggattccccatggctcctcccaatttcttccttccttccccatctccacccgccttcctgccctttgctggggtcctccgaggccctggccggccggtgcccccctccccagctccaggaggcagctagtaatgaactagtccgtaacttgaaagtatttcgatttcttggctttatatatcttgtggaaaggacgaagatgttcactaagtcgatagcgg

SEQ ID NO: 2145 - DNA, 899 bp, Homo sapiens
  source 1..899: mol_type = genomic DNA
accgccaccatgtatgtgggctatgtgctggacaaggattcgcccgtgtaccccggcccagccaggccagccagcctcggcctgggcccgcaagcctacggccccccggccccgcccccggcgcccccgcagtaccccgacttctccagctactctcacgtggagccggcccccgcgcccccgacggcctggggggcgcccttccctgcgcccaaggacgactgggccgccgcctacggcccgggccccgcggcccctgccgccagcccagcttcgctggcattcgggccccctccagactttagcccggtgccggcgccccctgggcccggcccgggcctcctggcgcagcccctcgggggcccgggcacaccgtcctcgcccggagcgcagaggccgacgccctacgagtggatgcggcgcagcgtggcggccggaggcggcggtggcagcggtaagactcggaccaaggacaagtaccgcgtggtctacaccgaccaccaacgcctggagctggagaaggagtttcattacagccgttacatcacaatccggcggaaatcagagctggctgccaatctggggctcactgaacggcaggtgaagatctggttccaaaaccggcgggcaaaggagcgcaaagtgaacaagaagaaacagcagcagcaacagcccccacagccgccgatggcccacgacatcacggccaccccagccgggccatccctggggggcctgtgtcccagcaacaccagcctcctggccacctcctctccaatgcctgtgaaagaggagtttctgccatagtaatgaactagtccgtaacttgaaagtatttcgatttcttggctttatatatcttgtggaaaggacgatgctgggagaaagctccaaatggt

SEQ ID NO: 2146 - DNA, 821 bp, Homo sapiens
  source 1..821: mol_type = genomic DNA
accgccaccatggccacctctggacgcctgagcttcaccgtgcgcagccttctagatttacccgagcaggacgcgcaacacctgccgaggcgggagccagaaccacgcgccccccagcccgacccctgcgccgcctggctggattcggagcgcggccactacccttcctcggacgagagcagcctggagaccagcccgccagactcgtcgcagcggccgtccgctaggcccgcgtctccgggctcggacgccgagaaaaggaagaagcggcgggtgctattctccaaggcgcagacgctggagttggagcggcgcttccggcagcagcggtacctgtctgcgcccgagcgcgagcagctggcgagcctgcttcgcctcacgcccacgcaggtcaagatctggttccagaatcatcgctacaagctgaagcgcgctcgcgctccaggggcggcggagtcgcctgacctggcagcatccgccgagctgcacgccgcgcccggcctgctgcgtcgcgtggtggtgccggtgcttgttcgcgacgggcagccgtgcggcggcggcggcggtggcgaggtgggaaccgccgcggcccaggagaagtgcggcgcccctccagccgccgcctgccctctgccgggctaccctgccttcggtcccggctcggcgcttggcctcttccccgcctaccagcacttagcatcccccgccctggtctcctggaactggtagtaatgaactagtccgtaacttgaaagtatttcgatttcttggctttatatatcttgtggaaaggacgatgaccgaacacttaccgcctgtcc

SEQ ID NO: 2147 - DNA, 1049 bp, Homo sapiens
  source 1..1049: mol_type = genomic DNA
accgccaccatgaggaacagaatggccccagagaatccccagccagaccctttcatcaataggaattattccaacatgaaggtgataccaccacaggatccagctagtcccagtttcactctgttatccaagctggagtgcagtggcacggtctcggcttactgcagcctcaacctcccaggttcaactgatcctcccacctcagcctcccgagtagctgcgactacagcaatacggagaaggcataaagaacgtacttctttcacccaccaacagtatgaggagctagaagctctgtttagccagaccatgttcccagatagaaatcttcaggagaaactagctttgagactcgacctaccggagtcaacagtaaaggtttggttcaggaaccggcgattcaaattgaagaagcagcagcagcagcaatcagcaaagcaacgaaaccagatccttccatccaagaagaatgtgcccacctcccccagaacatcccccagtccttatgctttttctcctgtgatttcagatttctacagctcccttccatctcagcccttagacccttccaattgggcatggaactctaccttcactgagagttctaccagtgacttccaaatgcaagatactcagtgggagaggctggtggcctcggttcctgctttgtactctgatgcctatgacatattccaaatcatagaactgtacaatcttcctgatgagaatgagatatccagctcttctttccactgtctgtatcagtatctctcacccacaaagtaccaggtaggaggacagggttcctctctcagcatctttgctggtccagctgtaggcctatctcctgcacaaacctggcccaatatgacaagccaagcctttgaagcctacagtctaacagatagcctggaattccagaaaacctccaatatggtagacttgggatttctctagtaatgaactagtccgtaacttgaaagtatttcgatttcttggctttatatatcttgtggaaaggacgacaggaagagcgaccaggcgagaga

SEQ ID NO: 2148 - DNA, 923 bp, Homo sapiens
  source 1..923: mol_type = genomic DNA
accgccaccatgtcgctgaccaacacaaagacggggttttcggtcaaggacatcttagacctgccggacaccaacgatgaggagggctctgtggccgaaggtccggaggaagagaacgaggggcccgagccagccaagagggccgggccgctggggcagggcgccctggacgcggtgcagagcctgcccctgaagaaccccttctacgacagcagcgacaacccgtacacgcgctggctggccagcaccgagggccttcagtactccctgcacggtctggctgccggggcgccccctcaggactcaagctccaagtccccggagccctcggccgacgagtcaccggacaatgacaaggagaccccgggcggcgggggggacgccggcaagaagcgaaagcggcgagtgcttttctccaaggcgcagacctacgagctggagcggcgctttcggcagcagcggtacctgtcggcgcccgagcgcgaacacctggccagcctcatccgcctcacgcccacgcaggtcaagatctggttccagaaccaccgctacaagatgaagcgcgcccgggccgagaaaggtatggaggtgacgcccctgccctcgccgcgccgggtggccgtgcccgtcttggtcagggacggcaaaccatgtcacgcgctcaaagcccaggacctggcagccgccaccttccaggcgggcattcccttttctgcctacagcgcgcagtcgctgcagcacatgcagtacaacgcccagtacagctcggccagcaccccccagtacccgacagcacaccccctggtccaggcccagcagtggacttggtagtaatgaactagtccgtaacttgaaagtatttcgatttcttggctttatatatcttgtggaaaggacgaaacacgctggatccgccatgatgg

SEQ ID NO: 2149 - DNA, 1196 bp, Homo sapiens
  source 1..1196: mol_type = genomic DNA
accgccaccatgatgttaccaagcccggtcacctccacccctttctcagtcaaagacattttgaatctggagcagcagcaccagcacttccatggtgcgcacttgcaggcggacttggagcaccacttccactctgcgccctgcatgctggccgccgctgaggggacgcaattttctgacggaggggaggaggacgaggaagacgagggcgagaaattgtcctatttgaactcactagccgcagcagacggccacggggattcagggctgtgtccccagggctatgtccacacggtcctgcgagactcgtgcagcgagcccaaggaacatgaagaggagcccgaggtcgtgagggaccggagccaaaaaagctgccagctgaagaagtctctagagacggccggagactgcaaggcggcggaggagagcgagaggccgaagccacgcagccgccggaagccccgggtcctcttctcgcaagcccaggtcttcgagctggaacgcaggttcaagcagcagcggtacctgtcggcacccgagcgcgagcacctcgccagcagcctgaagctcacatccactcaggtgaaaatctggttccagaatcgcaggtacaagtgcaagagacagcggcaggacaagtctctggagcttggcgcacacgcgcccccgccgccgccgcgccgcgtggctgtcccggtgctggtgcgggacggcaagccgtgcgtcacgcccagcgcgcaggcctacggcgcgccctacagcgtgggcgccagcgcctactcctacaacagcttccccgcctacggctatgggaactcggccgcggccgccgccgccgccgccgccgccgccgcagcagcggcggcctacagcagcagctatggctgtgcgtacccggcgggcggcggcggcggcggcggcgggacctccgcggcgaccactgccatgcagcccgcctgcagcgcggccggaggcggcccctttgtgaacgtgagcaacctaggaggcttcggcagcggcggcagcgcacagccgttgcaccagggtactgcagccggggccgcgtgcgctcagggcaccttgcagggcatccgggcctggtagtaatgaactagtccgtaacttgaaagtatttcgatttcttggctttatatatcttgtggaaaggacgacgtaaccggtgacacaggatacta

SEQ ID NO: 2150 - DNA, 1307 bp, Homo sapiens
  source 1..1307: mol_type = genomic DNA
accgccaccatgtggtccggaggcagtgggaaggcgcggggctgggaggccgcggcgggagggaggagcagccccggcaggctcagccgccgccgaatcatgtcgatgagtccaaagcacacgactccgttctcagtgtctgacatcttgagtcccctggaggaaagctacaagaaagtgggcatggagggcggcggcctcggggctccgctggcggcgtacaggcagggccaggcggcaccgccaacagcggccatgcagcagcacgccgtggggcaccacggcgccgtcaccgccgcctaccacatgacggcggcgggggtgccccagctctcgcactccgccgtggggggctactgcaacggcaacctgggcaacatgagcgagctgccgccgtaccaggacaccatgaggaacagcgcctctggccccggatggtacggcgccaacccagacccgcgcttccccgccatctcccgcttcatgggcccggcgagcggcatgaacatgagcggcatgggcggcctgggctcgctgggggacgtgagcaagaacatggccccgctgccaagcgcgccgcgcaggaagcgccgggtgctcttctcgcaggcgcaggtgtacgagctggagcgacgcttcaagcaacagaagtacctgtcggcgccggagcgcgagcacctggccagcatgatccacctgacgcccacgcaggtcaagatctggttccagaaccaccgctacaaaatgaagcgccaggccaaggacaaggcggcgcagcagcaactgcagcaggacagcggcggcggcgggggcggcgggggcaccgggtgcccgcagcagcaacaggctcagcagcagtcgccgcgacgcgtggcggtgccggtcctggtgaaagacggcaaaccgtgccaggcgggtgcccccgcgccgggcgccgccagcctacaaggccacgcgcagcagcaggcgcagcaccaggcgcaggccgcgcaggcggcggcagcggccatctccgtgggcagcggtggcgccggccttggcgcacacccgggccaccagccaggcagcgcaggccagtctccggacctggcgcaccacgccgccagccccgcggcgctgcagggccaggtatccagcctgtcccacctgaactcctcgggctcggactacggcaccatgtcctgctccaccttgctatacggtcggacctggtagtaatgaactagtccgtaacttgaaagtatttcgatttcttggctttatatatcttgtggaaaggacgatcggcaatgcaaatacgggctagt

SEQ ID NO: 2151 - DNA, 1217 bp, Homo sapiens
  source 1..1217: mol_type = genomic DNA
accgccaccatgtcgatgagtccaaagcacacgactccgttctcagtgtctgacatcttgagtcccctggaggaaagctacaagaaagtgggcatggagggcggcggcctcggggctccgctggcggcgtacaggcagggccaggcggcaccgccaacagcggccatgcagcagcacgccgtggggcaccacggcgccgtcaccgccgcctaccacatgacggcggcgggggtgccccagctctcgcactccgccgtggggggctactgcaacggcaacctgggcaacatgagcgagctgccgccgtaccaggacaccatgaggaacagcgcctctggccccggatggtacggcgccaacccagacccgcgcttccccgccatctcccgcttcatgggcccggcgagcggcatgaacatgagcggcatgggcggcctgggctcgctgggggacgtgagcaagaacatggccccgctgccaagcgcgccgcgcaggaagcgccgggtgctcttctcgcaggcgcaggtgtacgagctggagcgacgcttcaagcaacagaagtacctgtcggcgccggagcgcgagcacctggccagcatgatccacctgacgcccacgcaggtcaagatctggttccagaaccaccgctacaaaatgaagcgccaggccaaggacaaggcggcgcagcagcaactgcagcaggacagcggcggcggcgggggcggcgggggcaccgggtgcccgcagcagcaacaggctcagcagcagtcgccgcgacgcgtggcggtgccggtcctggtgaaagacggcaaaccgtgccaggcgggtgcccccgcgccgggcgccgccagcctacaaggccacgcgcagcagcaggcgcagcaccaggcgcaggccgcgcaggcggcggcagcggccatctccgtgggcagcggtggcgccggccttggcgcacacccgggccaccagccaggcagcgcaggccagtctccggacctggcgcaccacgccgccagccccgcggcgctgcagggccaggtatccagcctgtcccacctgaactcctcgggctcggactacggcaccatgtcctgctccaccttgctatacggtcggacctggtagtaatgaactagtccgtaacttgaaagtatttcgatttcttggctttatatatcttgtggaaaggacgacaatccagggatagtaaagtgata

SEQ ID NO: 2152 - DNA, 1007 bp, Homo sapiens
  source 1..1007: mol_type = genomic DNA
accgccaccatgctgctgagccccgtcacctccacccccttctcggtcaaggacatcctgcgactggagcgcgagcggagctgccccgcggcttcgccacatccgcgggtgcggaagagcccggaaaactttcagtacctgagaatggacgcagagccgcgagggtcagaggttcacaacgctggtggcggcggcggtgacagaaagctggatggttcggagcctcctgggggtccctgtgaggcagtcttggagatggacgcggaacggatgggggagccacagcccggcctgaacgcggcctcgcccctcggcggcgggaccagggtgccagagcgcggcgttggcaacagcggcgacagcgtgcggggtggccgctcggagcagcccaaggcgcggcaacgacggaagccgcgcgtgctcttttcgcaggcgcaggtgctggccctggagcggcgcttcaagcagcagcggtacctgtcagcgcccgagcgcgagcacctggccagcgcgctgcagctcacgtccacgcaggtcaagatctggttccagaaccgacgctacaaatgcaagagacagcgccaggacaagtcgctggaactggctggccaccctctaacgccgcgccgagtagctgtgcccgtcctggtgcgcgatggcaagccctgcctgggccccgggcccggcgcacctgccttccccagcccctacagtgcagcagtgtcgccctactcttgctacggaggctacagcggagcaccctacggcgcaggctacggcacctgctacgcgggcgcgccctcgggtcctgcgccacacacaccactggccagcgcgggcttcggacacggtggccagaatgccaccccgcagggccatctggcagccacgctgcagggtgtcagggcctggtagtaatgaactagtccgtaacttgaaagtatttcgatttcttggctttatatatcttgtggaaaggacgaaggtcgtttaacgattagagatcc

SEQ ID NO: 2153 - DNA, 1166 bp, Homo sapiens
  source 1..1166: mol_type = genomic DNA
accgccaccatgtcgttgagcccaaagcacacgacgcccttctccgtgtccgacatcctgagccccatcgaggagacctacaagaagttcagcggcgccatggacggcgcgccacccggcctgggggcgcccctgggggccgcggccgcctaccgcgcgccgccacctgggccctcctcgcaggcggcgaccgtggcgggcatgcagccttctcacgccatggcgggtcacaacgcggcggccgcggcggcggcggcagcagctgcggcggcggcggccgccacctaccacatgccgcccggcgtctcgcagttcccgcacggcgccatgggcagctactgcaacggcggcctgggcaacatgggcgagctgcccgcctacacggacggcatgcggggcggcgcggccaccggctggtacggcgccaacccggacccacgctactcgtcaatctccaggttcatggggccgtcggcgggcgtgaatgtggccggcatggggtcgctgaccggcatcgcggacgccgccaagtcgctgggcccgctgcacgcggcggcggcggcagccgctccgcgaaggaagcgccgcgtgctcttctcgcaggcgcaggtctacgagctggagcggcgcttcaagcagcagaagtacctgtcggcgcccgagcgcgagcacctggccagcatgatccacctgacgcccacgcaggtcaagatctggttccagaaccaccggtacaagatgaaacggcaggccaaggacaaggcggcgcagcagctgcagcaggagggcggcctgggcccgccgccgcctccgccgccgtccccgcgccgcgtggcggtgcctgtgctggtcaaggacggcaagccgtgccagaacggcgccagcacgcccacccccggccaggccggtccgcagccgccggccccgacgccagcacctgagctggaggagctgtcgcccagcccacccgcgctgcacggcccggggggcggcctggcggccctggacgcggccgccggggagtacagcggcggcgtcctgggcgccaacctgctctatggcaggacgtggtagtaatgaactagtccgtaacttgaaagtatttcgatttcttggctttatatatcttgtggaaaggacgattccgggtcaacttgtgatcgtag

SEQ ID NO: 2154 - DNA, 557 bp, Homo sapiens
  source 1..557: mol_type = genomic DNA
accgccaccatgttccccagccctgctctcacgcccacgcccttctcagtcaaagacatcctaaacctggaacagcagcagcgcagcctggctgccgccggagagctctctgcccgcctggaggcgaccctggcgccctcctcctgcatgctggccgccttcaagccagaggcctacgctgggcccgaggcggctgcgccgggcctcccagagctgcgcgcagagctgggccgcgcgccttcaccggccaagtgtgcgtctgcctttcccgccgcccccgccttctatccacgtgcctacagcgaccccgacccagccaaggaccctagagccgaaaagaaagggtgtgaactgccccgagggcagagacctcccgttttgttctccagcgccttgagccagcctgactttctacaaatgctgagtgagacgtgtcggtggctcccagtgcacttggcagagtagtaatgaactagtccgtaacttgaaagtatttcgatttcttggctttatatatcttgtggaaaggacgactgggtggataaacgtcgcgtggt

SEQ ID NO: 2155 - DNA, 440 bp, Homo sapiens
  source 1..440: mol_type = genomic DNA
accgccaccatgttccccagccctgctctcacgcccacgcccttctcagtcaaagacatcctaaacctggaacagcagcagcgcagcctggctgccgccggagagctctctgcccgcctggaggcgaccctggcgccctcctcctgcatgctggccgccttcaagccagaggcctacgctgggcccgaggcggctgcgccgggcctcccagagctgcgcgcagagctgggccgcgcgccttcaccggccaagtgtgcgtctgcctttcccgccgcccccgccttctatccacgtgcctacagcgaccccgacccagccaaggaccctagagccgaaaagaaagcctagtaatgaactagtccgtaacttgaaagtatttcgatttcttggctttatatatcttgtggaaaggacgattaaccatgccacgcctacattgt

SEQ ID NO: 2156 - DNA, 3746 bp, Homo sapiens
  source 1..3746: mol_type = genomic DNA
accgccaccatggaggccaccggggtgctgccgttcgtgcgtggcgtggacctcagcggcaacgacttcaagggcggctacttccctgagaatgtcaaggccatgaccagcctgcggtggctgaagctgaaccgcactggcctctgctacctgcccgaggagctggccgccctgcagaagctggaacacttgtctgtgagccacaacaacctgaccacgcttcatggggagctgtccagcctgccatcgctgcgcgccatcgtggcccgagccaacagtctgaagaattccggagtccccgatgacatcttcaagctagatgatctctcagtcctggacttgagccacaaccagctgacagagtgcccgcgggagctggagaacgccaagaacatgctggtgctgaacctcagccacaacaggcagctcccagcgatgacggccctgcagaccctgcacctgcggagcacccagcgcacccagagcaacctgcccaccagcctggagggtctgagcaacctcgcagacgtggatctgtcctgcaatgacctgacacgggtgcccgagtgtctgtacaccctccccagcctgcgccgcctcaacctcagcagcaaccagatcacggagctgtccctgtgcatagaccagtgggtgcacgtggaaactctgaacctgtcccgaaatcagctcacctcactgccctcagccatttgcaagctgagcaagctgaagaagctgtacctgaattccaacaagctggactttgacgggctgccctcaggcattggcaagctcaccaacctggaagagttcatggctgccaacaacaacctggagctggtccctgaaagtctctgcaggtgcccaaagctgaggaaacttgtcctgaacaagaaccacctggtgaccctcccagaagccatccatttcctgacggagatcgaggtcctggatgtgcgggagaaccccaacctggtcatgccgcccaagcccgcagaccgtgccgctgagtggtacaacatcgacttctcgctgcagaaccagctgcggctagcgggtgcctctcctgctaccgtggctgcagctgcagctgggagtgggcccaaggaccctatggctcgcaagatgcgactgcggaggcgcaaggattcagcccaggatgaccaggccaagcaggtgctgaagggcatgtcagatgttgcccaggagaagaacaaaaagcaggaggagagcgcagatgcccgggcccccagcgggaaggtgcggcgttgggaccagggcctggagaagccccgccttgactactccgagttcttcacggaggacgtgggccagctgcccggactgaccatctggcagatagagaacttcgtgcctgtgctggtggaggaagccttccacggcaagttctacgaggctgactgctacattgtgctcaagacctttctggatgacagcggctccctcaactgggagatctactactggattggcggggaggccacactcgacaagaaagcttgctctgccatccacgctgtcaacttgcgcaactacctgggtgctgagtgccgcactgtccgggaggagatgggcgatgagagcgaggagttcctgcaggtgtttgacaacgacatctcctacattgagggtggaacagccagtggcttctacactgtggaagacacacactatgtcaccaggatgtatcgtgtgtatgggaaaaagaacatcaagttggagcctgtgcccctcaaggggacctctctggacccaaggtttgttttcctgctggaccgagggctagacatctacgtatggcggggggcccaggccacactgagcagcaccaccaaggccaggctctttgcagagaaaattaacaagaatgagcggaaagggaaggctgagatcacactgctggtgcagggccaggagctcccagagttctgggaggcactgggtggggagccctctgagatcaagaagcacgtgcctgaagacttctggccgccgcagcccaagctgtacaaggtgggcctgggcttgggctacctggagctgccacagatcaactacaagctctccgtggaacataagcagcgtcccaaggtggagctgatgccaagaatgcggctgctgcagagtctgctggacacgcgctgcgtgtacattctggactgttggtccgacgtgttcatctggctcggccgcaagtccccgcgcctggtgcgcgctgccgccctcaagctgggtcaggagctgtgcgggatgctgcaccggccacgccatgccacggtcagccgcagcctcgagggcaccgaggcgcaggtgttcaaggccaagttcaagaattgggacgatgtgttgacggtggactacacacgcaatgcggaggccgtgctgcagagcccgggtctctccgggaaggtgaaacgcgacgccgagaagaaagaccagatgaaggctgacctcactgcgcttttcctgccgcggcagccgcccatgtcgctggccgaggcggagcagctgatggaggagtggaacgaagacctagacggcatggagggtttcgtgctggagggcaagaagtttgcgcggctgccggaagaggagtttggccacttctacacgcaggactgctacgtcttcctctgcaggtactgggtgcctgtggagtacgaggaggaggaaaagaaggaagacaaggaggagaaggccgagggcaaagaaggcgaggaagcaaccgctgaggcagaggagaagcagccagaggaggacttccagtgcatcgtgtacttctggcagggccgtgaagcctccaatatgggctggctcaccttcaccttcagcctgcaaaagaagttcgagagcctcttccctgggaagctggaggtggtacgcatgacgcagcagcaggagaaccccaagttcctgtcccatttcaagaggaagttcatcatccaccggggcaagaggaaggcggtccagggcgcccaacagcccagcctctaccagatccgcaccaacggcagcgccctctgcacccggtgcatccagatcaacaccgactccagcctcctcaactccgagttctgcttcatcctcaaggttccctttgagagtgaggacaaccagggcatcgtgtatgcctgggtgggccgggcatcagaccctgacgaagccaagttggcagaagacatcctgaacaccatgtttgacacctcctacagcaagcaggttatcaacgaaggtgaggagcctgagaacttcttctgggtgggcattggggcacagaagccctatgatgacgatgccgagtacatgaaacacacacgtctcttccggtgctccaacgagaagggctactttgcagtgactgagaaatgctccgacttttgccaagatgacctggcagatgatgacatcatgttgctagacaatggccaagaggtctacatgtgggtggggacccagactagccaggtggagatcaagctgagcctgaaggcctgccaggtatatatccagcacatgcggtccaaggaacatgagcggccgcgccggctgcgcctggtccgcaagggcaatgagcagcacgcctttacccgctgcttccacgcctggagcgccttctgcaaggccctggcctagtaatgaactagtccgtaacttgaaagtatttcgatttcttggctttatatatcttgtggaaaggacgaggtaacggatcttacagtcaagat

SEQ ID NO: 2157 - DNA, 3878 bp, Homo sapiens
  source 1..3878: mol_type = genomic DNA
accgccaccatggacctccgaggcctccgcccagtgcctggcggctacttccctgagaatgtcaaggccatgaccagcctgcggtggctgaagctgaaccgcactggcctctgctacctgcccgaggagctggccgccctgcagaagctggaacacttgtctgtgagccacaacaacctgaccacgcttcatggggagctgtccagcctgccatcgctgcgcgccatcgtggcccgagccaacagtctgaagaattccggagtccccgatgacatcttcaagctagatgatctctcagtcctggacttgagccacaaccagctgacagagtgcccgcgggagctggagaacgccaagaacatgctggtgctgaacctcagccacaacagcatcgacaccatccccaaccagctcttcatcaacctcactgacctactatacctggacctcagcgagaaccgcctggagagcctgcccccgcagatgcgccgcctggtgcacctgcagacgctcgtgctcaatggaaaccccctgctgcatgcacagctccggcagctcccagcgatgacggccctgcagaccctgcacctgcggagcacccagcgcacccagagcaacctgcccaccagcctggagggtctgagcaacctcgcagacgtggatctgtcctgcaatgacctgacacgggtgcccgagtgtctgtacaccctccccagcctgcgccgcctcaacctcagcagcaaccagatcacggagctgtccctgtgcatagaccagtgggtgcacgtggaaactctgaacctgtcccgaaatcagctcacctcactgccctcagccatttgcaagctgagcaagctgaagaagctgtacctgaattccaacaagctggactttgacgggctgccctcaggcattggcaagctcaccaacctggaagagttcatggctgccaacaacaacctggagctggtccctgaaagtctctgcaggtgcccaaagctgaggaaacttgtcctgaacaagaaccacctggtgaccctcccagaagccatccatttcctgacggagatcgaggtcctggatgtgcgggagaaccccaacctggtcatgccgcccaagcccgcagaccgtgccgctgagtggtacaacatcgacttctcgctgcagaaccagctgcggctagcgggtgcctctcctgctaccgtggctgcagctgcagctgcagggagtgggcccaaggaccctatggctcgcaagatgcgactgcggaggcgcaaggattcagcccaggatgaccaggccaagcaggtgctgaagggcatgtcagatgttgcccaggagaagaacaaaaagcaggaggagagcgcagatgcccgggcccccagcgggaaggtgcggcgttgggaccagggcctggagaagccccgccttgactactccgagttcttcacggaggacgtgggccagctgcccggactgaccatctggcagatagagaacttcgtgcctgtgctggtggaggaagccttccacggcaagttctacgaggctgactgctacattgtgctcaagacctttctggatgacagcggctccctcaactgggagatctactactggattggcggggaggccacactcgacaagaaagcttgctctgccatccacgctgtcaacttgcgcaactacctgggtgctgagtgccgcactgtccgggaggagatgggcgatgagagcgaggagttcctgcaggtgtttgacaacgacatctcctacattgagggtggaacagccagtggcttctacactgtggaagacacacactatgtcaccaggatgtatcgtgtgtatgggaaaaagaacatcaagttggagcctgtgcccctcaaggggacctctctggacccaaggtttgttttcctgctggaccgagggctagacatctacgtatggcggggggcccaggccacactgagcagcaccaccaaggccaggctctttgcagagaaaattaacaagaatgagcggaaagggaaggctgagatcacactgctggtgcagggccaggagctcccagagttctgggaggcactgggtggggagccctctgagatcaagaagcacgtgcctgaagacttctggccgccgcagcccaagctgtacaaggtgggcctgggcttgggctacctggagctgccacagatcaactacaagctctccgtggaacataagcagcgtcccaaggtggagctgatgccaagaatgcggctgctgcagagtctgctggacacgcgctgcgtgtacattctggactgttggtccgacgtgttcatctggctcggccgcaagtccccgcgcctggtgcgcgctgccgccctcaagctgggtcaggagctgtgcgggatgctgcaccggccacgccatgccacggtcagccgcagcctcgagggcaccgaggcgcaggtgttcaaggccaagttcaagaattgggacgatgtgttgacggtggactacacacgcaatgcggaggccgtgctgcagagcccgggtctctccgggaaggtgaaacgcgacgccgagaagaaagaccagatgaaggctgacctcactgcgcttttcctgccgcggcagccgcccatgtcgctggccgaggcggagcagctgatggaggagtggaacgaagacctagacggcatggagggtttcgtgctggagggcaagaagtttgcgcggctgccggaagaggagtttggccacttctacacgcaggactgctacgtcttcctctgcaggtactgggtgcctgtggagtacgaggaggaggaaaagaaggaagacaaggaggagaaggccgagggcaaagaaggcgaggaagcaaccgctgaggcagaggagaagcagccagaggaggacttccagtgcatcgtgtacttctggcagggccgtgaagcctccaatatgggctggctcaccttcaccttcagcctgcaaaagaagttcgagagcctcttccctgggaagctggaggtggtacgcatgacgcagcagcaggagaaccccaagttcctgtcccatttcaagaggaagttcatcatccaccggggcaagaggaaggcggtccagggcgcccaacagcccagcctctaccagatccgcaccaacggcagcgccctctgcacccggtgcatccagatcaacaccgactccagcctcctcaactccgagttctgcttcatcctcaaggttccctttgagagtgaggacaaccagggcatcgtgtatgcctgggtgggccgggcatcagaccctgacgaagccaagttggcagaagacatcctgaacaccatgtttgacacctcctacagcaagcaggttatcaacgaaggtgaggagcctgagaacttcttctgggtgggcattggggcacagaagccctatgatgacgatgccgagtacatgaaacacacacgtctcttccggtgctccaacgagaagggctactttgcagtgactgagaaatgctccgacttttgccaagatgacctggcagatgatgacatcatgttgctagacaatggccaagaggtctacatgtgggtggggacccagactagccaggtggagatcaagctgagcctgaaggcctgccaggtatatatccagcacatgcggtccaaggaacatgagcggccgcgccggctgcgcctggtccgcaagggcaatgagcagcacgcctttacccgctgcttccacgcctggagcgccttctgcaaggccctggcctagtaatgaactagtccgtaacttgaaagtatttcgatttcttggctttatatatcttgtggaaaggacgaaaggtctgtgatgcgagtcctaat

SEQ ID NO: 2158 - DNA, 3911 bp, Homo sapiens
  source 1..3911: mol_type = genomic DNA
accgccaccatggaggccaccggggtgctgccgttcgtgcgtggcgtggacctcagcggcaacgacttcaagggcggctacttccctgagaatgtcaaggccatgaccagcctgcggtggctgaagctgaaccgcactggcctctgctacctgcccgaggagctggccgccctgcagaagctggaacacttgtctgtgagccacaacaacctgaccacgcttcatggggagctgtccagcctgccatcgctgcgcgccatcgtggcccgagccaacagtctgaagaattccggagtccccgatgacatcttcaagctagatgatctctcagtcctggacttgagccacaaccagctgacagagtgcccgcgggagctggagaacgccaagaacatgctggtgctgaacctcagccacaacagcatcgacaccatccccaaccagctcttcatcaacctcactgacctactatacctggacctcagcgagaaccgcctggagagcctgcccccgcagatgcgccgcctggtgcacctgcagacgctcgtgctcaatggaaaccccctgctgcatgcacagctccggcagctcccagcgatgacggccctgcagaccctgcacctgcggagcacccagcgcacccagagcaacctgcccaccagcctggagggtctgagcaacctcgcagacgtggatctgtcctgcaatgacctgacacgggtgcccgagtgtctgtacaccctccccagcctgcgccgcctcaacctcagcagcaaccagatcacggagctgtccctgtgcatagaccagtgggtgcacgtggaaactctgaacctgtcccgaaatcagctcacctcactgccctcagccatttgcaagctgagcaagctgaagaagctgtacctgaattccaacaagctggactttgacgggctgccctcaggcattggcaagctcaccaacctggaagagttcatggctgccaacaacaacctggagctggtccctgaaagtctctgcaggtgcccaaagctgaggaaacttgtcctgaacaagaaccacctggtgaccctcccagaagccatccatttcctgacggagatcgaggtcctggatgtgcgggagaaccccaacctggtcatgccgcccaagcccgcagaccgtgccgctgagtggtacaacatcgacttctcgctgcagaaccagctgcggctagcgggtgcctctcctgctaccgtggctgcagctgcagctgcagggagtgggcccaaggaccctatggctcgcaagatgcgactgcggaggcgcaaggattcagcccaggatgaccaggccaagcaggtgctgaagggcatgtcagatgttgcccaggagaagaacaaaaagcaggaggagagcgcagatgcccgggcccccagcgggaaggtgcggcgttgggaccagggcctggagaagccccgccttgactactccgagttcttcacggaggacgtgggccagctgcccggactgaccatctggcagatagagaacttcgtgcctgtgctggtggaggaagccttccacggcaagttctacgaggctgactgctacattgtgctcaagacctttctggatgacagcggctccctcaactgggagatctactactggattggcggggaggccacactcgacaagaaagcttgctctgccatccacgctgtcaacttgcgcaactacctgggtgctgagtgccgcactgtccgggaggagatgggcgatgagagcgaggagttcctgcaggtgtttgacaacgacatctcctacattgagggtggaacagccagtggcttctacactgtggaagacacacactatgtcaccaggatgtatcgtgtgtatgggaaaaagaacatcaagttggagcctgtgcccctcaaggggacctctctggacccaaggtttgttttcctgctggaccgagggctagacatctacgtatggcggggggcccaggccacactgagcagcaccaccaaggccaggctctttgcagagaaaattaacaagaatgagcggaaagggaaggctgagatcacactgctggtgcagggccaggagctcccagagttctgggaggcactgggtggggagccctctgagatcaagaagcacgtgcctgaagacttctggccgccgcagcccaagctgtacaaggtgggcctgggcttgggctacctggagctgccacagatcaactacaagctctccgtggaacataagcagcgtcccaaggtggagctgatgccaagaatgcggctgctgcagagtctgctggacacgcgctgcgtgtacattctggactgttggtccgacgtgttcatctggctcggccgcaagtccccgcgcctggtgcgcgctgccgccctcaagctgggtcaggagctgtgcgggatgctgcaccggccacgccatgccacggtcagccgcagcctcgagggcaccgaggcgcaggtgttcaaggccaagttcaagaattgggacgatgtgttgacggtggactacacacgcaatgcggaggccgtgctgcagagcccgggtctctccgggaaggtgaaacgcgacgccgagaagaaagaccagatgaaggctgacctcactgcgcttttcctgccgcggcagccgcccatgtcgctggccgaggcggagcagctgatggaggagtggaacgaagacctagacggcatggagggtttcgtgctggagggcaagaagtttgcgcggctgccggaagaggagtttggccacttctacacgcaggactgctacgtcttcctctgcaggtactgggtgcctgtggagtacgaggaggaggaaaagaaggaagacaaggaggagaaggccgagggcaaagaaggcgaggaagcaaccgctgaggcagaggagaagcagccagaggaggacttccagtgcatcgtgtacttctggcagggccgtgaagcctccaatatgggctggctcaccttcaccttcagcctgcaaaagaagttcgagagcctcttccctgggaagctggaggtggtacgcatgacgcagcagcaggagaaccccaagttcctgtcccatttcaagaggaagttcatcatccaccggggcaagaggaaggcggtccagggcgcccaacagcccagcctctaccagatccgcaccaacggcagcgccctctgcacccggtgcatccagatcaacaccgactccagcctcctcaactccgagttctgcttcatcctcaaggttccctttgagagtgaggacaaccagggcatcgtgtatgcctgggtgggccgggcatcagaccctgacgaagccaagttggcagaagacatcctgaacaccatgtttgacacctcctacagcaagcaggttatcaacgaaggtgaggagcctgagaacttcttctgggtgggcattggggcacagaagccctatgatgacgatgccgagtacatgaaacacacacgtctcttccggtgctccaacgagaagggctactttgcagtgactgagaaatgctccgacttttgccaagatgacctggcagatgatgacatcatgttgctagacaatggccaagaggtctacatgtgggtggggacccagactagccaggtggagatcaagctgagcctgaaggcctgccaggtatatatccagcacatgcggtccaaggaacatgagcggccgcgccggctgcgcctggtccgcaagggcaatgagcagcacgcctttacccgctgcttccacgcctggagcgccttctgcaaggccctggcctagtaatgaactagtccgtaacttgaaagtatttcgatttcttggctttatatatcttgtggaaaggacgaatagtagcaagtgacgtggaggct

SEQ ID NO: 2159 - DNA, 1466 bp, Homo sapiens
  source 1..1466: mol_type = genomic DNA
accgccaccctggatttttttcgggtagtggaaaaccagcagcctcccgcgacgatgcccctcaacgttagcttcaccaacaggaactatgacctcgactacgactcggtgcagccgtatttctactgcgacgaggaggagaacttctaccagcagcagcagcagagcgagctgcagcccccggcgcccagcgaggatatctggaagaaattcgagctgctgcccaccccgcccctgtcccctagccgccgctccgggctctgctcgccctcctacgttgcggtcacacccttctcccttcggggagacaacgacggcggtggcgggagcttctccacggccgaccagctggagatggtgaccgagctgctgggaggagacatggtgaaccagagtttcatctgcgacccggacgacgagaccttcatcaaaaacatcatcatccaggactgtatgtggagcggcttctcggccgccgccaagctcgtctcagagaagctggcctcctaccaggctgcgcgcaaagacagcggcagcccgaaccccgcccgcggccacagcgtctgctccacctccagcttgtacctgcaggatctgagcgccgccgcctcagagtgcatcgacccctcggtggtcttcccctaccctctcaacgacagcagctcgcccaagtcctgcgcctcgcaagactccagcgccttctctccgtcctcggattctctgctctcctcgacggagtcctccccgcagggcagccccgagcccctggtgctccatgaggagacaccgcccaccaccagcagcgactctgaggaggaacaagaagatgaggaagaaatcgatgttgtttctgtggaaaagaggcaggctcctggcaaaaggtcagagtctggatcaccttctgctggaggccacagcaaacctcctcacagcccactggtcctcaagaggtgccacgtctccacacatcagcacaactacgcagcgcctccctccactcggaaggactatcctgctgccaagagggtcaagttggacagtgtcagagtcctgagacagatcagcaacaaccgaaaatgcaccagccccaggtcctcggacaccgaggagaatgtcaagaggcgaacacacaacgtcttggagcgccagaggaggaacgagctaaaacggagcttttttgccctgcgtgaccagatcccggagttggaaaacaatgaaaaggcccccaaggtagttatccttaaaaaagccacagcatacatcctgtccgtccaagcagaggagcaaaagctcatttctgaagaggacttgttgcggaaacgacgagaacagttgaaacacaaacttgaacagctacggaactcttgtgcgtagtaatgaactagtccgtaacttgaaagtatttcgatttcttggctttatatatcttgtggaaaggacgaccggtgtgtccagggcctcgacaa

SEQ ID NO: 2160 - DNA, 1919 bp, Homo sapiens
  source 1..1919: mol_type = genomic DNA
accgccaccatggcccgaagaccccggcacagcatatatagcagtgacgaggatgatgaggactttgagatgtgtgaccatgactatgatgggctgcttcccaagtctggaaagcgtcacttggggaaaacaaggtggacccgggaagaggatgaaaaactgaagaagctggtggaacagaatggaacagatgactggaaagttattgccaattatctcccgaatcgaacagatgtgcagtgccagcaccgatggcagaaagtactaaaccctgagctcatcaagggtccttggaccaaagaagaagatcagagagtgatagagcttgtacagaaatacggtccgaaacgttggtctgttattgccaagcacttaaaggggagaattggaaaacaatgtagggagaggtggcataaccacttgaatccagaagttaagaaaacctcctggacagaagaggaagacagaattatttaccaggcacacaagagactggggaacagatgggcagaaatcgcaaagctactgcctggacgaactgataatgctatcaagaaccactggaattctacaatgcgtcggaaggtcgaacaggaaggttatctgcaggagtcttcaaaagccagccagccagcagtggccacaagcttccagaagaacagtcatttgatgggttttgctcaggctccgcctacagctcaactccctgccactggccagcccactgttaacaacgactattcctattaccacatttctgaagcacaaaatgtctccagtcatgttccataccctgtagcgttacatgtaaatatagtcaatgtccctcagccagctgccgcagccattcagacacagaaccacacatgcagctaccccgggtggcacagcaccaccattgccgaccacaccagacctcatggagacagtgcacctgtttcctgtttgggagaacaccactccactccatctctgccagcggatcctggctccctacctgaagaaagcgcctcgccagcaaggtgcatgatcgtccaccagggcaccattctggataatgttaagaacctcttagaatttgcagaaacactccaatttatagattctttcttaaacacttccagtaaccatgaaaactcagacttggaaatgccttctttaacttccacccccctcattggtcacaaattgactgttacaacaccatttcatagagaccagactgtgaaaactcaaaaggaaaatactgtttttagaaccccagctatcaaaaggtcaatcttagaaagctctccaagaactcctacaccattcaaacatgcacttgcagctcaagaaattaaatacggtcccctgaagatgctacctcagacaccctctcatctagtagaagatctgcaggatgtgatcaaacaggaatctgatgaatctggaattgttgctgagtttcaagaaaatggaccacccttactgaagaaaatcaaacaagaggtggaatctccaactgataaatcaggaaacttcttctgctcacaccactgggaaggggacagtctgaatacccaactgttcacgcagacctcgcctgtggcagatgcaccgaatattcttacaagctccgttttaatggcaccagcatcagaagatgaagacaatgttctcaaagcatttacagtacctaaaaacaggtccctggcgagccccttgcagccttgtagcagtacctgggaacctgcatcctgtggaaagatggaggagcagatgacatcttccagtcaagctcgtaaatacgtgaatgcattctcagcccggacgctggtcatgtagtaatgaactagtccgtaacttgaaagtatttcgatttcttggctttatatatcttgtggaaaggacgagctcccactcctcgatggtcgcaa

SEQ ID NO: 2161 - DNA, 1913 bp, Homo sapiens
  source 1..1913: mol_type = genomic DNA
accgccaccatggcccgaagaccccggcacagcatatatagcagtgacgaggatgatgaggactttgagatgtgtgaccatgactatgatgggctgcttcccaagtctggaaagcgtcacttggggaaaacaaggtggacccgggaagaggatgaaaaactgaagaagctggtggaacagaatggaacagatgactggaaagttattgccaattatctcccgaatcgaacagatgtgcagtgccagcaccgatggcagaaagtactaaaccctgagctcatcaagggtccttggaccaaagaagaagatcagagagtgatagagcttgtacagaaatacggtccgaaacgttggtctgttattgccaagcacttaaaggggagaattggaaaacaatgtagggagaggtggcataaccacttgaatccagaagttaagaaaacctcctggacagaagaggaagacagaattatttaccaggcacacaagagactggggaacagatgggcagaaatcgcaaagctactgcctggacgaactgataatgctatcaagaaccactggaattctacaatgcgtcggaaggtcgaacaggaaggttatctgcaggagtcttcaaaagccagccagccagcagtggccacaagcttccagaagaacagtcatttgatgggttttgctcaggctccgcctacagctcaactccctgccactggccagcccactgttaacaacgactattcctattaccacatttctgaagcacaaaatgtctccagtcatgttccataccctgtagcgttacatgtaaatatagtcaatgtccctcagccagctgccgcagccattcagagacactataatgatgaagaccctgagaaggaaaagcgaataaaggaattagaattgctcctaatgtcaaccgagaatgagctaaaaggacagcaggtgctaccaacacagaaccacacatgcagctaccccgggtggcacagcaccaccattgccgaccacaccagacctcatggagacagtgcacctgtttcctgtttgggagaacaccactccactccatctctgccagcggatcctggctccctacctgaagaaagcgcctcgccagcaaggtgcatgatcgtccaccagggcaccattctggataatgttaagaacctcttagaatttgcagaaacactccaatttatagattctttcttaaacacttccagtaaccatgaaaactcagacttggaaatgccttctttaacttccacccccctcattggtcacaaattgactgttacaacaccatttcatagagaccagactgtgaaaactcaaaaggaaaatactgtttttagaaccccagctatcaaaaggtcaatcttagaaagctctccaagaactcctacaccattcaaacatgcacttgcagctcaagaaattaaatacggtcccctgaagatgctacctcagacaccctctcatctagtagaagatctgcaggatgtgatcaaacaggaatctgatgaatctggaattgttgctgagtttcaagaaaatggaccacccttactgaagaaaatcaaacaagagaatattcttacaagctccgttttaatggcaccagcatcagaagatgaagacaatgttctcaaagcatttacagtacctaaaaacaggtccctggcgagccccttgcagccttgtagcagtacctgggaacctgcatcctgtggaaagatggaggagcagatgacatcttccagtcaagctcgtaaatacgtgaatgcattctcagcccggacgctggtcatgtagtaatgaactagtccgtaacttgaaagtatttcgatttcttggctttatatatcttgtggaaaggacgaattgattcgggtcctctgtaataa

SEQ ID NO: 2162 - DNA, 2024 bp, Homo sapiens
  source 1..2024: mol_type = genomic DNA
accgccaccatggcccgaagaccccggcacagcatatatagcagtgacgaggatgatgaggactttgagatgtgtgaccatgactatgatgggctgcttcccaagtctggaaagcgtcacttggggaaaacaaggtggacccgggaagaggatgaaaaactgaagaagctggtggaacagaatggaacagatgactggaaagttattgccaattatctcccgaatcgaacagatgtgcagtgccagcaccgatggcagaaagtactaaaccctgagctcatcaagggtccttggaccaaagaagaagatcagagagtgatagagcttgtacagaaatacggtccgaaacgttggtctgttattgccaagcacttaaaggggagaattggaaaacaatgtagggagaggtggcataaccacttgaatccagaagttaagaaaacctcctggacagaagaggaagacagaattatttaccaggcacacaagagactggggaacagatgggcagaaatcgcaaagctactgcctggacgaactgataatgctatcaagaaccactggaattctacaatgcgtcggaaggtcgaacaggaaggttatctgcaggagtcttcaaaagccagccagccagcagtggccacaagcttccagaagaacagtcatttgatgggttttgctcaggctccgcctacagctcaactccctgccactggccagcccactgttaacaacgactattcctattaccacatttctgaagcacaaaatgtctccagtcatgttccataccctgtagcgttacatgtaaatatagtcaatgtccctcagccagctgccgcagccattcagagacactataatgatgaagaccctgagaaggaaaagcgaataaaggaattagaattgctcctaatgtcaaccgagaatgagctaaaaggacagcaggtgctaccaacacagaaccacacatgcagctaccccgggtggcacagcaccaccattgccgaccacaccagacctcatggagacagtgcacctgtttcctgtttgggagaacaccactccactccatctctgccagcggatcctggctccctacctgaagaaagcgcctcgccagcaaggtgcatgatcgtccaccagggcaccattctggataatgttaagaacctcttagaatttgcagaaacactccaatttatagattctttcttaaacacttccagtaaccatgaaaactcagacttggaaatgccttctttaacttccacccccctcattggtcacaaattgactgttacaacaccatttcatagagaccagactgtgaaaactcaaaaggaaaatactgtttttagaaccccagctatcaaaaggtcaatcttagaaagctctccaagaactcctacaccattcaaacatgcacttgcagctcaagaaattaaatacggtcccctgaagatgctacctcagacaccctctcatctagtagaagatctgcaggatgtgatcaaacaggaatctgatgaatctggaattgttgctgagtttcaagaaaatggaccacccttactgaagaaaatcaaacaagaggtggaatctccaactgataaatcaggaaacttcttctgctcacaccactgggaaggggacagtctgaatacccaactgttcacgcagacctcgcctgtggcagatgcaccgaatattcttacaagctccgttttaatggcaccagcatcagaagatgaagacaatgttctcaaagcatttacagtacctaaaaacaggtccctggcgagccccttgcagccttgtagcagtacctgggaacctgcatcctgtggaaagatggaggagcagatgacatcttccagtcaagctcgtaaatacgtgaatgcattctcagcccggacgctggtcatgtagtaatgaactagtccgtaacttgaaagtatttcgatttcttggctttatatatcttgtggaaaggacgacataaactccctattggcctctct

SEQ ID NO: 2163 - DNA, 2378 bp, Homo sapiens
  source 1..2378: mol_type = genomic DNA
accgccaccatggcccgaagaccccggcacagcatatatagcagtgacgaggatgatgaggactttgagatgtgtgaccatgactatgatgggctgcttcccaagtctggaaagcgtcacttggggaaaacaaggtggacccgggaagaggatgaaaaactgaagaagctggtggaacagaatggaacagatgactggaaagttattgccaattatctcccgaatcgaacagatgtgcagtgccagcaccgatggcagaaagtactaaaccctgagctcatcaagggtccttggaccaaagaagaagatcagagagtgatagagcttgtacagaaatacggtccgaaacgttggtctgttattgccaagcacttaaaggggagaattggaaaacaatgtagggagaggtggcataaccacttgaatccagaagttaagaaaacctcctggacagaagaggaagacagaattatttaccaggcacacaagagactggggaacagatgggcagaaatcgcaaagctactgcctggacgaactgataatgctatcaagaaccactggaattctacaatgcgtcggaaggtcgaacaggaaggttatctgcaggagtcttcaaaagccagccagccagcagtggccacaagcttccagaagaacagtcatttgatgggttttgctcaggctccgcctacagctcaactccctgccactggccagcccactgttaacaacgactattcctattaccacatttctgaagcacaaaatgtctccagtcatgttccataccctgtagcgttacatgtaaatatagtcaatgtccctcagccagctgccgcagccattcagagacactataatgatgaagaccctgagaaggaaaagcgaataaaggaattagaattgctcctaatgtcaaccgagaatgagctaaaaggacagcagacacagaaccacacatgcagctaccccgggtggcacagcaccaccattgccgaccacaccagacctcatggagacagtgcacctgtttcctgtttgggagaacaccactccactccatctctgccagcggatcctggctccctacctgaagaaagcgcctcgccagcaaggtgcatgatcgtccaccagggcaccattctggataatgttaagaacctcttagaatttgcagaaacactccaatttatagattctgattcttcatcatggtgtgatctcagcagttttgaattctttgaagaagcagatttttcacctagccaacatcacacaggcaaagccctacagcttcagcaaagagagggcaatgggactaaacctgcaggagaacctagcccaagggtgaacaaacgtatgttgagtgagagttcacttgacccacccaaggtcttacctcctgcaaggcacagcacaattccactggtcatccttcgaaaaaaacggggccaggccagccccttagccactggagactgtagctccttcatatttgctgacgtcagcagttcaactcccaagcgttcccctgtcaaaagcctacccttctctccctcgcagttcttaaacacttccagtaaccatgaaaactcagacttggaaatgccttctttaacttccacccccctcattggtcacaaattgactgttacaacaccatttcatagagaccagactgtgaaaactcaaaaggaaaatactgtttttagaaccccagctatcaaaaggtcaatcttagaaagctctccaagaactcctacaccattcaaacatgcacttgcagctcaagaaattaaatacggtcccctgaagatgctacctcagacaccctctcatctagtagaagatctgcaggatgtgatcaaacaggaatctgatgaatctggaattgttgctgagtttcaagaaaatggaccacccttactgaagaaaatcaaacaagaggtggaatctccaactgataaatcaggaaacttcttctgctcacaccactgggaaggggacagtctgaatacccaactgttcacgcagacctcgcctgtggcagatgcaccgaatattcttacaagctccgttttaatggcaccagcatcagaagatgaagacaatgttctcaaagcatttacagtacctaaaaacaggtccctggcgagccccttgcagccttgtagcagtacctgggaacctgcatcctgtggaaagatggaggagcagatgacatcttccagtcaagctcgtaaatacgtgaatgcattctcagcccggacgctggtcatgtagtaatgaactagtccgtaacttgaaagtatttcgatttcttggctttatatatcttgtggaaaggacgagaatgacctgtgttgtggtcgtgg

SEQ ID NO: 2164 - DNA, 2339 bp, Homo sapiens
  source 1..2339: mol_type = genomic DNA
accgccaccatggcccgaagaccccggcacagcatatatagcagtgacgaggatgatgaggactttgagatgtgtgaccatgactatgatgggctgcttcccaagtctggaaagcgtcacttggggaaaacaaggtggacccgggaagaggatgaaaaactgaagaagctggtggaacagaatggaacagatgactggaaagttattgccaattatctcccgaatcgaacagatgtgcagtgccagcaccgatggcagaaagtactaaaccctgagctcatcaagggtccttggaccaaagaagaagatcagagagtgatagagcttgtacagaaatacggtccgaaacgttggtctgttattgccaagcacttaaaggggagaattggaaaacaatgtagggagaggtggcataaccacttgaatccagaagttaagaaaacctcctggacagaagaggaagacagaattatttaccaggcacacaagagactggggaacagatgggcagaaatcgcaaagctactgcctggacgaactgataatgctatcaagaaccactggaattctacaatgcgtcggaaggtcgaacaggaaggttatctgcaggagtcttcaaaagccagccagccagcagtggccacaagcttccagaagaacagtcatttgatgggttttgctcaggctccgcctacagctcaactccctgccactggccagcccactgttaacaacgactattcctattaccacatttctgaagcacaaaatgtctccagtcatgttccataccctgtagcgttacatgtaaatatagtcaatgtccctcagccagctgccgcagccattcagagacactataatgatgaagaccctgagaaggaaaagcgaataaaggaattagaattgctcctaatgtcaaccgagaatgagctaaaaggacagcaggtgctaccaacacagaaccacacatgcagctaccccgggtggcacagcaccaccattgccgaccacaccagacctcatggagacagtgcacctgtttcctgtttgggagaacaccactccactccatctctgccagcggatcctggctccctacctgaagaaagcgcctcgccagcaaggtgcatgatcgtccaccagggcaccattctggataatgattcttcatcatggtgtgatctcagcagttttgaattctttgaagaagcagatttttcacctagccaacatcacacaggcaaagccctacagcttcagcaaagagagggcaatgggactaaacctgcaggagaacctagcccaagggtgaacaaacgtatgttgagtgagagttcacttgacccacccaaggtcttacctcctgcaaggcacagcacaattccactggtcatccttcgaaaaaaacggggccaggccagccccttagccactggagactgtagctccttcatatttgctgacgtcagcagttcaactcccaagcgttcccctgtcaaaagcctacccttctctccctcgcagttcttaaacacttccagtaaccatgaaaactcagacttggaaatgccttctttaacttccacccccctcattggtcacaaattgactgttacaacaccatttcatagagaccagactgtgaaaactcaaaaggaaaatactgtttttagaaccccagctatcaaaaggtcaatcttagaaagctctccaagaactcctacaccattcaaacatgcacttgcagctcaagaaattaaatacggtcccctgaagatgctacctcagacaccctctcatctagtagaagatctgcaggatgtgatcaaacaggaatctgatgaatctggaattgttgctgagtttcaagaaaatggaccacccttactgaagaaaatcaaacaagaggtggaatctccaactgataaatcaggaaacttcttctgctcacaccactgggaaggggacagtctgaatacccaactgttcacgcagacctcgcctgtggcagatgcaccgaatattcttacaagctccgttttaatggcaccagcatcagaagatgaagacaatgttctcaaagcatttacagtacctaaaaacaggtccctggcgagccccttgcagccttgtagcagtacctgggaacctgcatcctgtggaaagatggaggagcagatgacatcttccagtcaagctcgtaaatacgtgaatgcattctcagcccggacgctggtcatgtagtaatgaactagtccgtaacttgaaagtatttcgatttcttggctttatatatcttgtggaaaggacgagtggacttccagtatcgttagtaa

SEQ ID NO: 2165 - DNA, 2387 bp, Homo sapiens
  source 1..2387: mol_type = genomic DNA
accgccaccatggcccgaagaccccggcacagcatatatagcagtgacgaggatgatgaggactttgagatgtgtgaccatgactatgatgggctgcttcccaagtctggaaagcgtcacttggggaaaacaaggtggacccgggaagaggatgaaaaactgaagaagctggtggaacagaatggaacagatgactggaaagttattgccaattatctcccgaatcgaacagatgtgcagtgccagcaccgatggcagaaagtactaaaccctgagctcatcaagggtccttggaccaaagaagaagatcagagagtgatagagcttgtacagaaatacggtccgaaacgttggtctgttattgccaagcacttaaaggggagaattggaaaacaatgtagggagaggtggcataaccacttgaatccagaagttaagaaaacctcctggacagaagaggaagacagaattatttaccaggcacacaagagactggggaacagatgggcagaaatcgcaaagctactgcctggacgaactgataatgctatcaagaaccactggaattctacaatgcgtcggaaggtcgaacaggaaggttatctgcaggagtcttcaaaagccagccagccagcagtggccacaagcttccagaagaacagtcatttgatgggttttgctcaggctccgcctacagctcaactccctgccactggccagcccactgttaacaacgactattcctattaccacatttctgaagcacaaaatgtctccagtcatgttccataccctgtagcgttacatgtaaatatagtcaatgtccctcagccagctgccgcagccattcagagacactataatgatgaagaccctgagaaggaaaagcgaataaaggaattagaattgctcctaatgtcaaccgagaatgagctaaaaggacagcaggtgctaccaacacagaaccacacatgcagctaccccgggtggcacagcaccaccattgccgaccacaccagacctcatggagacagtgcacctgtttcctgtttgggagaacaccactccactccatctctgccagcggatcctggctccctacctgaagaaagcgcctcgccagcaaggtgcatgatcgtccaccagggcaccattctggataatgttaagaacctcttagaatttgcagaaacactccaatttatagattctgattcttcatcatggtgtgatctcagcagttttgaattctttgaagaagcagatttttcacctagccaacatcacacaggcaaagccctacagcttcagcaaagagagggcaatgggactaaacctgcaggagaacctagcccaagggtgaacaaacgtatgttgagtgagagttcacttgacccacccaaggtcttacctcctgcaaggcacagcacaattccactggtcatccttcgaaaaaaacggggccaggccagccccttagccactggagactgtagctccttcatatttgctgacgtcagcagttcaactcccaagcgttcccctgtcaaaagcctacccttctctccctcgcagttcttaaacacttccagtaaccatgaaaactcagacttggaaatgccttctttaacttccacccccctcattggtcacaaattgactgttacaacaccatttcatagagaccagactgtgaaaactcaaaaggaaaatactgtttttagaaccccagctatcaaaaggtcaatcttagaaagctctccaagaactcctacaccattcaaacatgcacttgcagctcaagaaattaaatacggtcccctgaagatgctacctcagacaccctctcatctagtagaagatctgcaggatgtgatcaaacaggaatctgatgaatctggaattgttgctgagtttcaagaaaatggaccacccttactgaagaaaatcaaacaagaggtggaatctccaactgataaatcaggaaacttcttctgctcacaccactgggaaggggacagtctgaatacccaactgttcacgcagacctcgcctgtggcagatgcaccgaatattcttacaagctccgttttaatggcaccagcatcagaagatgaagacaatgttctcaaagcatttacagtacctaaaaacaggtccctggcgagccccttgcagccttgtagcagtacctgggaacctgcatcctgtggaaagatggaggagcagatgacatcttccagtcaagctcgtaaatacgtgaatgcattctcagcccggacgctggtcatgtagtaatgaactagtccgtaacttgaaagtatttcgatttcttggctttatatatcttgtggaaaggacgatgctgataagggccgaccctggcc

SEQ ID NO: 2166 - DNA, 1769 bp, Homo sapiens
  source 1..1769: mol_type = genomic DNA
accgccaccatggcccgaagaccccggcacagcatatatagcagtgacgaggatgatgaggactttgagatgtgtgaccatgactatgatgggctgcttcccaagtctggaaagcgtcacttggggaaaacaaggtggacccgggaagaggatgaaaaactgaagaagctggtggaacagaatggaacagatgactggaaagttattgccaattatctcccgaatcgaacagatgtgcagtgccagcaccgatggcagaaagtactaaaccctgagctcatcaagggtccttggaccaaagaagaagatcagagagtgatagagcttgtacagaaatacggtccgaaacgttggtctgttattgccaagcacttaaaggggagaattggaaaacaatgtagggagaggtggcataaccacttgaatccagaagttaagaaaacctcctggacagaagaggaagacagaattatttaccaggcacacaagagactggggaacagatgggcagaaatcgcaaagctactgcctggacgaactgataatgctatcaagaaccactggaattctacaatgcgtcggaaggtcgaacaggaaggttatctgcaggagtcttcaaaagccagccagccagcagtggccacaagcttccagaagaacagtcatttgatgggttttgctcaggctccgcctacagctcaactccctgccactggccagcccactgttaacaacgactattcctattaccacatttctgaagcacaaaatgtctccagtcatgttccataccctgtagcgttacatgtaaatatagtcaatgtccctcagccagctgccgcagccattcagagacactataatgatgaagaccctgagaaggaaaagcgaataaaggaattagaattgctcctaatgtcaaccgagaatgagctaaaaggacagcaggtgctaccattcttaaacacttccagtaaccatgaaaactcagacttggaaatgccttctttaacttccacccccctcattggtcacaaattgactgttacaacaccatttcatagagaccagactgtgaaaactcaaaaggaaaatactgtttttagaaccccagctatcaaaaggtcaatcttagaaagctctccaagaactcctacaccattcaaacatgcacttgcagctcaagaaattaaatacggtcccctgaagatgctacctcagacaccctctcatctagtagaagatctgcaggatgtgatcaaacaggaatctgatgaatctggaattgttgctgagtttcaagaaaatggaccacccttactgaagaaaatcaaacaagaggtggaatctccaactgataaatcaggaaacttcttctgctcacaccactgggaaggggacagtctgaatacccaactgttcacgcagacctcgcctgtggcagatgcaccgaatattcttacaagctccgttttaatggcaccagcatcagaagatgaagacaatgttctcaaagcatttacagtacctaaaaacaggtccctggcgagccccttgcagccttgtagcagtacctgggaacctgcatcctgtggaaagatggaggagcagatgacatcttccagtcaagctcgtaaatacgtgaatgcattctcagcccggacgctggtcatgtagtaatgaactagtccgtaacttgaaagtatttcgatttcttggctttatatatcttgtggaaaggacgaatctactaattgacagtcgtccca

SEQ ID NO: 2167 - DNA, 2015 bp, Homo sapiens
  source 1..2015: mol_type = genomic DNA
accgccaccatggcccgaagaccccggcacagcatatatagcagtgacgaggatgatgaggactttgagatgtgtgaccatgactatgatgggctgcttcccaagtctggaaagcgtcacttggggaaaacaaggtggacccgggaagaggatgaaaaactgaagaagctggtggaacagaatggaacagatgactggaaagttattgccaattatctcccgaatcgaacagatgtgcagtgccagcaccgatggcagaaagtactaaaccctgagctcatcaagggtccttggaccaaagaagaagatcagagagtgatagagcttgtacagaaatacggtccgaaacgttggtctgttattgccaagcacttaaaggggagaattggaaaacaatgtagggagaggtggcataaccacttgaatccagaagttaagaaaacctcctggacagaagaggaagacagaattatttaccaggcacacaagagactggggaacagatgggcagaaatcgcaaagctactgcctggacgaactgataatgctatcaagaaccactggaattctacaatgcgtcggaaggtcgaacaggaaggttatctgcaggagtcttcaaaagccagccagccagcagtggccacaagcttccagaagaacagtcatttgatgggttttgctcaggctccgcctacagctcaactccctgccactggccagcccactgttaacaacgactattcctattaccacatttctgaagcacaaaatgtctccagtcatgttccataccctgtagcgttacatgtaaatatagtcaatgtccctcagccagctgccgcagccattcagagacactataatgatgaagaccctgagaaggaaaagcgaataaaggaattagaattgctcctaatgtcaaccgagaatgagctaaaaggacagcagacacagaaccacacatgcagctaccccgggtggcacagcaccaccattgccgaccacaccagacctcatggagacagtgcacctgtttcctgtttgggagaacaccactccactccatctctgccagcggatcctggctccctacctgaagaaagcgcctcgccagcaaggtgcatgatcgtccaccagggcaccattctggataatgttaagaacctcttagaatttgcagaaacactccaatttatagattctttcttaaacacttccagtaaccatgaaaactcagacttggaaatgccttctttaacttccacccccctcattggtcacaaattgactgttacaacaccatttcatagagaccagactgtgaaaactcaaaaggaaaatactgtttttagaaccccagctatcaaaaggtcaatcttagaaagctctccaagaactcctacaccattcaaacatgcacttgcagctcaagaaattaaatacggtcccctgaagatgctacctcagacaccctctcatctagtagaagatctgcaggatgtgatcaaacaggaatctgatgaatctggaattgttgctgagtttcaagaaaatggaccacccttactgaagaaaatcaaacaagaggtggaatctccaactgataaatcaggaaacttcttctgctcacaccactgggaaggggacagtctgaatacccaactgttcacgcagacctcgcctgtggcagatgcaccgaatattcttacaagctccgttttaatggcaccagcatcagaagatgaagacaatgttctcaaagcatttacagtacctaaaaacaggtccctggcgagccccttgcagccttgtagcagtacctgggaacctgcatcctgtggaaagatggaggagcagatgacatcttccagtcaagctcgtaaatacgtgaatgcattctcagcccggacgctggtcatgtagtaatgaactagtccgtaacttgaaagtatttcgatttcttggctttatatatcttgtggaaaggacgaaaggcacgggtcggcctcttcgtt

SEQ ID NO: 2168 - DNA, 881 bp, Homo sapiens
  source 1..881: mol_type = genomic DNA
accgccaccatggatccaggttcactgctggcctataatacaacctcccacaccgaccaatcctcacgattgagtgtcaaagaagacccttcttatgactcagtcagaagaggagcttggggcaataacatgaattctggcctcaacaaaagtcctccccttggaggggcacaaacgatcagtaagaatacagagcaacggccccagccagatccgtatcagatcctgggcccgaccagcagtcgcctagccaaccctggaagcgggcagatccagctgtggcaattcctcctggagctgctctccgacagcgccaacgccagctgtatcacctgggaggggaccaacggggagttcaaaatgacggaccccgatgaggtggccaggcgctggggcgagcggaaaagcaagcccaacatgaattacgacaagctgagccgggccctccgttattactatgataaaaacattatgaccaaagtgcacggcaaaagatatgcttacaaatttgacttccacggcattgcccaggctctgcagccacatccgaccgagtcgtccatgtacaagtacccttctgacatctcctacatgccttcctaccatgcccaccagcagaaggtgaactttgtccctccccatccatcctccatgcctgtcacttcctccagcttctttggagccgcatcacaatactggacctcccccacggggggaatctaccccaaccccaacgtcccccgccatcctaacacccacgtgccttcacacttaggcagctactactagtaatgaactagtccgtaacttgaaagtatttcgatttcttggctttatatatcttgtggaaaggacgacctaccgcaaacatttaaggtatt

SEQ ID NO: 2169 - DNA, 1361 bp, Homo sapiens
  source 1..1361: mol_type = genomic DNA
accgccaccatgactgcctcggggagtcctgactacgggcagccccacaagatcaaccccctcccaccacagcaggagtggatcaatcagccagtgagggtcaacgtcaagcgggagtatgaccacatgaatggatccagggagtctccggtggactgcagcgttagcaaatgcagcaagctggtgggcggaggcgagtccaaccccatgaactacaacagctatatggacgagaagaatggcccccctcctcccaacatgaccaccaacgagaggagagtcatcgtccccgcagaccccacactgtggacacaggagcatgtgaggcaatggctggagtgggccataaaggagtacagcttgatggagatcgacacatcctttttccagaacatggatggcaaggaactgtgtaaaatgaacaaggaggacttcctccgcgccaccaccctctacaacacggaagtgctgttgtcacacctcagttacctcagggaaagttcactgctggcctataatacaacctcccacaccgaccaatcctcacgattgagtgtcaaagaagacccttcttatgactcagtcagaagaggagcttggggcaataacatgaattctggcctcaacaaaagtcctccccttggaggggcacaaacgatcagtaagaatacagagcaacggccccagccagatccgtatcagatcctgggcccgaccagcagtcgcctagccaaccctggaagcgggcagatccagctgtggcaattcctcctggagctgctctccgacagcgccaacgccagctgtatcacctgggaggggaccaacggggagttcaaaatgacggaccccgatgaggtggccaggcgctggggcgagcggaaaagcaagcccaacatgaattacgacaagctgagccgggccctccgttattactatgataaaaacattatgaccaaagtgcacggcaaaagatatgcttacaaatttgacttccacggcattgcccaggctctgcagccacatccgaccgagtcgtccatgtacaagtacccttctgacatctcctacatgccttcctaccatgcccaccagcagaaggtgaactttgtccctccccatccatcctccatgcctgtcacttcctccagcttctttggagccgcatcacaatactggacctcccccacggggggaatctaccccaaccccaacgtcccccgccatcctaacacccacgtgccttcacacttaggcagctactactagtaatgaactagtccgtaacttgaaagtatttcgatttcttggctttatatatcttgtggaaaggacgatgccgctcgcacgttcccttcagg

SEQ ID NO: 2170 - DNA, 1262 bp, Homo sapiens
  source 1..1262: mol_type = genomic DNA
accgccaccatggagggaggactggcaggcgagcgggcgagggagtctccggtggactgcagcgttagcaaatgcagcaagctggtgggcggaggcgagtccaaccccatgaactacaacagctatatggacgagaagaatggcccccctcctcccaacatgaccaccaacgagaggagagtcatcgtccccgcagaccccacactgtggacacaggagcatgtgaggcaatggctggagtgggccataaaggagtacagcttgatggagatcgacacatcctttttccagaacatggatggcaaggaactgtgtaaaatgaacaaggaggacttcctccgcgccaccaccctctacaacacggaagtgctgttgtcacacctcagttacctcagggaaagttcactgctggcctataatacaacctcccacaccgaccaatcctcacgattgagtgtcaaagaagacccttcttatgactcagtcagaagaggagcttggggcaataacatgaattctggcctcaacaaaagtcctccccttggaggggcacaaacgatcagtaagaatacagagcaacggccccagccagatccgtatcagatcctgggcccgaccagcagtcgcctagccaaccctggaagcgggcagatccagctgtggcaattcctcctggagctgctctccgacagcgccaacgccagctgtatcacctgggaggggaccaacggggagttcaaaatgacggaccccgatgaggtggccaggcgctggggcgagcggaaaagcaagcccaacatgaattacgacaagctgagccgggccctccgttattactatgataaaaacattatgaccaaagtgcacggcaaaagatatgcttacaaatttgacttccacggcattgcccaggctctgcagccacatccgaccgagtcgtccatgtacaagtacccttctgacatctcctacatgccttcctaccatgcccaccagcagaaggtgaactttgtccctccccatccatcctccatgcctgtcacttcctccagcttctttggagccgcatcacaatactggacctcccccacggggggaatctaccccaaccccaacgtcccccgccatcctaacacccacgtgccttcacacttaggcagctactactagtaatgaactagtccgtaacttgaaagtatttcgatttcttggctttatatatcttgtggaaaggacgaagcatcaacgcgcccgctagacgg

SEQ ID NO: 2171 - DNA, 1460 bp, Homo sapiens
  source 1..1460: mol_type = genomic DNA
accgccaccatggacgggactattaaggaggctctgtcggtggtgagcgacgaccagtccctctttgactcagcgtacggagcggcagcccatctccccaaggccgacatgactgcctcggggagtcctgactacgggcagccccacaagatcaaccccctcccaccacagcaggagtggatcaatcagccagtgagggtcaacgtcaagcgggagtatgaccacatgaatggatccagggagtctccggtggactgcagcgttagcaaatgcagcaagctggtgggcggaggcgagtccaaccccatgaactacaacagctatatggacgagaagaatggcccccctcctcccaacatgaccaccaacgagaggagagtcatcgtccccgcagaccccacactgtggacacaggagcatgtgaggcaatggctggagtgggccataaaggagtacagcttgatggagatcgacacatcctttttccagaacatggatggcaaggaactgtgtaaaatgaacaaggaggacttcctccgcgccaccaccctctacaacacggaagtgctgttgtcacacctcagttacctcagggaaagttcactgctggcctataatacaacctcccacaccgaccaatcctcacgattgagtgtcaaagaagacccttcttatgactcagtcagaagaggagcttggggcaataacatgaattctggcctcaacaaaagtcctccccttggaggggcacaaacgatcagtaagaatacagagcaacggccccagccagatccgtatcagatcctgggcccgaccagcagtcgcctagccaaccctggaagcgggcagatccagctgtggcaattcctcctggagctgctctccgacagcgccaacgccagctgtatcacctgggaggggaccaacggggagttcaaaatgacggaccccgatgaggtggccaggcgctggggcgagcggaaaagcaagcccaacatgaattacgacaagctgagccgggccctccgttattactatgataaaaacattatgaccaaagtgcacggcaaaagatatgcttacaaatttgacttccacggcattgcccaggctctgcagccacatccgaccgagtcgtccatgtacaagtacccttctgacatctcctacatgccttcctaccatgcccaccagcagaaggtgaactttgtccctccccatccatcctccatgcctgtcacttcctccagcttctttggagccgcatcacaatactggacctcccccacggggggaatctaccccaaccccaacgtcccccgccatcctaacacccacgtgccttcacacttaggcagctactactagtaatgaactagtccgtaacttgaaagtatttcgatttcttggctttatatatcttgtggaaaggacgatatcgcgcttaaagtcgttgccat

SEQ ID NO: 2172 - DNA, 3083 bp, Homo sapiens
  source 1..3083: mol_type = genomic DNA
accgccaccatggcctcggcagctgtggagagcttcgtgaccaagcaactggacctgctggagcttgagagagacgcggaggtggaggagcgcaggtcctggcaggagaacatctctctgaaagagctccagagccgaggcgtgtgtttgctgaagctgcaggtatccagccagcgcactgggctgtacggacggctgctggtcacctttgagcccaggcgatacgggtccgcggcagctcttcccagtaacagctttacttctggtgatatcgtgggcctgtacgatgctgctaatgagggcagtcagctggccactgggatcttgacccgggtcacccagaagtcggtcacggtggcctttgatgagtcccacgatttccagttgagcttggaccgagagaattcctacagactgttaaaacttgccaatgatgtcacttacaggcgactgaaaaaagccctgattgctctaaagaagtatcattctggcccagcctcctcactcatagaagtgctctttggcagatctgctcccagtcctgccagtgaaatacacccgctgacattcttcaacacctgcctggacacctcccagaaagaagcggttttatttgcgctgtctcagaaagaacttgccatcatccatggacctcctggcactgggaaaaccacgactgtggttgagatcattcttcaagctgtgaaacaaggcttaaaggttctgtgctgcgccccctccaacatcgccgtggacaatctggtggagcgcctggctctgtgtaagcagcggattctgcgcctgggacaccctgcccgcctcctggagtccattcagcagcactccctggatgcggttttagcgcggagcgacagtgcccagattgttgcagatatcaggaaggacatcgaccaggtctttgtgaaaaacaaaaagacccaggataagagagagaaaagtaattttcgaaatgaaattaagctgttaagaaaagaactgaaggagagggaagaagcagctatgctcgagagcctcacttcggcaaacgtggtccttgcaacaaacacaggtgcgtctgccgatggccccctgaagttgctgcccgagagctacttcgacgtggtggtcattgacgagtgtgcccaggccctcgaggcgagctgctggatccccctgctgaaggccagaaagtgcatcctggcgggcgatcacaagcagctgccccccaccacagtctctcacaaggctgcgctggcaggactgtcactcagcctgatggaacgcctggctgaggagtacggcgcgagggtggtgcggacactgacggtgcagtaccgcatgcaccaggctatcatgcgctgggcctcagacaccatgtaccttgggcagctcacagcccactcttccgtggcaaggcacctcctgagggacctcccaggtgtggctgccacagaagagacgggtgtgcccctgctcttggtggacaccgccggctgcgggctgtttgagctggaggaggaggacgaacagtcgaaagggaaccctggcgaagtccgcctcgtcagtttgcacatccaggctctggtggacgctggtgttccagcccgtgacattgctgtggtctcgccatacaacctccaggtggacctgctcagacagagccttgtgcacaggcaccctgagcttgaaatcaagtctgtcgatggcttccaaggccgagagaaggaggccgtgatactgtccttcgtcagatccaacaggaaaggtgaagttggttttcttgctgaggaccggaggatcaacgtggctgtcacccgtgcccgacgccacgtggcggtcatctgtgactcccgtactgtcaacaaccatgcatttttgaagaccctggtggagtatttcacacagcatggggaagtacgcacggcctttgagtatcttgacgatattgtcccagaaaactattcccatgagaactcccagggttccagccacgctgccaccaagccccagggacctgctacgtccaccaggaccggaagccagcggcaggagggaggccaggaggctgcagcacctgccagacagggccggaagaagccggctgggaagtctctggcctctgaagctccatctcagcccagcctcaacggaggcagcccagagggagtggagagccaagatggcgtggaccacttccgggccatgatagtggagttcatggccagcaagaagatgcagttggagtttcctccttccctcaattcccacgacaggctgcgggtccaccaaatagccgaggagcacgggctgaggcacgacagttccggggaagggaagaggaggttcatcactgtgagcaagagggccccgcgaccccgagcagccctgggacccccagcagggaccggtggcccagcccctctccagccagtgccccctacccctgcgcagacagagcagcctcccagggagcagcgtggcccagaccagcctgatctgaggacgctgcacctggagagactgcagagggtcaggagcgcgcaggggcagcccgccagcaaggagcagcaggcctcagggcagcagaaacttccagaaaagaaaaagaaaaaagccaaaggacatccggccacagatctgcccacggaggaggactttgaggccctggtttctgccgccgttaaggctgataacacctgcggctttgccaagtgcacagccggcgtcacaaccctgggccagttctgccagctctgcagccgccgctactgcctcagccaccacctgcccgagatccatggctgcggtgagagggctcgcgcccatgcccggcagagaatcagccgggaaggggtcctctatgccggcagcgggaccaagaacggatccctggacccagccaagagggcccagctgcagaggaggctggataagaagctgagtgagctcagcaaccagaggaccagccggaggaaggagagggggacgtagtaatgaactagtccgtaacttgaaagtatttcgatttcttggctttatatatcttgtggaaaggacgacaatgtatatcttaatagtatggt

SEQ ID NO: 2173 - DNA, 4511 bp, Homo sapiens
  source 1..4511: mol_type = genomic DNA
accgccaccatggatgtagatgctgaaagagagaagataacacaggagatcaaggagctggaaaggattttggatcccggctcctcgggctcccacgtggagatctcagaatcaagtctcgagtcagattctgaagcagattcactgccttctgaggacttggatcctgccgatcccccgatctcggaagaagaaaggtggggcgaagccagcaatgacgaggacgatcccaaggataaaaccctccctgaagacccagaaacctgcctgcagctgaacatggtctaccaggaggtcatccaggagaagctggctgaggccaacctgctgctggcccagaaccgggagcagcaggaggaactcatgagggatctggctgggtccaaaggcaccaaggtgaaagatggcaaaagcctgcccccaagcacatacatggggcacttcatgaagccgtatttcaaggacaaggtcacgggcgtggggccacctgccaacgaggacacacgagagaaggctgcccaggggatcaaggctttcgaggagctccttgtgaccaaatggaaaaactgggaaaaggccttgctccgaaagtcagtggtgagtgaccgcctgcagcgattgcttcagcccaagttactgaagctcgagtacttgcaccagaagcagagcaaagtctccagtgagctggagaggcaagccctggagaagcagggcagggaagccgagaaggagatccaggacatcaaccagcttccagaagaggccttgctgggaaacaggctggacagccacgactgggagaagatttccaatattaactttgaaggcagccgcagtgcagaggagatccggaagttctggcagaactcggagcaccccagcatcaacaagcaggagtggagcagggaggaggaggagcggctgcaggcgatcgcggctgcacacggccacctggagtggcagaagattgcagaggagctggggaccagccgcagcgccttccagtgcctgcagaaattccagcagcacaacaaagctctgaaacgcaaggagtggacagaggaggaggaccgcatgctcacgcagctggtgcaggagatgcgcgtcggcagccacatcccctaccgcagaattgtctactatatggaagggagagactccatgcagctgatctaccgatggaccaagagcttggatcctggtctgaagaagggttactgggccccggaggaagatgctaagttgcttcaagctgttgccaaatacggggagcaggattggtttaaaatccgggaagaggtgccaggtaggagcgatgcccagtgccgagatcggtatctcaggagattacatttcagcttgaaaaagggtcggtggaatttaaaagaagaggaacagttaattgaattaatagaaaaatatggtgtcggtcactgggcaaaaatagcttctgagctgccccatcggtctggctcccagtgtctgagcaagtggaagatcatgatggggaagaagcagggtctccggaggcggcggcggagggcccgtcacagcgtccggtggagctctaccagcagcagcggcagcagcagtggcagcagtggagggagcagcagcagcagcagcagcagcagcgaggaggacgagccagagcaggcgcaggccggggagggtgacagagcgctgctgtccccacagtacatggtcccggacatggacctgtgggttcctgccaggcagagcaccagccagccatggagaggaggggcaggggcctggctgggaggccccgctgcctccctcagccctcccaaggggtccagtgccagccagggcggcagcaaggaagcttccaccacagccgcggctcctggagaggagacgagtccggtgcaggtccctgccagggcccacggccctgtcccgaggtctgcccaggcctcccactcagcagacactcgcccggcgggcgcagagaagcaggccctggagggtgggaggcgtctgctgacagtgcctgtggagaccgtgctgagggtgctcagggccaacacggctgctcggagctgcacacagaaagagcagctgaggcagccacccctgcccacctcatccccaggggtcagctctggtgacagcgtggcccgatcccatgtgcagtggctacggcacagagccacccagagtgggcagcggcgctggagacacgctctgcaccggaggctcctgaaccgcaggctgctgctggctgtgaccccttgggtaggggacgttgtcgtgccctgcacacaggcttcccagagacccgccgtagtgcagactcaagcggatggcctcagggagcagctgcagcaggcccgcctggccagcacccctgtgtttaccctgtttacccagctgttccacatcgatactgccggctgcttggaggtcgtccgagagaggaaggccctgccacccaggctgccccaggctggtgctcgggacccaccagttcatcttctgcaggcatcctcaagtgcccagagcaccccaggccacctcttcccaaacgtgccggctcaagaagcctcaaagagtgccagccacaaagggagccgaagactggcgtccagccgggtggagcgcaccctaccccaggcgtccctgctggcttcaaccggcccccggcccaagcccaagactgtgtcggagctgcttcaggagaagcggcttcaggaggcccgtgccagggaggccacccggggcccggtggtgctcccgtcccagctgctggtctcctcgtctgtgatcctccagccccctctaccacacaccccacacggccgcccagccccgggtcccaccgtcttaaatgtaccgctctctgggcctggggcccccgcggcagccaaacctggcacttctggctcctggcaggaggctgggacttcagccaaggacaagagactctccaccatgcaagccctgcccctcgctcctgtcttctcagaggccgagggcacagcccctgctgcttcccaagcccctgccctgggccccggccagatctctgtgagctgccccgagagtggtctcggacagtctcaggcccccgctgcatcccggaagcagggcctgcctgaggcgccaccctttctccccgcagcccccagccccaccccactgcccgtccagcccctcagcctgacgcacataggagggccacatgtggcgaccagtgtccccctgcctgtcacctgggtgctcacagcccaggggcttctccctgttcctgtaccagctgtggtgagccttcccaggccagcagggacccctggccccgcagggctgctggccactctgctgcctcccctgactgagactcgggcggcccagggccccagggccccagcgttgagcagctcttggcagcccccagccaatatgaacagggaaccggagccttcctgcaggacagacaccccagctcctcccacacacgccctctcccaaagtcctgcagaagcggatggcagtgtggcctttgtccctggagaggcccaggtggccagggagatacctgagcccaggacgtcctcccacgctgaccctcctgaagcagaacccccttggtccgggaggctgccagccttcggtggtgtcatcccagcaactgagccaagggggacgccggggtccccctcagggacacaggagcccagggggcctctgggcctggagaagctgcccctgcgccagcctgggcctgagaagggggccctggacctggagaagccgcccctaccccagcctgggcctgagaagggggccctggacctgggcctgctgtcccaggagggcgaggcggccacacagcagtggctggggggccagcggggggtgcgtgtgcctcttctgggcagcagactgccctatcagcccccagccctgtgcagcctgcgagctctgtccggtctcctactccacaagaaggccctggagcacaaggccacctccctggtggtggggggcgaggctgagcggccggccggagcactgcaagcctcactggggctggtgcgggggcagctccaggacaacccggcctacctcctgttgcgggcgcggttcctggcagccttcaccctccctgcgctcctggccaccctggccccccaaggcgtccgcaccaccctctcagtaccttcgagggtgggctctgagagtgaggatgaagacctcctgagtgagctggaacttgcagacagggacgggcagccgggctgcacgacagccacatgccccattcagggagccccagactctggtaaatgctctgcttcctcctgcctggatacttctaatgaccctgacgacctggacgtgctcagaacccggcatgccaggcacacccggaagcggaggcggctggtgtagtaatgaactagtccgtaacttgaaagtatttcgatttcttggctttatatatcttgtggaaaggacgacgtgtgtttacatgcgactcattt

SEQ ID NO: 2174 - DNA, 2183 bp, Homo sapiens
  source 1..2183: mol_type = genomic DNA
accgccaccatggactcagtggcatttgaggatgtggctataaacttcacctgtgaggagtgggctttgctgggtccatcacagaagagtctctacagagatgtgatgcaggaaaccatcagaaacctggactgtataggaatgatatggcaaaatcatgatatagaagaagatcagtacaaagatctcagaagaaatctaagatgtcatatggtagagagagcctgtgaaattaaagataatagtcaatgtggaggaccctttacccagactcaagacagtattgtgaacgagaaaatacctggagtagatccatgggaaagcagtgagtgtacagacgtcctcatgggtcgttcatctcttaattgctacgttagagttgacagtgaacacaaaccatgtgagtatcaagaatatggagagaagccatatacacatacacaatgtgggacagctttcagttatcagccctgctttcaaatacatgaaagacctcagcatggaaagaaactctatgattgtaaggaatgtgcaagcttcagttctcttgaaaaccttcaaagacacatggcagcacaccatggagatggacctcgtatatgtaagttgtgtggaaacgcctttatttggcctagtttatttcatatgcttagaagaactcacactgaagagaaaccatatgaatatgagcagtgttctacagcgtttcctgcttatagttccactctaagacatgaaagaacacacagtggagagaaaccctatcaatgtaaacaatgtgggaaagccttcagttgttcctgttacactcaactatatgaaaggactcacactggagaacaatcctatgaatgtaagcaatgtgggaaagcattttatcatcttggaagctttcaaagacacatgatagtgcacactggagatgggcctcataaatgtaagatatgtggaaaaggctttctttctcccagttcagttcgaagacataaaagaactcacactggagagaaaccgtatgaatgtaagtattgtgggaaagcattctctgattgcacaggttttcgaagacacatgataacgcacactggagatggacctcataaatgcaaggtatgtgggaaagcctttgattctcccagtttatgtcgaaggcatgaaacaactcatactggggagaaaccctataaatgtgaatgtgggaaagcctttagtgatttctattactttcgaaatcatgaaactactcacactggagagaagccatataaatgtaaacaatgtggaaaagccttcatttgttgcacttaccttcaaatacatgaaagaattcacactggggagagaccctataaatgtaaacaatgcggaaaagccttcaggtcttccaattacattcgagtacatgaaaagactcacactggagaaaagccctatgaatgtaagcagtgtggaaaagcactttctcatctgaaaagctttcagagacacatgataatgcacactggagatggacctcataaatgtaagatatgtgggaaaagctttgattctcccagttcatttcgaagacatgaaagaattcacactggggagagaccctataagtgtaaactatgtgggaaaggcttcaggtcttccagttacattcaactacatgaaaggactcacactggagagaaaccctatggttgtcagcaatgtgggaaagcattatctgatctctcaagctttcgaagacacatgataacacatactggaaatggacctcataaatgtaagatatgtgggaaaggctttgattatcccagttcagtgcaaagacatgaaagaactcacactggagagaaaccctatgaatgcaaggaatgtggtaaagccttcagtcattcaagttacttacgaatacacgaaagagttcatactggagagaagccgtataaatgtaaggaatgtgggaaaccattccattgtcccagtgcctttcataaacatgaaaggacccacagtatggagaaaccctataagtgtaaagaatgtggggaagcatttcattgtatcagttcctttcataaacatgaaatgactcactagtaatgaactagtccgtaacttgaaagtatttcgatttcttggctttatatatcttgtggaaaggacgagctgagtgggcggtctggcaactt

SEQ ID NO: 2175 - DNA, 4697 bp, Homo sapiens
  source 1..4697: mol_type = genomic DNA
accgccaccatgccctcggacttcatctcattgctcagcgcggacctagacctggaatcgcccaagtccctctactcgcgagaatctgtctatgatcttctcccaaaggagttacagttacctccatctagagaaacatctgtagcatcaatgagtcagacaagcggtggtgaggcaggctcgcctcctccagctgttgttgctgctgatgcttcttcagctccctcctcttcctccatgggcggtgcttgcagctcctttaccacctcttccagccctaccatttattctacctcagtcaccgacagcaaggctatgcaagtggagagctgctcctcagccgtgggggtaagtaacagaggggtaagtgaaaagcagttaaccagtaacacagttcagcagcatccatcaacaccgaagaggcacacagtcttgtacatctcaccaccacctgaggacttgctggataacagtcggatgtcctgccaggatgaggggtgtggattggaatctgagcagagctgcagtatgtggatggaggattccccctccaacttcagtaacatgagcaccagttcctacaatgataacactgaggtacctcgtaaatcacgaaaacgaaatccaaagcagaggccgggggtcaaacgacgagattgtgaagaatctaatatggatatatttgatgccgacagtgccaaagcacctcactatgtgctttctcagcttaccacggacaacaaaggcaactcaaaagcgggaaatggaacattggaaaaccaaaaaggaactggagtaaagaagagccctatgttgtgtggacaatatcctgttaaaagtgagggaaaggagctgaagatagttgtacaacctgagacacagcaccgagctcggtacctgactgagggcagccgtggctcagtgaaagatagaacacagcaaggctttcctacagtaaagctggaaggccataatgaacctgtagtgttgcaagtgtttgtgggcaacgactctggacgagtgaaaccacatggattttatcaggcctgcagagtaactggacgaaatacaactccttgcaaagaagtggacattgaaggcactactgttatagaagtcggccttgatcctagcaacaacatgacactggcggtggactgcgtagggatattgaaattgaggaatgctgatgtcgaagccagaataggaattgctggttccaagaagaaaagcactcgtgccagattggtttttcgagttaatatcatgaggaaagatggctccactttgacactgcaaacaccctcttctccaattttgtgtactcagccagcaggagtgccagaaatcttaaagaaaagcttgcatagctgttcagtgaaaggagaagaagaagtgtttttaatcggcaagaactttctgaaaggaactaaagttattttccaagaaaatgtttctgatgaaaactcttggaagtcagaagctgaaattgatatggaactatttcatcagaatcatcttattgtgaaggttcctccctatcatgaccaacatataactttgcctgtgtcagtgggaatatatgtagtgacaaatgctggaagatctcatgatgttcaaccattcacttacactccagacccagcagcagctggtgctttgaatgtaaatgtgaagaaggaaatatctagtccagcaagaccttgctcttttgaagaggccatgaaagcaatgaaaactactggatgtaatttagataaggtaaatattatccctaatgccctgatgactccactcataccaagcagtatgattaagagtgaagatgttactccaatggaagtaacagcagaaaaaagatcttccactatttttaagactacaaagtctgttggatcaactcagcaaacattagaaaacatctcaaacatagcaggaaatggctctttttcatcaccatcatcttcccacctaccttctgaaaatgaaaaacagcagcagattcagcccaaggcatacaacccagagaccctgacaactattcaaacccaggacatctcacagcctggtacttttccagcagtttctgcttctagtcagctgcccaacagcgatgcactattgcagcaggctacacagtttcagacaagagaaactcagtctagagagatattacagtcagatggtacagtggttaatttgtcacaactgactgaggcatcacaacaacagcagcagtcaccactacaagaacaagcacagactttacagcagcagatttcatcaaatatttttccatcaccaaatagtgtgagtcagcttcagaatactattcagcagctgcaagcagggagtttcacaggcagtactgctagtggcagcagtggaagtgttgacttggtccaacaagttttagaggcacagcagcagttatcttcagttttattttctgctccagatggtaatgagaatgttcaagagcagcttagtgcagatatttttcaacaagtcagtcaaattcagagtggtgtaagccctggaatgttttcctcaacagagccaacagtccataccagaccagataatttattacctggaagagctgaaagtgttcatccacagtctgaaaacacgttatctaatcaacagcagcagcagcagcagcaacagcaagtgatggaatcttcagccgcaatggtgatggagatgcaacagagtatctgccaggcagctgcccagattcagtcagagttattcccttcaactgcttcagcaaatggaaaccttcagcaatcgccagtttaccagcagacttctcacatgatgagtgcattgtctaccaatgaggatatgcaaatgcagtgtgaattgttttcttctcctcctgcagtttctggaaatgaaacttctacaactaccacacagcaggttgcaacccctggcactaccatgtttcagacatcaagttcaggagatggagaagaaactggaacacaagcaaaacagattcagaacagtgtctttcagaccatggtccaaatgcaacatagtggggacaatcaacctcaagttaaccttttttcatccacaaaaagtatgatgagtgttcagaatagtggtacccaacaacaaggtaatggtttattccagcaagggaatgagatgatgtcacttcaatctggaaattttttgcagcagtcttctcattcacaggcccaactttttcatcctcaaaatcctattgccgatgctcagaacctttcccaggaaactcaaggttctctctttcatagtccaaatcctattgtccacagtcagacttctacaacctcctctgaacaaatgcagcctccaatgtttcactctcaaagtaccattgctgtgttacagggctcttcagttcctcaagaccagcagtcaaccaacatatttctttcccagagtcccatgaataatcttcagactaacacagtagcccaagaagcattttttgcagcaccgaactcaatttctccacttcagtcaacatcaaacagtgaacaacaagctgctttccaacagcaagctccaatatcacacatccagactcctatgctttcccaagaacaggcacaacccccgcagcagggtttatttcagcctcaggtggccctgggctcccttccacctaatccaatgcctcaaagccaacaaggaaccatgttccagtcacagcactcaatagttgccatgcagagtaactctccatcccaggaacagcagcagcagcagcaacagcagcagcaacagcagcagcaacaacaacagagcattttattcagtaatcagaataccatggctacaatggcgtctccaaagcaaccaccaccaaacatgatattcaacccaaatcaaaatccaatggctaatcaggagcaacagaaccagtcaatttttcaccaacaaagtaacatggccccaatgaatcaagagcaacagcccatgcaatttcagagtcagtccacagtttcctcacttcagaacccaggtcctacccagtcggaatcatcacagacccccttgttccatagctctcctcagattcagttggtacaagggtcacctagttctcaagagcagcaagtaactctcttcttatctccagcatccatgtctgccttgcagaccagtataaatcaacaagatatgcaacagtctcctctttattcccctcagaacaacatgcctggaattcaaggagccacatcttcgcctcaaccacaggctactttatttcacaacacagcaggaggcacaatgaaccaactgcagaattctcctggctcatctcagcagacatcaggaatgttcttatttggcattcaaaataactgtagtcagcttttaacctctggaccagctacattgcctgatcagttgatggccataagtcagccaggccaaccacaaaacgagggccagccacctgtgacaacacttctttctcagcaaatgccagagaattctccactggcatcctctataaacaccaaccagaacatcgaaaagattgatttgcttgtttcattgcaaaaccaagggaacaacttgactggctccttttagtaatgaactagtccgtaacttgaaagtatttcgatttcttggctttatatatcttgtggaaaggacgagctcactccgaagccaaggaatcc

SEQ ID NO: 2176 - DNA, 4751 bp, Homo sapiens
  source 1..4751: mol_type = genomic DNA
accgccaccatgccctcggacttcatctcattgctcagcgcggacctagacctggaatcgcccaagtccctctactcgcgagattctctgaagttacacccatcacagaattttcatagagctggactattggaagaatctgtctatgatcttctcccaaaggagttacagttacctccatctagagaaacatctgtagcatcaatgagtcagacaagcggtggtgaggcaggctcgcctcctccagctgttgttgctgctgatgcttcttcagctccctcctcttcctccatgggcggtgcttgcagctcctttaccacctcttccagccctaccatttattctacctcagtcaccgacagcaaggctatgcaagtggagagctgctcctcagccgtgggggtaagtaacagaggggtaagtgaaaagcagttaaccagtaacacagttcagcagcatccatcaacaccgaagaggcacacagtcttgtacatctcaccaccacctgaggacttgctggataacagtcggatgtcctgccaggatgaggggtgtggattggaatctgagcagagctgcagtatgtggatggaggattccccctccaacttcagtaacatgagcaccagttcctacaatgataacactgaggtacctcgtaaatcacgaaaacgaaatccaaagcagaggccgggggtcaaacgacgagattgtgaagaatctaatatggatatatttgatgccgacagtgccaaagcacctcactatgtgctttctcagcttaccacggacaacaaaggcaactcaaaagcgggaaatggaacattggaaaaccaaaaaggaactggagtaaagaagagccctatgttgtgtggacaatatcctgttaaaagtgagggaaaggagctgaagatagttgtacaacctgagacacagcaccgagctcggtacctgactgagggcagccgtggctcagtgaaagatagaacacagcaaggctttcctacagtaaagctggaaggccataatgaacctgtagtgttgcaagtgtttgtgggcaacgactctggacgagtgaaaccacatggattttatcaggcctgcagagtaactggacgaaatacaactccttgcaaagaagtggacattgaaggcactactgttatagaagtcggccttgatcctagcaacaacatgacactggcggtggactgcgtagggatattgaaattgaggaatgctgatgtcgaagccagaataggaattgctggttccaagaagaaaagcactcgtgccagattggtttttcgagttaatatcatgaggaaagatggctccactttgacactgcaaacaccctcttctccaattttgtgtactcagccagcaggagtgccagaaatcttaaagaaaagcttgcatagctgttcagtgaaaggagaagaagaagtgtttttaatcggcaagaactttctgaaaggaactaaagttattttccaagaaaatgtttctgatgaaaactcttggaagtcagaagctgaaattgatatggaactatttcatcagaatcatcttattgtgaaggttcctccctatcatgaccaacatataactttgcctgtgtcagtgggaatatatgtagtgacaaatgctggaagatctcatgatgttcaaccattcacttacactccagacccagcagcagctggtgctttgaatgtaaatgtgaagaaggaaatatctagtccagcaagaccttgctcttttgaagaggccatgaaagcaatgaaaactactggatgtaatttagataaggtaaatattatccctaatgccctgatgactccactcataccaagcagtatgattaagagtgaagatgttactccaatggaagtaacagcagaaaaaagatcttccactatttttaagactacaaagtctgttggatcaactcagcaaacattagaaaacatctcaaacatagcaggaaatggctctttttcatcaccatcatcttcccacctaccttctgaaaatgaaaaacagcagcagattcagcccaaggcatacaacccagagaccctgacaactattcaaacccaggacatctcacagcctggtacttttccagcagtttctgcttctagtcagctgcccaacagcgatgcactattgcagcaggctacacagtttcagacaagagaaactcagtctagagagatattacagtcagatggtacagtggttaatttgtcacaactgactgaggcatcacaacaacagcagcagtcaccactacaagaacaagcacagactttacagcagcagatttcatcaaatatttttccatcaccaaatagtgtgagtcagcttcagaatactattcagcagctgcaagcagggagtttcacaggcagtactgctagtggcagcagtggaagtgttgacttggtccaacaagttttagaggcacagcagcagttatcttcagttttattttctgctccagatggtaatgagaatgttcaagagcagcttagtgcagatatttttcaacaagtcagtcaaattcagagtggtgtaagccctggaatgttttcctcaacagagccaacagtccataccagaccagataatttattacctggaagagctgaaagtgttcatccacagtctgaaaacacgttatctaatcaacagcagcagcagcagcagcaacagcaagtgatggaatcttcagccgcaatggtgatggagatgcaacagagtatctgccaggcagctgcccagattcagtcagagttattcccttcaactgcttcagcaaatggaaaccttcagcaatcgccagtttaccagcagacttctcacatgatgagtgcattgtctaccaatgaggatatgcaaatgcagtgtgaattgttttcttctcctcctgcagtttctggaaatgaaacttctacaactaccacacagcaggttgcaacccctggcactaccatgtttcagacatcaagttcaggagatggagaagaaactggaacacaagcaaaacagattcagaacagtgtctttcagaccatggtccaaatgcaacatagtggggacaatcaacctcaagttaaccttttttcatccacaaaaagtatgatgagtgttcagaatagtggtacccaacaacaaggtaatggtttattccagcaagggaatgagatgatgtcacttcaatctggaaattttttgcagcagtcttctcattcacaggcccaactttttcatcctcaaaatcctattgccgatgctcagaacctttcccaggaaactcaaggttctctctttcatagtccaaatcctattgtccacagtcagacttctacaacctcctctgaacaaatgcagcctccaatgtttcactctcaaagtaccattgctgtgttacagggctcttcagttcctcaagaccagcagtcaaccaacatatttctttcccagagtcccatgaataatcttcagactaacacagtagcccaagaagcattttttgcagcaccgaactcaatttctccacttcagtcaacatcaaacagtgaacaacaagctgctttccaacagcaagctccaatatcacacatccagactcctatgctttcccaagaacaggcacaacccccgcagcagggtttatttcagcctcaggtggccctgggctcccttccacctaatccaatgcctcaaagccaacaaggaaccatgttccagtcacagcactcaatagttgccatgcagagtaactctccatcccaggaacagcagcagcagcagcaacagcagcagcaacagcagcagcaacaacaacagagcattttattcagtaatcagaataccatggctacaatggcgtctccaaagcaaccaccaccaaacatgatattcaacccaaatcaaaatccaatggctaatcaggagcaacagaaccagtcaatttttcaccaacaaagtaacatggccccaatgaatcaagagcaacagcccatgcaatttcagagtcagtccacagtttcctcacttcagaacccaggtcctacccagtcggaatcatcacagacccccttgttccatagctctcctcagattcagttggtacaagggtcacctagttctcaagagcagcaagtaactctcttcttatctccagcatccatgtctgccttgcagaccagtataaatcaacaagatatgcaacagtctcctctttattcccctcagaacaacatgcctggaattcaaggagccacatcttcgcctcaaccacaggctactttatttcacaacacagcaggaggcacaatgaaccaactgcagaattctcctggctcatctcagcagacatcaggaatgttcttatttggcattcaaaataactgtagtcagcttttaacctctggaccagctacattgcctgatcagttgatggccataagtcagccaggccaaccacaaaacgagggccagccacctgtgacaacacttctttctcagcaaatgccagagaattctccactggcatcctctataaacaccaaccagaacatcgaaaagattgatttgcttgtttcattgcaaaaccaagggaacaacttgactggctccttttagtaatgaactagtccgtaacttgaaagtatttcgatttcttggctttatatatcttgtggaaaggacgaactgcgcacagagagcgtatccta

SEQ ID NO: 2177 - DNA, 4748 bp, Homo sapiens
  source 1..4748: mol_type = genomic DNA
accgccaccatgccctcggacttcatctcattgctcagcgcggacctagacctggaatcgcccaagtccctctactcgcgagattctctgaagttacacccatcacagaattttcatagagctggactattggaagaatctgtctatgatcttctcccaaaggagttacagttacctccatctagagaaacatctgtagcatcaatgagtcagacaagcggtggtgaggcaggctcgcctcctccagctgttgttgctgctgatgcttcttcagctccctcctcttcctccatgggcggtgcttgcagctcctttaccacctcttccagccctaccatttattctacctcagtcaccgacagcaaggctatgcaagtggagagctgctcctcagccgtgggggtaagtaacagaggggtaagtgaaaagcagttaaccagtaacacagttcagcagcatccatcaacaccgaagaggcacacagtcttgtacatctcaccaccacctgaggacttgctggataacagtcggatgtcctgccaggatgaggggtgtggattggaatctgagcagagctgcagtatgtggatggaggattccccctccaacttcagtaacatgagcaccagttcctacaatgataacactgaggtacctcgtaaatcacgaaaacgaaatccaaagcagaggccgggggtcaaacgacgagattgtgaagaatctaatatggatatatttgatgccgacagtgccaaagcacctcactatgtgctttctcagcttaccacggacaacaaaggcaactcaaaagcgggaaatggaacattggaaaaccaaaaaggaactggagtaaagaagagccctatgttgtgtggacaatatcctgttaaaagtgagggaaaggagctgaagatagttgtacaacctgagacacagcaccgagctcggtacctgactgagggcagccgtggctcagtgaaagatagaacacagcaaggctttcctacagtaaagctggaaggccataatgaacctgtagtgttgcaagtgtttgtgggcaacgactctggacgagtgaaaccacatggattttatcaggcctgcagagtaactggacgaaatacaactccttgcaaagaagtggacattgaaggcactactgttatagaagtcggccttgatcctagcaacaacatgacactggcggtggactgcgtagggatattgaaattgaggaatgctgatgtcgaagccagaataggaattgctggttccaagaagaaaagcactcgtgccagattggtttttcgagttaatatcatgaggaaagatggctccactttgacactgcaaacaccctcttctccaattttgtgtactcagccagcaggagtgccagaaatcttaaagaaaagcttgcatagctgttcagtgaaaggagaagaagaagtgtttttaatcggcaagaactttctgaaaggaactaaagttattttccaagaaaatgtttctgatgaaaactcttggaagtcagaagctgaaattgatatggaactatttcatcagaatcatcttattgtgaaggttcctccctatcatgaccaacatataactttgcctgtgtcagtgggaatatatgtagtgacaaatgctggaagatctcatgatgttcaaccattcacttacactccagacccagcagctggtgctttgaatgtaaatgtgaagaaggaaatatctagtccagcaagaccttgctcttttgaagaggccatgaaagcaatgaaaactactggatgtaatttagataaggtaaatattatccctaatgccctgatgactccactcataccaagcagtatgattaagagtgaagatgttactccaatggaagtaacagcagaaaaaagatcttccactatttttaagactacaaagtctgttggatcaactcagcaaacattagaaaacatctcaaacatagcaggaaatggctctttttcatcaccatcatcttcccacctaccttctgaaaatgaaaaacagcagcagattcagcccaaggcatacaacccagagaccctgacaactattcaaacccaggacatctcacagcctggtacttttccagcagtttctgcttctagtcagctgcccaacagcgatgcactattgcagcaggctacacagtttcagacaagagaaactcagtctagagagatattacagtcagatggtacagtggttaatttgtcacaactgactgaggcatcacaacaacagcagcagtcaccactacaagaacaagcacagactttacagcagcagatttcatcaaatatttttccatcaccaaatagtgtgagtcagcttcagaatactattcagcagctgcaagcagggagtttcacaggcagtactgctagtggcagcagtggaagtgttgacttggtccaacaagttttagaggcacagcagcagttatcttcagttttattttctgctccagatggtaatgagaatgttcaagagcagcttagtgcagatatttttcaacaagtcagtcaaattcagagtggtgtaagccctggaatgttttcctcaacagagccaacagtccataccagaccagataatttattacctggaagagctgaaagtgttcatccacagtctgaaaacacgttatctaatcaacagcagcagcagcagcagcaacagcaagtgatggaatcttcagccgcaatggtgatggagatgcaacagagtatctgccaggcagctgcccagattcagtcagagttattcccttcaactgcttcagcaaatggaaaccttcagcaatcgccagtttaccagcagacttctcacatgatgagtgcattgtctaccaatgaggatatgcaaatgcagtgtgaattgttttcttctcctcctgcagtttctggaaatgaaacttctacaactaccacacagcaggttgcaacccctggcactaccatgtttcagacatcaagttcaggagatggagaagaaactggaacacaagcaaaacagattcagaacagtgtctttcagaccatggtccaaatgcaacatagtggggacaatcaacctcaagttaaccttttttcatccacaaaaagtatgatgagtgttcagaatagtggtacccaacaacaaggtaatggtttattccagcaagggaatgagatgatgtcacttcaatctggaaattttttgcagcagtcttctcattcacaggcccaactttttcatcctcaaaatcctattgccgatgctcagaacctttcccaggaaactcaaggttctctctttcatagtccaaatcctattgtccacagtcagacttctacaacctcctctgaacaaatgcagcctccaatgtttcactctcaaagtaccattgctgtgttacagggctcttcagttcctcaagaccagcagtcaaccaacatatttctttcccagagtcccatgaataatcttcagactaacacagtagcccaagaagcattttttgcagcaccgaactcaatttctccacttcagtcaacatcaaacagtgaacaacaagctgctttccaacagcaagctccaatatcacacatccagactcctatgctttcccaagaacaggcacaacccccgcagcagggtttatttcagcctcaggtggccctgggctcccttccacctaatccaatgcctcaaagccaacaaggaaccatgttccagtcacagcactcaatagttgccatgcagagtaactctccatcccaggaacagcagcagcagcagcaacagcagcagcaacagcagcagcaacaacaacagagcattttattcagtaatcagaataccatggctacaatggcgtctccaaagcaaccaccaccaaacatgatattcaacccaaatcaaaatccaatggctaatcaggagcaacagaaccagtcaatttttcaccaacaaagtaacatggccccaatgaatcaagagcaacagcccatgcaatttcagagtcagtccacagtttcctcacttcagaacccaggtcctacccagtcggaatcatcacagacccccttgttccatagctctcctcagattcagttggtacaagggtcacctagttctcaagagcagcaagtaactctcttcttatctccagcatccatgtctgccttgcagaccagtataaatcaacaagatatgcaacagtctcctctttattcccctcagaacaacatgcctggaattcaaggagccacatcttcgcctcaaccacaggctactttatttcacaacacagcaggaggcacaatgaaccaactgcagaattctcctggctcatctcagcagacatcaggaatgttcttatttggcattcaaaataactgtagtcagcttttaacctctggaccagctacattgcctgatcagttgatggccataagtcagccaggccaaccacaaaacgagggccagccacctgtgacaacacttctttctcagcaaatgccagagaattctccactggcatcctctataaacaccaaccagaacatcgaaaagattgatttgcttgtttcattgcaaaaccaagggaacaacttgactggctccttttagtaatgaactagtccgtaacttgaaagtatttcgatttcttggctttatatatcttgtggaaaggacgactctaactccggcggcgtatctta

SEQ ID NO: 2178 - DNA, 4469 bp, Homo sapiens
  source 1..4469: mol_type = genomic DNA
accgccaccatgggcggtgcttgcagctcctttaccacctcttccagccctaccatttattctacctcagtcaccgacagcaaggctatgcaagtggagagctgctcctcagccgtgggggtaagtaacagaggggtaagtgaaaagcagttaaccagtaacacagttcagcagcatccatcaacaccgaagaggcacacagtcttgtacatctcaccaccacctgaggacttgctggataacagtcggatgtcctgccaggatgaggggtgtggattggaatctgagcagagctgcagtatgtggatggaggattccccctccaacttcagtaacatgagcaccagttcctacaatgataacactgaggtacctcgtaaatcacgaaaacgaaatccaaagcagaggccgggggtcaaacgacgagattgtgaagaatctaatatggatatatttgatgccgacagtgccaaagcacctcactatgtgctttctcagcttaccacggacaacaaaggcaactcaaaagcgggaaatggaacattggaaaaccaaaaaggaactggagtaaagaagagccctatgttgtgtggacaatatcctgttaaaagtgagggaaaggagctgaagatagttgtacaacctgagacacagcaccgagctcggtacctgactgagggcagccgtggctcagtgaaagatagaacacagcaaggctttcctacagtaaagctggaaggccataatgaacctgtagtgttgcaagtgtttgtgggcaacgactctggacgagtgaaaccacatggattttatcaggcctgcagagtaactggacgaaatacaactccttgcaaagaagtggacattgaaggcactactgttatagaagtcggccttgatcctagcaacaacatgacactggcggtggactgcgtagggatattgaaattgaggaatgctgatgtcgaagccagaataggaattgctggttccaagaagaaaagcactcgtgccagattggtttttcgagttaatatcatgaggaaagatggctccactttgacactgcaaacaccctcttctccaattttgtgtactcagccagcaggagtgccagaaatcttaaagaaaagcttgcatagctgttcagtgaaaggagaagaagaagtgtttttaatcggcaagaactttctgaaaggaactaaagttattttccaagaaaatgtttctgatgaaaactcttggaagtcagaagctgaaattgatatggaactatttcatcagaatcatcttattgtgaaggttcctccctatcatgaccaacatataactttgcctgtgtcagtgggaatatatgtagtgacaaatgctggaagatctcatgatgttcaaccattcacttacactccagacccagcagcagctggtgctttgaatgtaaatgtgaagaaggaaatatctagtccagcaagaccttgctcttttgaagaggccatgaaagcaatgaaaactactggatgtaatttagataaggtaaatattatccctaatgccctgatgactccactcataccaagcagtatgattaagagtgaagatgttactccaatggaagtaacagcagaaaaaagatcttccactatttttaagactacaaagtctgttggatcaactcagcaaacattagaaaacatctcaaacatagcaggaaatggctctttttcatcaccatcatcttcccacctaccttctgaaaatgaaaaacagcagcagattcagcccaaggcatacaacccagagaccctgacaactattcaaacccaggacatctcacagcctggtacttttccagcagtttctgcttctagtcagctgcccaacagcgatgcactattgcagcaggctacacagtttcagacaagagaaactcagtctagagagatattacagtcagatggtacagtggttaatttgtcacaactgactgaggcatcacaacaacagcagcagtcaccactacaagaacaagcacagactttacagcagcagatttcatcaaatatttttccatcaccaaatagtgtgagtcagcttcagaatactattcagcagctgcaagcagggagtttcacaggcagtactgctagtggcagcagtggaagtgttgacttggtccaacaagttttagaggcacagcagcagttatcttcagttttattttctgctccagatggtaatgagaatgttcaagagcagcttagtgcagatatttttcaacaagtcagtcaaattcagagtggtgtaagccctggaatgttttcctcaacagagccaacagtccataccagaccagataatttattacctggaagagctgaaagtgttcatccacagtctgaaaacacgttatctaatcaacagcagcagcagcagcagcaacagcaagtgatggaatcttcagccgcaatggtgatggagatgcaacagagtatctgccaggcagctgcccagattcagtcagagttattcccttcaactgcttcagcaaatggaaaccttcagcaatcgccagtttaccagcagacttctcacatgatgagtgcattgtctaccaatgaggatatgcaaatgcagtgtgaattgttttcttctcctcctgcagtttctggaaatgaaacttctacaactaccacacagcaggttgcaacccctggcactaccatgtttcagacatcaagttcaggagatggagaagaaactggaacacaagcaaaacagattcagaacagtgtctttcagaccatggtccaaatgcaacatagtggggacaatcaacctcaagttaaccttttttcatccacaaaaagtatgatgagtgttcagaatagtggtacccaacaacaaggtaatggtttattccagcaagggaatgagatgatgtcacttcaatctggaaattttttgcagcagtcttctcattcacaggcccaactttttcatcctcaaaatcctattgccgatgctcagaacctttcccaggaaactcaaggttctctctttcatagtccaaatcctattgtccacagtcagacttctacaacctcctctgaacaaatgcagcctccaatgtttcactctcaaagtaccattgctgtgttacagggctcttcagttcctcaagaccagcagtcaaccaacatatttctttcccagagtcccatgaataatcttcagactaacacagtagcccaagaagcattttttgcagcaccgaactcaatttctccacttcagtcaacatcaaacagtgaacaacaagctgctttccaacagcaagctccaatatcacacatccagactcctatgctttcccaagaacaggcacaacccccgcagcagggtttatttcagcctcaggtggccctgggctcccttccacctaatccaatgcctcaaagccaacaaggaaccatgttccagtcacagcactcaatagttgccatgcagagtaactctccatcccaggaacagcagcagcagcagcaacagcagcagcaacagcagcagcaacaacaacagagcattttattcagtaatcagaataccatggctacaatggcgtctccaaagcaaccaccaccaaacatgatattcaacccaaatcaaaatccaatggctaatcaggagcaacagaaccagtcaatttttcaccaacaaagtaacatggccccaatgaatcaagagcaacagcccatgcaatttcagagtcagtccacagtttcctcacttcagaacccaggtcctacccagtcggaatcatcacagacccccttgttccatagctctcctcagattcagttggtacaagggtcacctagttctcaagagcagcaagtaactctcttcttatctccagcatccatgtctgccttgcagaccagtataaatcaacaagatatgcaacagtctcctctttattcccctcagaacaacatgcctggaattcaaggagccacatcttcgcctcaaccacaggctactttatttcacaacacagcaggaggcacaatgaaccaactgcagaattctcctggctcatctcagcagacatcaggaatgttcttatttggcattcaaaataactgtagtcagcttttaacctctggaccagctacattgcctgatcagttgatggccataagtcagccaggccaaccacaaaacgagggccagccacctgtgacaacacttctttctcagcaaatgccagagaattctccactggcatcctctataaacaccaaccagaacatcgaaaagattgatttgcttgtttcattgcaaaaccaagggaacaacttgactggctccttttagtaatgaactagtccgtaacttgaaagtatttcgatttcttggctttatatatcttgtggaaaggacgagtagacatgttcaatcaacgcaaa

SEQ ID NO: 2179 - DNA, 1985 bp, Homo sapiens
  source 1..1985: mol_type = genomic DNA
accgccaccatgattgtatttgggggagaagacagaagtgatctcttccttcctgactctcagactaatgaagagagaaaacaatatgattcagtagcctttgaggatgtggcggtgaacttcacccaggaagagtgggctttgctgggtccatcacagaagagtctgtacagagatgtgatgtgggaaaccattaggaacctggactgtataggaatgaaatgggaagacacaaacattgaagatcagcacagaaatcccaggaggagcctaagatgtcatatcatagagagatttagtgaaagtcgccagccagatagtactgtgaatgaaaaacctcctggagtagatccatgtaaaagcagtgtgtgtggagaaatcatgggttgttcattccttaattgctatatcacatttgatgctggacacaaaccagatgagtgtcaggaatatggagagaagccacatacacataaacaatgtgggacagccttcaattatcaccactcctttcaaacacaggaaagacctcacactggaaagaaacgctatgattgtaaggaatgtgggaaaaccttcagttcttcgggaaaccttcgaagacacataatagtacaacgtggaggtggaccttatatatgtaagttgtgtgggaaagcctttttttggcctagtttatttcgtatgcatgaaagaactcacactggagagaaaccgtatgaatgtaagcagtgttgtaaagccttccctatttacagttcctatctaagacatgaaagaacacacactggggagaaaccatatgaatgcaagcactgttccaaagccttccctgattacagttcctatgtaagacatgaaagaactcacactggagaaaaaccctataaatgtaaacgatgtggaagagccttcagtgtttccagttcccttcgaatacatgaaagaactcacactggagagaaaccctatgaatgcaagcaatgcgggaaagcatttcatcatctgggaagctttcaaagacacatgataaggcacactggagatggacctcataaatgtaagatatgtgggaaaggctttgattgtcctagttcactgcaaagtcatgaaagaactcacactggagagaaaccctatgaatgcaagcagtgtgggaaagcgttatctcatcactcaagctttcgaagtcatatgataatgcacactggagatggacctcacaaatgcaaggtatgtgggaaagccttcatttatcccagtgtatttcaaggacatgaaaggactcatactggtgagaaaccctatgaatgtaaagaatgtggtaaagccttccgtatttctagttcccttcgaagacatgaaacaactcacactggagagaaaccctataaatgtaaatgtgggaaagcctttattgatttctattcctttcaaaatcatgaaacaactcacactggagagaagccatatgagtgtaaggaatgtgggaaagcattcagttgtttcacatacctttctcaacatagaaggactcacatggctgaaaaaccttatgaatgtaaaacatgtaagaaagccttcagtcattttggtaacttaaaagtccatgaaaggattcacactggagagaagccatatgaatgtaaggaatgcaggaaagcattctcttggctcacttgccttctgcgacatgaaagaattcacactggaaagaaatcttatgaatgtcaacaatgtggtaaagccttcactcgttctcgtttccttcgaggacatgaaaaaactcacactggagagaagatgcatgaatgtaaggaatgtgggaaggcactgagttctctcagttccttgcatagacataaaaggactcactggagagatactctatagtaatgaactagtccgtaacttgaaagtatttcgatttcttggctttatatatcttgtggaaaggacgatatcgggatggcaacagtgtacac

SEQ ID NO: 2180 - DNA, 4517 bp, Homo sapiens
  source 1..4517: mol_type = genomic DNA
accgccaccatggtttccaaaagaagactgtcaaaatctgaggataaagagagcctgacagaagatgcctccaaaaccaggaagcaaccactttccaaaaagacaaagaaatctcatattgctaatgaagttgaagaaaatgacagcatctttgtaaagcttcttaagatatcaggaattattcttaaaacgggagagagtcagaatcaactagctgtggatcaaatagctttccaaaagaagctctttcagaccctgaggagacacccttcctatcccaaaataatagaagaatttgttagtggcctggagtcttacattgaggatgaagacagtttcaggaactgccttttgtcttgtgagcgtctgcaggatgaggaagccagtatgggtgcatcttattctaagagtctcatcaaactgcttctggggattgacatactgcagcctgccattatcaaaaccttatttgagaagttgccagaatatttttttgaaaacaagaacagtgatgaaatcaacatacctcgactcattgtcagtcaactaaaatggcttgacagagttgtggatggcaaggacctcaccaccaagatcatgcagctgatcagtattgctccagagaacctgcagcatgacatcatcaccagcctacctgagatcctaggggattcccagcacgctgatgtggggaaagaactcagtgacctactgatagagaatacttcactcactgtcccaatcctggatgtcctttcaagcctccgacttgacccaaacttcctattgaaggttcgccagttggtgatggataagttgtcgtctattagattggaggatttacctgtgataataaagttcattcttcattccgtaacagccatggatacacttgaggtaatttctgagcttcgggagaagttggatctgcagcattgtgttttgccatcacggttacaggcttcccaagtaaagttgaaaagtaaaggacgagcaagttcctcaggaaatcaagaaagcagcggtcagagctgtattattctcctctttgatgtaataaagtcagctattagatatgagaaaaccatttcagaagcctggattaaggcaattgaaaacactgcctcagtatctgaacacaaggtgtttgacctggtgatgcttttcatcatctatagcaccaatactcagacaaagaagtacattgacagggtgctaagaaataagattcgatcaggctgcattcaagaacagctgctccagagtacattctctgttcattacttagttcttaaggatatgtgttcatccattctgtcgctggctcagagtttgcttcactctctagaccagagtataatttcatttggcagtctcctatacaaatatgcatttaagttttttgacacgtactgccagcaggaagtggttggtgccttagtgacccatatctgcagtgggaatgaagctgaagttgatactgccttagatgtccttctagagttggtagtgttaaacccatctgctatgatgatgaatgctgtctttgtaaagggcattttagattatctggataacatatcccctcagcaaatacgaaaactcttctatgttctcagcacactggcatttagcaaacagaatgaagccagcagccacatccaggatgacatgcacttggtgataagaaagcagctctctagcaccgtattcaagtacaagctcattgggattattggtgctgtgaccatggctggcatcatggcggcagacagaagtgaatcacctagtttgacccaagagagagccaacctgagcgatgagcagtgcacacaggtgacctccttgttgcagttggttcattcctgcagtgagcagtctcctcaggcctctgcactttactatgatgaatttgccaacctgatccaacatgaaaagctggatccaaaagccctggaatgggttgggcataccatctgtaatgatttccaggatgccttcgtagtggactcctgtgttgttccggaaggtgactttccatttcctgtgaaagcactgtacggactggaagaatacgacactcaggatgggattgccataaacctcctgccgctgctgttttctcaggactttgcaaaagatgggggtccggtgacctcacaggaatcaggccaaaaattggtgtctccgctgtgcctggctccgtatttccggttactgagactttgtgtggagagacagcataacggaaacttggaggagattgatggtctactagattgtcctatattcctaactgacctggagcctggagagaagttggagtccatgtctgctaaagagcgttcattcatgtgttctctcatatttcttactctcaactggttccgagagattgtaaatgccttctgccaggaaacatcacctgagatgaaggggaaggtgctcactcggttaaagcacattgtagaattgcaaataatcctggaaaagtacttggcagtcaccccagactatgtccctcctcttggaaactttgatgtggaaactttagatataacacctcatactgttactgctatttcagcaaaaatcagaaagaaaggaaaaatagaaaggaaacaaaaaacagatggcagcaagacatcctcctctgacacactttcagaagagaaaaattcagaatgtgaccctacgccatctcatagaggccagctaaacaaggagttcacagggaaggaagaaaagacatcattgttactacataattcccatgcttttttccgagagctggacattgaggtcttctctattctacattgtggacttgtgacgaagttcatcttagatactgaaatgcacactgaagctacagaagttgtgcaacttgggccccctgagctgcttttcttgctggaagatctctcccagaagctggagagtatgctgacacctcctattgccaggagagtcccctttctcaagaacaaaggaagccggaatattggattctcacatctccaacagagatctgcccaagaaattgttcattgtgtttttcaactgctgaccccaatgtgtaaccacctggagaacattcacaactattttcagtgtttagctgctgagaatcacggtgtagttgatggaccaggagtgaaagttcaggagtaccacataatgtcttcctgctatcagaggctgctgcagatttttcatgggctttttgcttggagtggattttctcaacctgaaaatcagaatttactgtattcagccctccatgtccttagtagccgactgaaacagggagaacacagccagcctttggaggaactactcagccagagcgtccattacttgcagaatttccatcaaagcattcccagtttccagtgtgctctttatctcatcagacttttgatggttattttggagaaatcaacagcttctgctcagaacaaagaaaaaattgcttcccttgccagacaattcctctgtcgggtgtggccaagtggggataaagagaagagcaacatctctaatgaccagctccatgctctgctctgtatctacctggagcacacagagagcattctgaaggccatagaggagattgctggtgttggtgtcccagaactgatcaactctcctaaagatgcatcttcctccacattccctacactgaccaggcatacttttgttgttttcttccgtgtgatgatggctgaactagagaagacggtgaaaaaaattgagcctggcacagcagcagactcgcagcagattcatgaagagaaactcctctactggaacatggctgttcgagacttcagtatcctcatcaacttgataaaggtatttgatagtcatcctgttctgcatgtatgtttgaagtatgggcgtctctttgtggaagcatttctgaagcaatgtatgccgctcctagacttcagttttagaaaacaccgggaagatgttctgagcttactggaaaccttccagttggacacaaggctgcttcatcacctgtgtgggcattccaagattcaccaggacacgagactcacccaacatgtgcctctgctcaaaaagaccctggaacttttagtttgcagagtcaaagctatgctcactctcaacaattgtagagaggctttctggctgggcaatctaaaaaaccgggacttgcagggtgaagagattaagtcccaaaattcccaggagagcacagcagatgagagtgaggatgacatgtcatcccaggcctccaagagcaaagccactgaggtatctctacaaaacccaccagagtctggcactgatggttgcattttgttaattgttctaagttggtggagcagaactttgcctacttatgtttattgtcaaatgcttctatgcccatttccattccctccatagtaatgaactagtccgtaacttgaaagtatttcgatttcttggctttatatatcttgtggaaaggacgagcattgacacgcggcaggcacaga

SEQ ID NO: 2181 - DNA, 4457 bp, Homo sapiens
  source 1..4457: mol_type = genomic DNA
accgccaccatggtttccaaaagaagactgtcaaaatctgaggataaagagagcctgacagaagatgcctccaaaaccaggaagcaaccactttccaaaaagacaaagaaatctcatattgctaatgaagttgaagaaaatgacagcatctttgtaaagcttcttaagatatcaggaattattcttaaaacgggagagagtcagaatcaactagctgtggatcaaatagctttccaaaagaagctctttcagaccctgaggagacacccttcctatcccaaaataatagaagaatttgttagtggcctggagtcttacattgaggatgaagacagtttcaggaactgccttttgtcttgtgagcgtctgcaggatgaggaagccagtatgggtgcatcttattctaagagtctcatcaaactgcttctggggattgacatactgcagcctgccattatcaaaaccttatttgagaagttgccagaatatttttttgaaaacaagaacagtgatgaaatcaacatacctcgactcattgtcagtcaactaaaatggcttgacagagttgtggatggcaaggacctcaccaccaagatcatgcagctgatcagtattgctccagagaacctgcagcatgacatcatcaccagcctacctgagatcctaggggattcccagcacgctgatgtggggaaagaactcagtgacctactgatagagaatacttcactcactgtcccaatcctggatgtcctttcaagcctccgacttgacccaaacttcctattgaaggttcgccagttggtgatggataagttgtcgtctattagattggaggatttacctgtgataataaagttcattcttcattccgtaacagccatggatacacttgaggtaatttctgagcttcgggagaagttggatctgcagcattgtgttttgccatcacggttacaggcttcccaagtaaagttgaaaagtaaaggacgagcaagttcctcaggaaatcaagaaagcagcggtcagagctgtattattctcctctttgatgtaataaagtcagctattagatatgagaaaaccatttcagaagcctggattaaggcaattgaaaacactgcctcagtatctgaacacaaggtgtttgacctggtgatgcttttcatcatctatagcaccaatactcagacaaagaagtacattgacagggtgctaagaaataagattcgatcaggctgcattcaagaacagctgctccagagtacattctctgttcattacttagttcttaaggatatgtgttcatccattctgtcgctggctcagagtttgcttcactctctagaccagagtataatttcatttggcagtctcctatacaaatatgcatttaagttttttgacacgtactgccagcaggaagtggttggtgccttagtgacccatatctgcagtgggaatgaagctgaagttgatactgccttagatgtccttctagagttggtagtgttaaacccatctgctatgatgatgaatgctgtctttgtaaagggcattttagattatctggataacatatcccctcagcaaatacgaaaactcttctatgttctcagcacactggcatttagcaaacagaatgaagccagcagccacatccaggatgacatgcacttggtgataagaaagcagctctctagcaccgtattcaagtacaagctcattgggattattggtgctgtgaccatggctggcatcatggcggcagacagaagtgaatcacctagtttgacccaagagagagccaacctgagcgatgagcagtgcacacaggtgacctccttgttgcagttggttcattcctgcagtgagcagtctcctcaggcctctgcactttactatgatgaatttgccaacctgatccaacatgaaaagctggatccaaaagccctggaatgggttgggcataccatctgtaatgatttccaggatgccttcgtagtggactcctgtgttgttccggaaggtgactttccatttcctgtgaaagcactgtacggactggaagaatacgacactcaggatgggattgccataaacctcctgccgctgctgttttctcaggactttgcaaaagatgggggtccggtgacctcacaggaatcaggccaaaaattggtgtctccgctgtgcctggctccgtatttccggttactgagactttgtgtggagagacagcataacggaaacttggaggagattgatggtctactagattgtcctatattcctaactgacctggagcctggagagaagttggagtccatgtctgctaaagagcgttcattcatgtgttctctcatatttcttactctcaactggttccgagagattgtaaatgccttctgccaggaaacatcacctgagatgaaggggaaggtgctcactcggttaaagcacattgtagaattgcaaataatcctggaaaagtacttggcagtcaccccagactatgtccctcctcttggaaactttgatgtggaaactttagatataacacctcatactgttactgctatttcagcaaaaatcagaaagaaaggaaaaatagaaaggaaacaaaaaacagatggcagcaagacatcctcctctgacacactttcagaagagaaaaattcagaatgtgaccctacgccatctcatagaggccagctaaacaaggagttcacagggaaggaagaaaagacatcattgttactacataattcccatgcttttttccgagagctggacattgaggtcttctctattctacattgtggacttgtgacgaagttcatcttagatactgaaatgcacactgaagctacagaagttgtgcaacttgggccccctgagctgcttttcttgctggaagatctctcccagaagctggagagtatgctgacacctcctattgccaggagagtcccctttctcaagaacaaaggaagccggaatattggattctcacatctccaacagagatctgcccaagaaattgttcattgtgtttttcaactgctgaccccaatgtgtaaccacctggagaacattcacaactattttcagtgtttagctgctgagaatcacggtgtagttgatggaccaggagtgaaagttcaggagtaccacataatgtcttcctgctatcagaggctgctgcagatttttcatgggctttttgcttggagtggattttctcaacctgaaaatcagaatttactgtattcagccctccatgtccttagtagccgactgaaacagggagaacacagccagcctttggaggaactactcagccagagcgtccattacttgcagaatttccatcaaagcattcccagtttccagtgtgctctttatctcatcagacttttgatggttattttggagaaatcaacagcttctgctcagaacaaagaaaaaattgcttcccttgccagacaattcctctgtcgggtgtggccaagtggggataaagagaagagcaacatctctaatgaccagctccatgctctgctctgtatctacctggagcacacagagagcattctgaaggccatagaggagattgctggtgttggtgtcccagaactgatcaactctcctaaagatgcatcttcctccacattccctacactgaccaggcatacttttgttgttttcttccgtgtgatgatggctgaactagagaagacggtgaaaaaaattgagcctggcacagcagcagactcgcagcagattcatgaagagaaactcctctactggaacatggctgttcgagacttcagtatcctcatcaacttgataaaggtatttgatagtcatcctgttctgcatgtatgtttgaagtatgggcgtctctttgtggaagcatttctgaagcaatgtatgccgctcctagacttcagttttagaaaacaccgggaagatgttctgagcttactggaaaccttccagttggacacaaggctgcttcatcacctgtgtgggcattccaagattcaccaggacacgagactcacccaacatgtgcctctgctcaaaaagaccctggaacttttagtttgcagagtcaaagctatgctcactctcaacaattgtagagaggctttctggctgggcaatctaaaaaaccgggacttgcagggtgaagagattaagtcccaaaattcccaggagagcacagcagatgagagtgaggatgacatgtcatcccaggcctccaagagcaaagccactgaggatggtgaagaagacgaagtaagtgctggagaaaaggagcaagatagtgatgagagttatgatgactctgattagtaatgaactagtccgtaacttgaaagtatttcgatttcttggctttatatatcttgtggaaaggacgacttggctgtgcatcaaatcaaatc

SEQ ID NO: 2182 - DNA, 1646 bp, Homo sapiens
  source 1..1646: mol_type = genomic DNA
accgccaccatggatttggccaaccatggacttattctactgcaacagttaaacgctcagcgagagtttggtttcctgtgtgactgcacggttgcaatcggcgatgtatacttcaaggcacacaaatcagttcttgcttcattctccaattactttaagatgttgtttgtccatcagaccagtgagtgtgtccgcttgaaaccaactgacatacagcccgacatcttcagctatctcttacacttgatgtacactgggaagatggcgcctcagctcatcgacccggttcgattagaacagggcatcaagtttctgcacgcctacccgctcattcaggaagccagcctcgccagccagggagccttttctcaccctgaccaagttttcccactggcttcttcattgtatggcattcagattgcagatcatcagttgagacaagccaccaagattgcttcagcacctgaaaaactcgggcgagatccacggccacagacctccaggataagccaggagcaggtccctgaggcctcacagctctcccagctgacttcaaatctggcccaggtgaatcggacaaatatgactccctcagaccccctgcagacctcgctgtctccagaacttgtttccactcctgttcctccccctcctcccggggaggagaccaatctggaagcatcttcctccgatgagcagcctgcgtccctcacaatagcccacgtcaagccaagcatcatgaagaggaatgggagctttccaaagtactatgcctgccacctgtgtggacggcgcttcactctccggagcagcttacgtgaacacctccagatccacacaggagtacctttcacatctagccaacagggagaaagtcgcgtccccctgactctctgtagcaatgcagctgacctcgggaaagatgccatggaagtgcctgaagccgggatgataagtgacagtgagctgcagcacatctctgattctcccatcatcgatgggcagcagcagtcggaaaccccacccccctcagacattgctgacattgacaacctggagcaggccgaccaggagagggaggtgaagaggcggaagtacgagtgcacaatatgtggacgcaaatttatccagaaaagccactggagggaacacatgtacatacacaccgggaagcctttcaagtgcagcacttgtgacaaaagcttttgcagggccaaccaggctgcccgccacgtgtgcctcaaccagagcatcgacacttacaccatggtggacaaacagactctggaactctgcacatttgaggaagggagtcagatggacaacatgctggtgcaaacaaacaaaccctacaaatgcaacttgtgtgacaaaacattctccactcccaatgaggttgttaaacattcatgccaaaaccagaactcggatgtttttgccctagacgaagggcgatccattctcctgggcagtggggactcggaagtaacggagcctgaccacccagtgttagcttccatcaaaaaggaacaagaaaccgtcttactagactagtaatgaactagtccgtaacttgaaagtatttcgatttcttggctttatatatcttgtggaaaggacgaagtctgagcgaataggaacaagac

SEQ ID NO: 2183 - DNA, 1703 bp, Homo sapiens
  source 1..1703: mol_type = genomic DNA
accgccaccatggcccatggttcagtgacattcagggatgtggccatagacttctcacaggaagaatgggaattcctggatcctgctcagagggacttatatagggatgtaatgtgggagaactacagcaacttcatttcactaggaccttccatttctaaaccagatgtgattaccttattggatgaagaaaggaaggaacctgggatggttgtgagggaagggacaagaagatactgccctgatttggagtccagatacaggaccaatactttatctccagaaaaggacatttatgaaatatattcatttcagtgggatataatggaaagaattaaaagctatagccttcagggttccatttttaggaatgattgggaatgcaaaagcaagattgagggggaaaaggaacaacaagagggatattttgggcaagtgaaaattacctctgaaaaaatgaccacttacaaaaggcacaattttcttactgagtatcagatcgttcataatggagaaaaggtgtatgagtgtaaggagtgtaggaagacctttattcgtcgctcaacacttagtcaacacctgagaattcatactggtgagaaaccttataagtgtaaggaatgtgggcaggcctttagacagcgtgcacatcttattcgacatcacaaacttcacaccggtgagaaaccctatgaatgtaaggagtgtgggaaggcctttacagtgctccaagaacttactcaacatcagagacttcatacgggtgaaaaaccctatgaatgtaaggaatgtggaaaggcctttagagtacatcagcaactggctcgacatcagagaattcacactggtgagaaaccctatgaatgtaaggactgtggaaagacctttagacagtgtacacaccttacacgccatcagagacttcatactgctgaaaagctctatgaatgtaaggaatgtgggaaagccttcgtatgtggtccagaccttagagtacatcagaaaattcattttggtgagaaaccctatgaatgtaaggagtgtggaaaggcttttagaatatgccaacaacttactgttcatcagagtattcatactggtgagaaaccctacgaatgtaaggaatgtgggaagacttttagattaagacaacaactagttcgccatcagagaatacatactcgtgagaaaccctatgaatgtatggaatgttggaagacctttagtagttactcacagcttatttcacaccagagcattcatattggtgagagaccctatgaatgtgaagagtgtggaaaggcctttagactgctctcacaacttactcagcatcaaagtattcacactggtgagaaaccttatgaatgtaaggaatgtagaaaaccttttagactgctctcacaacttacccaacatcagagtattcacactggtgagaaaccttatgaatgtaaggaatgtggtaaggcttttagactttattcatttcttactcaacaccagagaattcatactggtgagaagccctacaagtgtaaggagtgtaagaaggcctttagacagcattcacaccttactcagcatcagaagattcataatggaatttagtaatgaactagtccgtaacttgaaagtatttcgatttcttggctttatatatcttgtggaaaggacgagtcccgttataatgcccatttcgt

SEQ ID NO: 2184 - DNA, 1127 bp, Homo sapiens
  source 1..1127: mol_type = genomic DNA
accgccaccatgtccgcctcggcccctgctgcggagggggagggaacccccacccagcccgcgtccgagaaagaacccgaaatgcccggtcccagagaggagagcgaggaggaagaggacgaggacgacgaggaggaggaggaggaggaaaaaggaaaggggcagaaactttgtgaaattgagaggatacatttttttctaagtaagaagaaaaccgatgaacttagaaatctacacaaactgctttacaacaggccaggcactgtgtcctcattaaagaagaatgtgggtcagttcagtggctttccatttgaaaaaggaagtgtccaatataaaaagaaggaagaaatgttgaaaaaatttagaaatgccatgttaaagagcatctgtgaggttcttgatttggagagatcaggtgtaaatagtgaactagtgaagaggatcttgaatttcttaatgcatccaaagccttctggcaaaccattgccgaaatctaaaaaaacttgtagcaaaggcagtaaaaaggaacggaacagttctggaatggcaaggaaggctaagcgaaccaaatgtcctgaaattctgtcagatgaatctagtagtgatgaagatgaaaagaaaaacaaggaagagtcttcagatgatgaagataaagaaagtgaagaggagccaccaaaaaagacagccaaaagagaaaaacctaaacagaaagctacttctaaaagtaaaaaatctgtgaaaagtgccaatgttaagaaagcagatagcagcaccaccaagaagaatcaaaacagttccaaaaaagaaagtgagtctgaggatagttcagatgatgaacctttaattaaaaagttgaagaaaccccctacagatgaagagttaaaggaaacaataaagaaattactggccagtgctaacttggaagaagtcacaatgaaacagatttgcaaaaaggtctatgaaaattatcctacttatgatttaactgaaagaaaagatttcataaaaacaactgtaaaagagctaatttcttagtaatgaactagtccgtaacttgaaagtatttcgatttcttggctttatatatcttgtggaaaggacgagttagcttggctcactaagacacg

SEQ ID NO: 2185 - DNA, 3245 bp, Homo sapiens
  source 1..3245: mol_type = genomic DNA
accgccaccatggatgcagaggctgaagataaaacgctgcgtactcgctctaaaggaaccgaggtgccaatggattcactaatccaggagctcagtgttgcctatgattgctccatggcaaagaagagaacagctgaagatcaggctttgggggttccagtcaacaaaaggaaatccctgctaatgaagccccgacactacagcccaaaagcagactgccaagaagaccgcagtgacaggacagaggacgatggccccttggaaacacatggtcactctaccgcagaggaaatcatgataaaacctatggatgaaagtcttctttcaactgcacaagaaaactccagtaggaaggaagacagatactcttgttatcaagagctcatggtcaagtctttaatgcacttggggaaatttgaaaaaaatgtatctgttcagactgtaagtgaaaatttaaatgacagtggcatccagtctttaaaagcagagagcgatgaagcagacgagtgctttctgattcattctgatgatggaagagacaagattgatgattctcagccacccttctgctcctctgatgacaatgaaagtaactctgaaagtgcagaaaatggctgggacagtggctccaacttctcagaagaaaccaaaccacctagagtcccaaagtatgttttaacagatcataaaaaagacctattggaagttcctgaaataaaaactgaaggtgacaaatttatcccttgtgagaacaggtgtgattctgaaacagaaaggaaagacccgcagaatgctctcgcagaacccctggatggcaatgcccagccctcattccctgacgttgaggaggaagatagcgagagcctggcagtaatgacggaagagggtagtgacctggaaaaggccaaggggaatttaagtttgctggagcaggcaattgctctgcaggctgagcgaggttgtgttttccataacacctacaaagagctggataggttcctgctggagcacctagcaggggaaaggaggcaaaccaaagttatcgacatgggtggaagacaaatctttaacaataaacattcaccaaggcctgaaaagagggagaccaagtgcccgatccctggatgtgatggcacgggacacgtgacagggctctacccgcaccaccgcagcctttcggggtgcccccacaaagtgcgggttcccctggaaattcttgccatgcatgaaaatgtgctcaagtgtcccacgccgggatgcacaggaaggggtcatgtgaacagcaaccgcaacacccacaggagtctttctggttgtccaattgctgcagctgaaaaattggcaatgtcccaggataaaaatcagcttgattctccccaaactgggcagtgtcctgaccaggcccacaggacaagtttggtgaagcaaattgaattcaatttcccgtcacaagccatcacctctcccagagccacagtgtcaaaagaacaagagaagtttggaaaagtaccatttgattatgccagttttgatgcccaagttttcggtaaacgccctctcatacaaacagtgcaaggacgaaaaacaccaccatttcctgaatcaaagcattttccaaatccagtgaaatttcctaatcgactgcctagtgcaggcgcccacacccagagccctggccgtgccagctcttatagctacggtcaatgtagtgaagacacccacatagcagcagctgctgccatcctgaacctttccacccgctgcagggaagccacagacatcctctccaacaagccacagagtctgcatgccaagggagccgaaatagaagtggatgaaaatggcacattggacttaagcatgaaaaaaaatcgaatcctggacaagtctgcacccctaacttcctctaacacttctattccaactccttcctcttccccattcaaaacaagcagcattctggtcaatgcagcattctatcaggctctttgtgaccaagagggctgggacactcctatcaactatagcaaaactcacgggaagacagaggaggagaaagagaaagacccagtgagctctctagaaaatttagaggaaaaaaagtttcctggagaggcctctataccaagccctaaacccaagcttcatgcaagagatctcaaaaaggaactaatcacctgtccaacaccaggatgtgatggaagtggccacgtgacaggaaactatgcatctcatcgcagtgtttctggatgtcctttagcagataagactctaaaatccctcatggctgccaactctcaggagcttaagtgtccaaccccaggctgcgatggctcggggcacgtgactggaaactatgcttcccacagaagcttgtccggatgccctcgtgcaaggaaaggtggtgtcaaaatgacccctaccaaggaagaaaaagaagaccctgaactgaaatgtcctgtgatagggtgtgatggccaaggtcacatatcaggtaaatacacatcacaccgcacagcttctggctgtcctctggctgccaagagacagaaggagaatcctctcaatggagcctccctctcctggaaactgaacaaacaagagctaccacattgtcccttgccaggctgcaatgggctgggccatgtaaataatgtttttgtcacccaccgaagcttatctggatgtcctctcaatgcacaagttatcaaaaagggcaaggtttctgaagaactcatgaccatcaagctcaaagcaactgggggaatagagagtgatgaagaaattaggcatttggatgaagaaataaaggaactgaatgaatccaaccttaaaattgaagcagatatgatgaaacttcagacccagatcacatctatggagagcaacttaaagacgatagaggaggagaacaaactcatagaacagaacaatgaaagtctgctgaaagagctggcaggtctaagccaagctctcatttcaagccttgctgacatccagcttccacagatgggacctatcagtgagcagaattttgaagcatatgtaaatacactcacagatatgtacagcaatctggaacgggactattccccggaatgcaaagctctactggaaagtatcaaacaggcagtgaagggtatccatgtgtagtaatgaactagtccgtaacttgaaagtatttcgatttcttggctttatatatcttgtggaaaggacgaggtacgtctattacatctgttgag

SEQ ID NO: 2186 - DNA, 1154 bp, Homo sapiens
  source 1..1154: mol_type = genomic DNA
accgccaccatggcatctgcactattcacagcggattcccaggcaatggtgaagatcgaggacatggctgtgtccctcattctggaggaatggggatgtcagaatctggctcggaggaatctcagtagggacaacaggcaggagaattatgggagcgcatttccccagggtggtgaaaacaggaatgagaacgaggagtcaacctcaaaggctgaaacctcggaagattcagcatcacgcggggagacaacaggaagatcccagaaagagtttggagagaaacgtgaccaggagggcaaaacaggagaaagacagcagaaaaaccctgaggagaaaaccaggaaagagaaaagagattcagggccagctataggaaaggacaaaaaaaccatcacaggagagagaggtccaagggagaaggggaaaggattgggaagaagcttcagtctgagctccaacttcaccacccctgaagaagttcccacgggaacaaagtctcacagatgtgatgaatgtggtaaatgcttcacgagaagttcaagccttatccgccataaaataatccacactggagaaaagccctatgaatgtagtgagtgtgggaaagccttcagtcttaactccaaccttgtcctgcatcagaggatccacacaggagagaaacctcatgaatgtaacgagtgtggcaaggccttcagccacagttccaatctcatcctccatcagcgcatccactctggagagaaaccttatgaatgtaatgagtgcgggaaggccttcagccagagctcggacctcaccaagcatcagagaattcacacgggggagaaaccctatgaatgtagtgaatgtggaaaagctttcaaccgaaactcatacctgattttgcatcggagaattcacactcgagaaaagccctacaagtgcactaagtgtggcaaggccttcacccgcagctccaccctcactctgcatcacagaatccatgccagagagagagcctctgagtacagcccagcctcccttgatgcatttggcgcgttcctgaaaagttgtgtgtagtaatgaactagtccgtaacttgaaagtatttcgatttcttggctttatatatcttgtggaaaggacgaatgaccggaggttagaagccatga

SEQ ID NO: 2187 - DNA, 1793 bp, Homo sapiens
  source 1..1793: mol_type = genomic DNA
accgccaccatgatgactgctgaatcacgggaagccacgggtctgtccccacaggctgcacaggagaaggatggtatcgtaatagtgaaggtggaagaggaagatgaggaagaccacatgtgggggcaggattccaccctacaggacacgcctcctccagacccagagatattccgccaacgcttcaggcgcttctgttaccagaacacttttgggccccgagaggctctcagtcggctgaaggaactttgtcatcagtggctgcggccagaaataaacaccaaggaacagatcctggagcttctggtgctagagcagtttctttccatcctgcccaaggagctccaggtctggctgcaggaataccgccccgatagtggagaggaggccgtgacccttctagaagacttggagcttgatttatcaggacaacaggtcccaggtcaagttcatggacctgagatgctcgcaagggggatggtgcctctggatccagttcaggagtcctcgagctttgaccttcatcacgaggccacccagtcccacttcaaacattcgtctcggaaaccccgcctcttacagtcacgagctcttcctgctgcccacattcctgcaccccctcatgagggtagtcccagagaccaggcgatggcatctgcactattcacagcggattcccaggcaatggtgaagatcgaggacatggctgtgtccctcattctggaggaatggggatgtcagaatctggctcggaggaatctcagtagggacaacaggcaggagaattatgggagcgcatttccccagggtggtgaaaacaggaatgagaacgaggagtcaacctcaaaggctgaaacctcggaagattcagcatcacgcggggagacaacaggaagatcccagaaagagtttggagagaaacgtgaccaggagggcaaaacaggagaaagacagcagaaaaaccctgaggagaaaaccaggaaagagaaaagagattcagggccagctataggaaaggacaaaaaaaccatcacaggagagagaggtccaagggagaaggggaaaggattgggaagaagcttcagtctgagctccaacttcaccacccctgaagaagttcccacgggaacaaagtctcacagatgtgatgaatgtggtaaatgcttcacgagaagttcaagccttatccgccataaaataatccacactggagaaaagccctatgaatgtagtgagtgtgggaaagccttcagtcttaactccaaccttgtcctgcatcagaggatccacacaggagagaaacctcatgaatgtaacgagtgtggcaaggccttcagccacagttccaatctcatcctccatcagcgcatccactctggagagaaaccttatgaatgtaatgagtgcgggaaggccttcagccagagctcggacctcaccaagcatcagagaattcacacgggggagaaaccctatgaatgtagtgaatgtggaaaagctttcaaccgaaactcatacctgattttgcatcggagaattcacactcgagaaaagccctacaagtgcactaagtgtggcaaggccttcacccgcagctccaccctcactctgcatcacagaatccatgccagagagagagcctctgagtacagcccagcctcccttgatgcatttggcgcgttcctgaaaagttgtgtgtagtaatgaactagtccgtaacttgaaagtatttcgatttcttggctttatatatcttgtggaaaggacgagcgtgtgacgctcctaagcccgca

SEQ ID NO: 2188 - DNA, 1685 bp, Homo sapiens
  source 1..1685: mol_type = genomic DNA
accgccaccatgtgggggcaggattccaccctacaggacacgcctcctccagacccagagatattccgccaacgcttcaggcgcttctgttaccagaacacttttgggccccgagaggctctcagtcggctgaaggaactttgtcatcagtggctgcggccagaaataaacaccaaggaacagatcctggagcttctggtgctagagcagtttctttccatcctgcccaaggagctccaggtctggctgcaggaataccgccccgatagtggagaggaggccgtgacccttctagaagacttggagcttgatttatcaggacaacaggtcccaggtcaagttcatggacctgagatgctcgcaagggggatggtgcctctggatccagttcaggagtcctcgagctttgaccttcatcacgaggccacccagtcccacttcaaacattcgtctcggaaaccccgcctcttacagtcacgagctcttcctgctgcccacattcctgcaccccctcatgagggtagtcccagagaccaggcgatggcatctgcactattcacagcggattcccaggcaatggtgaagatcgaggacatggctgtgtccctcattctggaggaatggggatgtcagaatctggctcggaggaatctcagtagggacaacaggcaggagaattatgggagcgcatttccccagggtggtgaaaacaggaatgagaacgaggagtcaacctcaaaggctgaaacctcggaagattcagcatcacgcggggagacaacaggaagatcccagaaagagtttggagagaaacgtgaccaggagggcaaaacaggagaaagacagcagaaaaaccctgaggagaaaaccaggaaagagaaaagagattcagggccagctataggaaaggacaaaaaaaccatcacaggagagagaggtccaagggagaaggggaaaggattgggaagaagcttcagtctgagctccaacttcaccacccctgaagaagttcccacgggaacaaagtctcacagatgtgatgaatgtggtaaatgcttcacgagaagttcaagccttatccgccataaaataatccacactggagaaaagccctatgaatgtagtgagtgtgggaaagccttcagtcttaactccaaccttgtcctgcatcagaggatccacacaggagagaaacctcatgaatgtaacgagtgtggcaaggccttcagccacagttccaatctcatcctccatcagcgcatccactctggagagaaaccttatgaatgtaatgagtgcgggaaggccttcagccagagctcggacctcaccaagcatcagagaattcacacgggggagaaaccctatgaatgtagtgaatgtggaaaagctttcaaccgaaactcatacctgattttgcatcggagaattcacactcgagaaaagccctacaagtgcactaagtgtggcaaggccttcacccgcagctccaccctcactctgcatcacagaatccatgccagagagagagcctctgagtacagcccagcctcccttgatgcatttggcgcgttcctgaaaagttgtgtgtagtaatgaactagtccgtaacttgaaagtatttcgatttcttggctttatatatcttgtggaaaggacgaaaagctgcttgaggaaggtacgct

SEQ ID NO: 2189 - DNA, 1379 bp, Homo sapiens
  source 1..1379: mol_type = genomic DNA
accgccaccatggcttcctcaattatctgccaggagcactgccagatctcgggccaggcaaaaatagacatcttattagttggagatgtcactgtgggctacctggctgatactgtacagaaactatttgcaaacatagcagaagtcaccatcaccatcagtgacacgaaggaggcagcagcgcttttggatgattgcatattcaacatggttctcttgaaggtgccttcttcactaagtgccgaggagctggaagccatcaagttaattagatttggcaaaaagaaaaatacacattcactgtttgtttttataatccctgaaaattttaaaggttgtatttcagggcatggaatggatattgctttaactgaaccactgacaatggaaaaaatgagtaatgtggtaaaatactggacaacatgtccctcaaacactgttaagactgaaaacgcaactgggcctgaagaacttggattgcccctgcagaggtcctacagcgaacacctgggatattttcctactgatctatttgcctgctctgaatctttaaggaatggcaatgggcttgaattaaatgcttcgttgtcagagttcgagaaaaacaaaaagatctctcttcttcattcaagcaaggaaaaactaagaagggaaagaatcaaatattgctgtgagcagctgcgtactctcttgccgtatgtaaaagggagaaagaatgatgcggcttcagttcttgaggcaacagttgattatgtgaaatatatccgggagaaaatctctccagccgttatggcccagattacagaagcacttcagagcaacatgaggttttgtaagaaacaacaaacacccattgagctgtctctcccaggcactgtcatggcacagcgggaaaacagtgtgatgagcacttactcccctgagagagggctccaattcctgactaatacgtgctggaatgggtgctccactcctgatgcagagagctccttggatgaagctgtgagagttccatcaagctccgcctcagagaatgctattggtgatccatataaaactcacatttccagtgcagcgctgtctctgaattccttgcatactgtcagatattattctaaagtcaccccttcctacgatgcaactgctgtaacaaatcagaacatttcaattcatttaccttcagccatgcccccggtctcaaagcttctccctcggcactgcacttctgggttgggccagacgtgcactacacatcccaactgtctgcaacagttttgggcgtattagtaatgaactagtccgtaacttgaaagtatttcgatttcttggctttatatatcttgtggaaaggacgaggtatcgagaccttatcacctgcg

SEQ ID NO: 2190 - DNA, 779 bp, Homo sapiens
  source 1..779: mol_type = genomic DNA
accgccaccatggcttcctcaattatctgccaggagcactgccagatctcgggccaggcaaaaatagacatcttattagttggagatgtcactgtgggctacctggctgatactgtacagaaactatttgcaaacatagcagaagtcaccatcaccatcagtgacacgaaggaggcagcagcgcttttggatgattgcatattcaacatggttctcttgaaggtgccttcttcactaagtgccgaggagctggaagccatcaagttaattagatttggcaaaaagaaaaatacacattcactgtttgtttttataatccctgaaaattttaaaggttgtatttcagggcatggaatggatattgctttaactgaaccactgacaatggaaaaaatgagtaatgtggtaaaatactggacaacatgtccctcaaacactgttaagactgaaaacgcaactgggcctgaagaacttggattgcccctgcagaggtcctacagcgaacacctgggatattttcctactgatctatttgcctgctctgaatctttaaggaatggcaatgggcttgaattaaatgcttcgttgtcagagttcgagaaaaacaaaaagatctctcttcttcattcaagcaaggaaaaactaagaaggctgtacaggaagcatagcagcttctgtttctggtagtaatgaactagtccgtaacttgaaagtatttcgatttcttggctttatatatcttgtggaaaggacgagcgacgacggttacatcgtgatat

SEQ ID NO: 2191 - DNA, 3689 bp, Homo sapiens
  source 1..3689: mol_type = genomic DNA
accgccaccatgacagtcatgtccctttccagggacctcaaggacgactttcacagtgacacggtactctccatcttaaatgagcagcgcattcggggcattttatgcgatgtcactatcattgtggaagataccaaatttaaagcccatagcaatgttctggcagcttcaagcctgtattttaaaaatatcttttggagccatacaatctgtatttccagccacgtcctggagctggacgatctcaaagctgaagtgtttactgaaatacttaattatatctacagttccacagtcgttgtcaagagacaggaaacagtcactgatctcgcagctgcaggaaaaaagctgggaatatcgttcttggaagaccttactgatcgcaacttctcaaattccccgggtccctatgtattctgtattactgaaaagggagtggttaaagaagaaaaaaatgaaaaaaggcatgaagaaccagccatcactaatgggccaaggatcacaaatgcattttccatcatcgaaacagaaaatagtaataacatgttttccccgctggacttgagggcaagtttcaaaaaggtctccgactccatgagaacagctagcctttgcctggagaggacggacgtctgccacgaggcagagcctgtccgcacacttgccgagcactcatacgctgtttcttccgtagctgaagcttacagaagtcagcctgtacgtgaacatgatggcagttcacctggtaacacagggaaagaaaattgtgaagcccttgcagcgaaaccgaaaacatgccggaagccaaagacattctccataccacaggattcggattcagccacagaaaatataccaccccctccagtatccaacttagaggttaatcaagaaagaagtccacaaccagctgctgttctcactcgttcaaaatctccaaacaatgaaggagatgtccatttttccagggaagatgaaaatcaatcttctgatgttcccgggccgccagccgcagaggttccacctctggtgtacaattgtagctgctgttccaaagcctttgacagcagcactctgctcagtgcccacatgcagcttcacaagccaacccaggagcctttagtgtgcaagtattgcaacaaacaattcaccaccctgaacaggttggatcggcatgaacagatctgcatgaggtcaagccacatgcccattcctggaggaaaccaacgctttttagaaaactatcctaccattggacaaaatggaggttcattcacaggtccagaacctttattatctgaaaataggattggtgaattttccagtaccggaagtactttgccagacacggaccacatggttaaatttgttaatgggcaaatgctctacagttgcgttgtgtgcaaacgtagttatgtgaccttatctagcctccgaagacatgcaaatgttcactcctggagaagaacatatccttgccattactgcaacaaagtatttgcattggctgagtacaggacaaggcatgaaatttggcatacgggagaaagacgatatcagtgcattttctgtcttgaaactttcatgacctactatatactcaaaaatcatcagaagtctttccatgccatcgatcatagactttccatcagtaaaaaaacagcaaatggaggcttgaagcctagtgtctatccgtataaactttataggctactgcctatgaaatgcaagagagccccttataagagctaccgaaattcttcctatgaaaatgcacgagaaaacagtcaaatgaatgagtctgcacctggtacctatgttgttcagaatccacacagctctgaattaccaacgctgaatttccaagatactgtaaacaccctgaccaacagtccagccatcccattggaaacatctgcatgtcaggacatacccacttctgccaatgtacaaaatgcagagggtaccaaatggggagaggaggcattgaaaatggatcttgacaataacttttattcaactgaggtgtcagtttcttccactgaaaatgctgtcagttctgacctccgggcaggggatgtacctgttttatctttgagtaatagcagtgagaatgccgcctctgtgatcagctacagtggctctgcaccctcggtcattgtacacagcagccagttttcatcggtgatcatgcacagcaatgccattgctgccatgaccagcagcaaccacagagccttttcagacccagctgtcagtcagtccctgaaagatgacagtaagcccgagccagataaagtgggtaggtttgcaagcagacccaaaagcattaaggagaaaaagaaaactacatcacataccaggggagaaataccggaggagtcaaactatgttgctgatcctggaggatcactgagcaaaaccacaaatattgctgaagaaaccagcaaaattgaaacctacattgcaaaacctgctctgccgggaacctccacaaatagtaatgttgcacccctttgccaaataacagtgaaaattggaaacgaagccattgtgaaaaggcacattctaggatctaaattgttttataaaagagggagaagacccaagtatcagatgcaggaggagcctttgccacaggggaatgacccagaacccagtggagacagcccactcgggctttgccaatccgagtgcatggagatgagtgaagtgttcgatgacgcaagtgaccaggattccactgacaaaccgtggcgcccttactacaactacaaacccaaaaagaaatccagacagttgaaaaaaatgaggaaagtcaactggaggaaggagcacggaaacaggagcccgagccataaatgtaaatacccagcagaactggattgcgccgtggggaaggctcctcaggataaaccctttgaggaagaagaaactaaagagatgcccaagctgcagtgtgaactctgtgatggagacaaagcagtgggggctggaaaccaaggaaggccccaccgacatcttacttctcggccatatgcctgcgagctctgcgccaagcagttccagagcccttccacactcaaaatgcacatgagatgtcacaccggggagaagccataccagtgcaagacctgcggacggtgcttttcggtgcaaggaaacttacagaaacatgaacgcatccacctgggcttgaaggagttcgtctgtcagtattgcaacaaggcattcaccttgaatgagaccctcaaaatccatgaaagaatccatactggagaaaagcgttaccactgtcagttctgctttcagagatttttgtatctctccaccaaaaggaatcacgagcagaggcatattcgggagcataatgggaagggctatgcctgcttccagtgccccaaaatttgcaaaacagctgctgcccttggaatgcaccaaaagaaacacttattcaaaagcccaagtcagcaggagaaaataggtgacgtgtgccacgaaaactcaaatcccttggagaatcaacatttcattggttcagaagacaatgaccaaaaggataacatacaaaccggtgtggaaaatgttgtcctttagtaatgaactagtccgtaacttgaaagtatttcgatttcttggctttatatatcttgtggaaaggacgaaacatctaatatcatatccgaaga

SEQ ID NO: 2192 - DNA, 920 bp, Homo sapiens
  source 1..920: mol_type = genomic DNA
accgccaccatgttcgtcaaatccgagaccttggagttgaaggaggaagaggacgtgttagtgctgctcggatcggcctcccccgccttggcggccctgaccccgctgtcatccagcgccgacgaagaagaggaggaggagccgggcgcgtcaggcggggcgcgtcggcagcgcggggctgaggccgggcagggggcgcggggcggcgtggctgcgggtgcggagggctgccggcccgcacggctgctgggtctggtacacgattgcaaacggcgcccttcccgggcgcgggccgtctcccgaggcgccaagacggccgagacggtgcagcgcatcaagaagacccgtagactgaaggccaacaaccgcgagcgaaaccgcatgcacaacctcaacgcggcactggacgcgctgcgcgaggtgctccccacgttccccgaggacgccaagctcaccaagatcgagaccctgcgcttcgcccacaactacatctgggcactcaccgagaccctgcgcctggcggatcactgcgggggcggcggcgggggcctgccgggggcgctcttctccgaggcagtgttgctgagcccgggaggagccagcgccgccctgagcagcagcggagacagcccctcgcccgcctccacgtggagttgcaccaacagccccgcgccgtcctcctccgtgtcctccaattccacctccccctacagctgcactttatcgcccgccagcccggccgggtcagacatggactattggcagcccccacctcccgacaagcaccgctatgcacctcacctccccatagccagggattgtatctagtaatgaactagtccgtaacttgaaagtatttcgatttcttggctttatatatcttgtggaaaggacgagctaagtctacttacaatgtcaat

SEQ ID NO: 2193 - DNA, 1565 bp, Homo sapiens
  source 1..1565: mol_type = genomic DNA
accgccaccatgtccctgccccccataagactgcccagcccctatggctctgatcggctggtacagctagcagccaggctccggccagcactctgtgatactctgatcaccgtagggagccaggagttccccgcccacagcctggtgctagcaggtgtcagccagcagctgggccgcaggggccagtgggctctgggagaaggcatcagcccttctacctttgcccagctcctgaactttgtgtatggggagagtgtagagctgcagcctggagagctaaggccccttcaggaggcggccagggccttgggagtgcagtccctggaagaggcatgctggagggctcgaggggacagggctaaaaagccagatccaggcctgaagaaacatcaggaggagccagagaaaccctcaaggaatcctgagagagaactgggggaccctggagagaagcagaaaccagaacaggtttctagaactggtgggagagaacaggagatgttgcacaagcactcgccaccaagaggcagacccgagatggcaggagcaacgcaggaggctcagcaggaacagaccaggtcaaaggagaaacgcctccaagcccctgttggccaaaggggagcagatgggaagcatggagtgctcacgtggttgagggaaaatccagggggctctgaggaaagtctgcgcaagctccctggcccccttcccccagcaggctccctgcaaaccagcgtcacccctaggccctcgtgggctgaggccccttggttggtggggggccagcctgccctgtggagcatcctgctgatgccgcccagatatggcattcccttctaccatagcacccccaccactggagcctggcaggaggtctggcgggaacagaggatcccactgtccctaaatgcccccaaagggctctggagccagaaccagttggcctcctccagccctaccccaggttccctcccccagggccccgcacagctcagccctggggagatggaagagtctgatcaggggcacacaggcgcacttgcaacctgtgcgggtcatgaggacaaggcaggctgcccacctcgcccgcaccctcccccggcccctcctgctcggtctcggccctatgcgtgctctgtctgtggaaagaggttttcactcaagcatcagatggagacgcactaccgagtccacacaggagagaagcccttctcctgtagcctttgtcctcagcgctcccgggacttctcggccatgaccaagcacctgcggacacacggggccgctccgtaccgctgctccctgtgcggggccggctgtcccagcctggcctccatgcaggcgcacatgcgcggtcactcgcccagccaactcccgcccggatggaccatccgctccaccttcctctactcctcctcgaggccgtctcggccctcgacctctccctgttgtccttcttcctccaccacctagtaatgaactagtccgtaacttgaaagtatttcgatttcttggctttatatatcttgtggaaaggacgatactctatgccgagacaccgtcaa

SEQ ID NO: 2194 - DNA, 1616 bp, Homo sapiens
  source 1..1616: mol_type = genomic DNA
accgccaccatgtcagtagaaatggacagcagcagttttattcagtttgatgtgcccgagtacagcagcaccgttctgagccagctaaacgaactccgcctgcaggggaaactatgtgacatcattgtacacattcagggtcagccattccgagcccacaaagcagtccttgctgccagctccccatatttccgggaccattcagcgttaagtaccatgagtggcttgtcaatatcagtgattaaaaatcccaatgtgtttgagcagttgctttctttttgttacactggaagaatgtccttgcagctgaaggatgttgtcagttttctgactgcagccagctttcttcagatgcagtgtgtcattgacaagtgcacgcagatcctagagagcatccattccaaaatcagcgttggagatgttgactctgttaccgtcggtgctgaagagaatcccgagagtcgaaacggagtgaaagacagcagcttctttgccaacccagtggagatctctcctccatattgctctcagggacggcagcccaccgcaagcagtgacctccggatggagacgacccccagcaaagctttgcgcagccgcttacaggaggaggggcactcagaccgcgggagcagtgggagcgtttctgaatatgagattcagatagagggagaccatgagcaaggagacctattggtgagggagagccagatcaccgaggtgaaagtgaagatggagaagtccgaccggcccagctgttccgacagctcctccctgggtgacgatgggtaccacaccgagatggttgatggggaacaagttgtggcagtgaatgtgggctcctatggttctgtgctccagcacgcatactcctattcccaagcagcctcacagccaaccaatgtatcagaagcttttggaagtttgagtaattccagcccatccaggtccatgctgagctgtttccgaggagggcgtgcccgccagaagcgggctttgtctgtccacctgcacagtgacctgcagggcctggtgcagggctctgacagtgaagccatgatgaacaaccccgggtatgagagcagtccccgggagaggagtgcgagagggcattggtacccgtacaatgagaggttgatctgtatttactgtggaaagtccttcaaccagaaaggaagccttgataggcacatgcgactccatatgggaatcaccccctttgtgtgcaagttctgtgggaagaagtacacacggaaggaccaactggagtaccacatccggggccatacagatgataaaccattccgctgtgagatctgcgggaagtgctttccattccaaggtaccctcaaccagcacttgcggaaaaaccacccaggcgttgctgaagtcaggagtcgcattgagtcccccgagagaacagatgtgtacgtggaacagaaactagaaaatgacgcatcggcctcagagatgggcctagattcccggatggaaattcacacagtgtctgatgctcccgattagtaatgaactagtccgtaacttgaaagtatttcgatttcttggctttatatatcttgtggaaaggacgaactcggcgtaatagctctagtaag

SEQ ID NO: 2195 - DNA, 1604 bp, Homo sapiens
  source 1..1604: mol_type = genomic DNA
accgccaccatggacagcagcagttttattcagtttgatgtgcccgagtacagcagcaccgttctgagccagctaaacgaactccgcctgcaggggaaactatgtgacatcattgtacacattcagggtcagccattccgagcccacaaagcagtccttgctgccagctccccatatttccgggaccattcagcgttaagtaccatgagtggcttgtcaatatcagtgattaaaaatcccaatgtgtttgagcagttgctttctttttgttacactggaagaatgtccttgcagctgaaggatgttgtcagttttctgactgcagccagctttcttcagatgcagtgtgtcattgacaagtgcacgcagatcctagagagcatccattccaaaatcagcgttggagatgttgactctgttaccgtcggtgctgaagagaatcccgagagtcgaaacggagtgaaagacagcagcttctttgccaacccagtggagatctctcctccatattgctctcagggacggcagcccaccgcaagcagtgacctccggatggagacgacccccagcaaagctttgcgcagccgcttacaggaggaggggcactcagaccgcgggagcagtgggagcgtttctgaatatgagattcagatagagggagaccatgagcaaggagacctattggtgagggagagccagatcaccgaggtgaaagtgaagatggagaagtccgaccggcccagctgttccgacagctcctccctgggtgacgatgggtaccacaccgagatggttgatggggaacaagttgtggcagtgaatgtgggctcctatggttctgtgctccagcacgcatactcctattcccaagcagcctcacagccaaccaatgtatcagaagcttttggaagtttgagtaattccagcccatccaggtccatgctgagctgtttccgaggagggcgtgcccgccagaagcgggctttgtctgtccacctgcacagtgacctgcagggcctggtgcagggctctgacagtgaagccatgatgaacaaccccgggtatgagagcagtccccgggagaggagtgcgagagggcattggtacccgtacaatgagaggttgatctgtatttactgtggaaagtccttcaaccagaaaggaagccttgataggcacatgcgactccatatgggaatcaccccctttgtgtgcaagttctgtgggaagaagtacacacggaaggaccaactggagtaccacatccggggccatacagatgataaaccattccgctgtgagatctgcgggaagtgctttccattccaaggtaccctcaaccagcacttgcggaaaaaccacccaggcgttgctgaagtcaggagtcgcattgagtcccccgagagaacagatgtgtacgtggaacagaaactagaaaatgacgcatcggcctcagagatgggcctagattcccggatggaaattcacacagtgtctgatgctcccgattagtaatgaactagtccgtaacttgaaagtatttcgatttcttggctttatatatcttgtggaaaggacgaggctgccatcatgtaccaactggc

SEQ ID NO: 2196 - DNA, 1028 bp, Homo sapiens
  source 1..1028: mol_type = genomic DNA
accgccaccatggagaaaggtgggaacatacaattggagattcctgacttcagcaactctgtcctgagccatctaaaccagttgcgcatgcagggccgtctctgtgatattgtggtcaatgtgcaaggacaagcttttcgggctcacaaagtggtgctggctgccagctccccctatttccgggatcacatgtccttgaatgagatgagtacagtctccatttcagtcatcaagaaccctactgtttttgaacagctcctttctttctgttacacagggcggatatgcctgcaactggcagatatcatcagctacctaacagctgccagttttctgcaaatgcagcatattatagacaaatgtacacagatcctggagggcattcatttcaaaattaatgtggctgaggttgaagcagaattaagtcaaacaaggacaaagcatcaagagagacctccagagtctcacagggttacaccaaatctcaaccgctcccttagcccacgacataataccccaaagggaaaccggcgaggtcaggttagtgctgtgctggatatcagagagctaagtcctcctgaggagtccaccagccctcagatcattgaaccaagttctgatgtagagagccgggagcccattcttcggatcaaccgagcaggacagtggtatgtggagacaggagtggcggaccgtgggggtcggagtgatgatgaagttagagttcttggagcagtacacatcaaaactgaaaatctggaggagtggcttgggcctgagaatcagccttctggagaagatgggagtagtgcagaggaagtaacagccatggtgattgataccacaggccatggttctgtaggacaggaaaattatactttagggtcttcaggagccaaggtggctcggccaacaagcagtgaagttgacaggtagtaatgaactagtccgtaacttgaaagtatttcgatttcttggctttatatatcttgtggaaaggacgatcgtgttgcggcccacctagagct

SEQ ID NO: 2197 - DNA, 1613 bp, Homo sapiens
  source 1..1613: mol_type = genomic DNA
accgccaccatggagaaaggtgggaacatacaattggagattcctgacttcagcaactctgtcctgagccatctaaaccagttgcgcatgcagggccgtctctgtgatattgtggtcaatgtgcaaggacaagcttttcgggctcacaaagtggtgctggctgccagctccccctatttccgggatcacatgtccttgaatgagatgagtacagtctccatttcagtcatcaagaaccctactgtttttgaacagctcctttctttctgttacacagggcggatatgcctgcaactggcagatatcatcagctacctaacagctgccagttttctgcaaatgcagcatattatagacaaatgtacacagatcctggagggcattcatttcaaaattaatgtggctgaggttgaagcagaattaagtcaaacaaggacaaagcatcaagagagacctccagagtctcacagggttacaccaaatctcaaccgctcccttagcccacgacataataccccaaagggaaaccggcgaggtcaggttagtgctgtgctggatatcagagagctaagtcctcctgaggagtccaccagccctcagatcattgaaccaagttctgatgtagagagccgggagcccattcttcggatcaaccgagcaggacagtggtatgtggagacaggagtggcggaccgtgggggtcggagtgatgatgaagttagagttcttggagcagtacacatcaaaactgaaaatctggaggagtggcttgggcctgagaatcagccttctggagaagatgggagtagtgcagaggaagtaacagccatggtgattgataccacaggccatggttctgtaggacaggaaaattatactttagggtcttcaggagccaaggtggctcggccaacaagcagtgaagttgacagatttagcccctccggcagtgttgttcccttgacagagagacacagagccagaagtgagtctcctgggagaatggatgagcctaagcaacccagctcccaggtagaagagtcagcaatgatgggagtaagtggctatgtggagtatctccgagagcaggaagtatctgagcggtggttccggtacaaccctcgtctcacctgcatctattgcgccaaatctttcaaccagaagggaagcctggaccgccacatgcgcctacacatggggatcacaccattcgtctgccgcatgtgtggcaagaagtatacccggaaagatcagctggagtatcatatccgcaagcacacaggcaacaagccctttcactgtcatgtctgtggcaaaagtttccccttccaggccatcttgaatcagcactttcgcaaaaaccaccctggctgtatacccctggaggggcctcacagcatctcccctgaaacaactgtcacatctcgaggacaagctgaggaagagtcaccttcacaggaagagacagttgctcctggggaagctgtccagggctctgtgtccaccactgggccagactagtaatgaactagtccgtaacttgaaagtatttcgatttcttggctttatatatcttgtggaaaggacgatgatgggcccgttagagagccagt

SEQ ID NO: 2198 - DNA, 1973 bp, Homo sapiens
  source 1..1973: mol_type = genomic DNA
accgccaccatgaaacagcccaacaggaaaaggaagcttaatatggattccaaagagcgtttggatcaggacggacgcttggagcaagctgaagaggaaaagaagcccaaggatagcacaacccctttgagtcacgtcccttcagcggctgcacagggagcatggtcttgggagtggtacttgaaagaacagaaggctgtcgcagcacctgttgagctgttttccaaggatcagtcctttccagagcatgaaaatggttttcagattggaatgagattagaaggcattgatccccgacatccatcggtattctgtgtgctttctgtagcggaggtttgtggttaccgtctaagacttcattttgatggttatttaagttgctatgatttttggaccaatgctggttcccctgacattcatccagtaggatggtgtgaaaagaccaaacatgaactgcacatccctaagggttatagaaaagataaatttgtttggatggattacttgaaggcctgcaaattgcaaaatgctccaaagaaattattcagaaacagaagtcctaatgggccaatgtctaaagaatttcaggttggaatgaagctggaggccgtggacaggaagaacccttccttggtgtgtgtggcgaccatagcagatattgttgaagatcgcttactagtgcattttgacaactgggatgatagttacgattactggtgcgatgttaatagcccttatgtccagccagttggttggtgtcaggagaatggaagaactctgatagcaccccaaggttatcccaatccagaaaatttttcctggacagaatacctggaagctactcaaaccaatgcagttcctgccaaagtttttaaaatgaggttgcctcatggttttctgccaaatatgaaacttgaagttgtggataaacggaaccccaggttaattcgtgttgctacgattgtagatgttgatgaccaaagagtaaaggttcattttgatggttgggaccataagtatgactactgggtggaggcagacagccctgatatccacccgatcggatggtgtgatgtcacagggcatccactggaagtgccacagcgaacgaatgacctgaagatccttccaggtcaagctgtctgtcctactcccgggtgccgaggaataggccatatccgtggtccacgttattcgggacatcacagtgcttttggctgcccgtattcagacatgaacttgaaaaaggaggcaacacttcacgatcgtttgagagaacaaacacaggcaaatttggaatcagactcttcacattcaaaatcaaaaagcctctgtagtttgaacttcaatggaaaacatgaaaaggtgaacagtcagcccagacttgtacagcaggcaaagtgtttgaaaatcaaaggaaaagaagatattgacttggataatctcttcagagtgcttgtgctgcatcccagaggtttggaatactcggtggagcaggcgcagcaggtgcttcaccagtcagtgtccatgtccacggtgtcagcccacccttttcgggaccttcccctcggcagggagcaacactgcaagttgcttccaggcgtggctgacatccgggccagccaagtggcacgttggactgtggatgaggtggctgagtttgtacagtctcttctgggctgtgaagagcatgccaagtgctttaagaaagagcagatcgatggcaaagccttcctgcttctgacacagacggacattgtcaaagtgatgaagatcaaactgggcccagcactgaagatttacaactctatcctgatgttcaggcattcccaggaactccctgaagaagatattgcctcaggccaagaagtcaggggatagtaatgaactagtccgtaacttgaaagtatttcgatttcttggctttatatatcttgtggaaaggacgatcatctcggtgtcatgtattgttg

SEQ ID NO: 2199 - DNA, 1946 bp, Homo sapiens
  source 1..1946: mol_type = genomic DNA
accgccaccatgaaacagcccaacaggaaaaggaagcttaatatggattccaaagagcgtttggatcaggacggacgcttggagcaagctgaagaggaaaagaagcccaaggatagcacaacccctttgagtcacgtcccttcagcggctgcacagggagcatggtcttgggagtggtacttgaaagaacagaaggctgtcgcagcacctgttgagctgttttccaaggatcagtcctttccagagcatgaaaatggttttcagattggaatgagattagaaggcattgatccccgacatccatcggtattctgtgtgctttctgtagcggaggtttgtggttaccgtctaagacttcattttgatggttatttaagttgctatgatttttggaccaatgctggttcccctgacattcatccagtaggatggtgtgaaaagaccaaacatgaactgcacatccctaagggttatagaaaagataaatttgtttggatggattacttgaaggcctgcaaattgcaaaatgctccaaagaaattattcagaaacagaagtcctaatgggccaatgtctaaagaatttcaggttggaatgaagctggaggccgtggacaggaagaacccttccttggtgtgtgtggcgaccatagcagatattgttgaagatcgcttactagtgcattttgacaactgggatgatagttacgattactggtgcgatgttaatagcccttatgtccagccagttggttggtgtcaggagaatggaagaactctgatagcaccccaaggttatcccaatccagaaaatttttcctggacagaatacctggaagctactcaaaccaatgcagttcctgccaaagtttttaaaatgaggttgcctcatggttttctgccaaatatgaaacttgaagttgtggataaacggaaccccaggttaattcgtgttgctacgattgtagatgttgatgaccaaagagtaaaggttcattttgatggttgggaccataagtatgactactgggtggaggcagacagccctgatatccacccgatcggatggtgtgatgtcacagggcatccactggaagtgccacagcgaacgaatgacctgaagatccttccaggtcaagctgtctgtcctactcccgggtgccgaggaataggccatatccgtggtccacgttattcgggacatcacagtgcttttggctgcccgtattcagacatgaacttgaaaaaggaggcaacacttcacgatcgtttgagagaacaaacacaggcaaatttggaatcagactcttcacattcaaaatcaaaaagcctctgtagtttgaacttcaatggaaaacatgaaaaggtgaacagtcagcccagacttgtacagcaggcaaagtgtttgaaaatcaaaggaaaagaagatattgacttggataatctcttcagagaatactcggtggagcaggcgcagcaggtgcttcaccagtcagtgtccatgtccacggtgtcagcccacccttttcgggaccttcccctcggcagggagcaacactgcaagttgcttccaggcgtggctgacatccgggccagccaagtggcacgttggactgtggatgaggtggctgagtttgtacagtctcttctgggctgtgaagagcatgccaagtgctttaagaaagagcagatcgatggcaaagccttcctgcttctgacacagacggacattgtcaaagtgatgaagatcaaactgggcccagcactgaagatttacaactctatcctgatgttcaggcattcccaggaactccctgaagaagatattgcctcaggccaagaagtcaggggatagtaatgaactagtccgtaacttgaaagtatttcgatttcttggctttatatatcttgtggaaaggacgagctaacccgactcttcggtataac

SEQ ID NO: 2200 - DNA, 1937 bp, Homo sapiens
  source 1..1937: mol_type = genomic DNA
accgccaccatgtggttggccaaggcctgttggtccatccagagtgagatgccctgtatccaagcccaatatgggacaccagcaccgagtccgggaccccgtgaccacctggcaagcgaccccctgacccctgagttcatcaagcccaccatggacctggccagccccgaggcagcccccgctgcccccactgccctgcccagcttcagcaccttcatggacggctacacaggagagtttgacaccttcctctaccagctgccaggaacagtccagccatgctcctcagcctcctcctcggcctcctccacatcctcgtcctcagccacctcccctgcctctgcctccttcaagttcgaggacttccaggtgtacggctgctaccccggccccctgagcggcccagtggatgaggccctgtcctccagtggctctgactactatggcagcccctgctcggccccgtcgccctccacgcccagcttccagccgccccagctctctccctgggatggctccttcggccacttctcgcccagccagacttacgaaggcctgcgggcatggacagagcagctgcccaaagcctctgggcccccacagcctccagccttcttttccttcagtcctcccaccggccccagccccagcctggcccagagccccctgaagttgttcccctcacaggccacccaccagctgggggagggagagagctattccatgcctacggccttcccaggtttggcacccacttctccacaccttgagggctcggggatactggatacacccgtgacctcaaccaaggcccggagcggggccccaggtggaagtgaaggccgctgtgctgtgtgtggggacaacgcttcatgccagcattatggtgtccgcacatgtgagggctgcaagggcttcttcaagcgcacagtgcagaaaaacgccaagtacatctgcctggctaacaaggactgccctgtggacaagaggcggcgaaaccgctgccagttctgccgcttccagaagtgcctggcggtgggcatggtgaaggaagttgtccgaacagacagcctgaaggggcggcggggccggctaccttcaaaacccaagcagcccccagatgcctcccctgccaatctcctcacttccctggtccgtgcacacctggactcagggcccagcactgccaaactggactactccaagttccaggagctggtgctgccccactttgggaaggaagatgctggggatgtacagcagttctacgacctgctctccggttctctggaggtcatccgcaagtgggcggagaagatccctggctttgctgagctgtcaccggctgaccaggacctgttgctggagtcggccttcctggagctcttcatcctccgcctggcgtacaggtctaagccaggcgagggcaagctcatcttctgctcaggcctggtgctacaccggctgcagtgtgcccgtggcttcggggactggattgacagtatcctggccttctcaaggtccctgcacagcttgcttgtcgatgtccctgccttcgcctgcctctctgcccttgtcctcatcaccgaccggcatgggctgcaggagccgcggcgggtggaggagctgcagaaccgcatcgccagctgcctgaaggagcacgtggcagctgtggcgggcgagccccagccagccagctgcctgtcacgtctgttgggcaaactgcccgagctgcggaccctgtgcacccagggcctgcagcgcatcttctacctcaagctggaggacttggtgccccctccacccatcattgacaagatcttcatggacacgctgcccttctagtaatgaactagtccgtaacttgaaagtatttcgatttcttggctttatatatcttgtggaaaggacgagacagctgggacatatgcgaatgg

SEQ ID NO: 2201 - DNA, 2060 bp, Homo sapiens
  source 1..2060: mol_type = genomic DNA
accgccaccatgacaagtgcacagtataaaatcaagattctaattgaaggcctccaccatggacagaggccaggccctgcccctcccaggcagcctggctccttctgctgggccctgaaggcagacgggataatgtggttggccaaggcctgttggtccatccagagtgagatgccctgtatccaagcccaatatgggacaccagcaccgagtccgggaccccgtgaccacctggcaagcgaccccctgacccctgagttcatcaagcccaccatggacctggccagccccgaggcagcccccgctgcccccactgccctgcccagcttcagcaccttcatggacggctacacaggagagtttgacaccttcctctaccagctgccaggaacagtccagccatgctcctcagcctcctcctcggcctcctccacatcctcgtcctcagccacctcccctgcctctgcctccttcaagttcgaggacttccaggtgtacggctgctaccccggccccctgagcggcccagtggatgaggccctgtcctccagtggctctgactactatggcagcccctgctcggccccgtcgccctccacgcccagcttccagccgccccagctctctccctgggatggctccttcggccacttctcgcccagccagacttacgaaggcctgcgggcatggacagagcagctgcccaaagcctctgggcccccacagcctccagccttcttttccttcagtcctcccaccggccccagccccagcctggcccagagccccctgaagttgttcccctcacaggccacccaccagctgggggagggagagagctattccatgcctacggccttcccaggtttggcacccacttctccacaccttgagggctcggggatactggatacacccgtgacctcaaccaaggcccggagcggggccccaggtggaagtgaaggccgctgtgctgtgtgtggggacaacgcttcatgccagcattatggtgtccgcacatgtgagggctgcaagggcttcttcaagcgcacagtgcagaaaaacgccaagtacatctgcctggctaacaaggactgccctgtggacaagaggcggcgaaaccgctgccagttctgccgcttccagaagtgcctggcggtgggcatggtgaaggaagttgtccgaacagacagcctgaaggggcggcggggccggctaccttcaaaacccaagcagcccccagatgcctcccctgccaatctcctcacttccctggtccgtgcacacctggactcagggcccagcactgccaaactggactactccaagttccaggagctggtgctgccccactttgggaaggaagatgctggggatgtacagcagttctacgacctgctctccggttctctggaggtcatccgcaagtgggcggagaagatccctggctttgctgagctgtcaccggctgaccaggacctgttgctggagtcggccttcctggagctcttcatcctccgcctggcgtacaggtctaagccaggcgagggcaagctcatcttctgctcaggcctggtgctacaccggctgcagtgtgcccgtggcttcggggactggattgacagtatcctggccttctcaaggtccctgcacagcttgcttgtcgatgtccctgccttcgcctgcctctctgcccttgtcctcatcaccgaccggcatgggctgcaggagccgcggcgggtggaggagctgcagaaccgcatcgccagctgcctgaaggagcacgtggcagctgtggcgggcgagccccagccagccagctgcctgtcacgtctgttgggcaaactgcccgagctgcggaccctgtgcacccagggcctgcagcgcatcttctacctcaagctggaggacttggtgccccctccacccatcattgacaagatcttcatggacacgctgcccttctagtaatgaactagtccgtaacttgaaagtatttcgatttcttggctttatatatcttgtggaaaggacgattcccattactgacagaggccagt

SEQ ID NO: 2202 - DNA, 665 bp, Homo sapiens
  source 1..665: mol_type = genomic DNA
accgccaccatgtcggtgaattacgcggcggggctgtcgccgtacgcggacaagggcaagtgcggcctcccggagatcttcgaccccccggaggagctggagcggaaggtgtgggaactggcgaggctggtctggcagtcttccagtgtggtgttccacacgggtgccggcatcagcactgcctctggcatccccgacttcagggacaaactggcagagctccacgggaacatgtttgtggaagaatgtgccaagtgtaagacgcagtacgtccgagacacagtcgtgggcaccatgggcctgaaggccacgggccggctctgcaccgtggctaaggcaagggggctgcgagcctgcaggggagagctgagggacaccatcctagactgggaggactccctgcccgaccgggacctggcactcgccgatgaggccagcagatccggcccagcgggaacctgccgctggctaccaagcgccggggaggccgcctggtcatcgtcaacctgcagcccaccaagcacgaccgccatgctgacctccgcatccatggctacgttgacgaggtcatagtaatgaactagtccgtaacttgaaagtatttcgatttcttggctttatatatcttgtggaaaggacgaaggtctataaccttccacggacct

SEQ ID NO: 2203 - DNA, 1088 bp, Homo sapiens
  source 1..1088: mol_type = genomic DNA
accgccaccatgtcggtgaattacgcggcggggctgtcgccgtacgcggacaagggcaagtgcggcctcccggagatcttcgaccccccggaggagctggagcggaaggtgtgggaactggcgaggctggtctggcagtcttccagtgtggtgttccacacgggtgccggcatcagcactgcctctggcatccccgacttcaggggtccccacggagtctggaccatggaggagcgaggtctggcccccaagttcgacaccacctttgagagcgcgcggcccacgcagacccacatggcgctggtgcagctggagcgcgtgggcctcctccgcttcctggtcagccagaacgtggacgggctccatgtgcgctcaggcttccccagggacaaactggcagagctccacgggaacatgtttgtggaagaatgtgccaagtgtaagacgcagtacgtccgagacacagtcgtgggcaccatgggcctgaaggccacgggccggctctgcaccgtggctaaggcaagggggctgcgagcctgcaggaacgccgacctgtccatcacgctgggtacatcgctgcagatccggcccagcgggaacctgccgctggctaccaagcgccggggaggccgcctggtcatcgtcaacctgcagcccaccaagcacgaccgccatgctgacctccgcatccatggctacgttgacgaggtcatgacccggctcatgaagcacctggggctggagatccccgcctgggacggcccccgtgtgctggagagggcgctgccacccctgccccgcccgcccacccccaagctggagcccaaggaggaatctcccacccggatcaacggctctatccccgccggccccaagcaggagccctgcgcccagcacaacggctcagagcccgccagccccaaacgggagcggcccaccagccctgccccccacagaccccccaaaagggtgaaggccaaggcggtccccagctagtaatgaactagtccgtaacttgaaagtatttcgatttcttggctttatatatcttgtggaaaggacgaatacatgtctcgtaatgagtggtg

SEQ ID NO: 2204 - DNA, 632 bp, Homo sapiens
  source 1..632: mol_type = genomic DNA
accgccaccatggaggagcgaggtctggcccccaagttcgacaccacctttgagagcgcgcggcccacgcagacccacatggcgctggtgcagctggagcgcgtgggcctcctccgcttcctggtcagccagaacgtggacgggctccatgtgcgctcaggcttccccagggacaaactggcagagctccacgggaacatgtttgtggaagaatgtgccaagtgtaagacgcagtacgtccgagacacagtcgtgggcaccatgggcctgaaggccacgggccggctctgcaccgtggctaaggcaagggggctgcgagcctgcaggggagagctgagggacaccatcctagactgggaggactccctgcccgaccgggacctggcactcgccgatgaggccagcagatccggcccagcgggaacctgccgctggctaccaagcgccggggaggccgcctggtcatcgtcaacctgcagcccaccaagcacgaccgccatgctgacctccgcatccatggctacgttgacgaggtcatagtaatgaactagtccgtaacttgaaagtatttcgatttcttggctttatatatcttgtggaaaggacgagaaaccgtgagccgtgctggctag

SEQ ID NO: 2205 - DNA, 3314 bp, Homo sapiens
  source 1..3314: mol_type = genomic DNA
accgccaccatggttttggatgaccttccaaacttagaagacatctatacttccttgtgttcatcaacaatggaagactcagagatggattttgactctggactagaagatgatgacacaaaaagtgatagtattttggaggattccacaatttttgtggccttcaaaggaaatatagatgataaagacttcaaatggaaattagatgcaatattgaaaaacgtgcccaatttgttacacatggagtccagcaagctaaaagtacagaaggtggagccctggaacagcgtgcgtgtgacattcaacatcccccgggaagcagcggagcggctacggatccttgctcagagcaacaaccagcagcttcgggatttagggattctctccgttcagattgaaggggaaggtgctattaacctggctttggctcagaaccgaagccaagatgtgagaatgaatggacccatgggagctggaaattcagttaggatggaggcgggatttcctatggcaagtggtccaggaataataaggatgaacaaccctgccactgttatgatacccccgggtggaaatgtgtcatcttccatgatggcaccaggccccaatccagagctgcagcccaggactcctcgccctgcttctcagtcagatgcaatggatccactcctctctgggctccatatacagcagcaaagtcatccctcaggatctttagctcccccacatcacccaatgcagcctgtctctgtgaacagacaaatgaacccagctaattttccccagctgcagcagcagcagcaacaacaacaacagcagcagcagcagcagcagcagcaacaacagcaacagcagcaacaacagttgcaggcaagacccccacagcaacatcagcagcaacagccacagggaattcgaccccagtttactgccccaactcaggtgcctgttcctccaggctggaaccagctgccttctggagcccttcaacctcctccagcccagggttctctgggcacaatgactgcaaaccaagggtggaagaaggctcccttgcccggcccaatgcaacagcaactccaggcaagaccatccttagccacggtacagacgccttcccaccctccccctccatatccctttggcagccagcaagcctcacaagcccacacaaactttcctcagatgagcaacccaggccagttcacagctcctcagatgaagagtttgcagggagggccctctagggtcccaactcccttgcagcagccccacctcaccaacaagtctcctgcctcctcaccctcctccttccagcagggatcccctgcatcctccccaacggttaaccaaactcagcagcagatgggaccaaggccacctcaaaataacccacttccccagggatttcagcagcctgtcagctctccgggtcggaatcctatggttcaacagggaaatgtgccacctaacttcatggtgatgcagcagcaaccaccaaaccaggggccacagagtttacatccaggcctaggaggaatgcctaaacgcctcccacctggcttctcagcaggacaggccaatccgaactttatgcaaggtcaggtgccttcgaccacagcaaccacccctgggaattcaggagcccctcagctgcaagcaaatcaaaatgtccagcatgcaggtggtcaaggagctggtcctcctcaaaaccagatgcaggtgtcccacgggccgccaaatatgatgcagcccagcctcatgggaattcatggcaacatgaacaatcagcaggctggtacttctggggttcctcaagtgaacctcagcaacatgcaaggccagccccagcagggcccaccatctcagctgatgggcatgcaccagcaaatcgtgccctcccagggccagatggtccagcaacaaggaaccttgaaccctcagaaccctatgatcctttcaagggcccagcttatgccacagggccagatgatggtgaaccccccgagccaaaatcttgggccctcgccccaaaggatgaccccacccaagcagatgctttcccagcagggcccacaaatgatggcgccacataaccagatgatggggcctcaggggcaggttttgctccaacagaacccaatgatagagcagattatgaccaatcaaatgcaggggaataagcagcagtttaacactcagaaccagtccaatgtcatgccgggaccagcccagataatgaggggaccaactccaaacatgcaaggaaatatggtgcagtttacgggacagatgtcaggacagatgctgccccagcaagggcctgtgaacaacagtccatctcaggttatgggcattcagggacaggtcctgcggccaccagggcccagcccacacatggcccagcagcatggtgatcctgctactacagcaaataacgatgtcagtttatctcagatgatgcctgatgttagcattcaacaaaccaacatggtcccccctcatgtgcaggccatgcagggaaacagtgcctcgggaaaccacttctcaggccatgggatgtctttcaatgcacctttcagtggagctcccaatggaaatcagatgtcctgtggtcaaaatccaggcttcccagtcaataaggatgtcacgctaacgagcccattgttggtcaacttattgcagagtgacatatctgcaggccattttggggtaaacaataagcaaaataataccaacgcaaataaaccgaagaagaagaaaccccctcggaagaagaaaaatagtcagcaagatctaaacaccccagatactcgcccagctggtctggaagaggctgatcagccaccgttgcctggagaacaaggaattaacttggataactcaggccctaaactgccagaattttcaaaccggccaccagccccgtcgcagaatttagtctcaaaggaaacttcaaccacagcactgcaggcctctgttgccagaccagagctggaggtaaatgctgccatagtctctggacaaagcagtgagcccaaagagatagttgaaaagtccaaaatcccaggccgaagaaactcccgaactgaagagccaactgtggcctctgaaagtgtggaaaatggacatcgtaaacgatcttctcgacctgcttcagcctccagctctactaaagacataaccagtgcggtgcaatccaagcgaagaaaatccaagtagtaatgaactagtccgtaacttgaaagtatttcgatttcttggctttatatatcttgtggaaaggacgattgcacagtaacgcgtactggtcc

SEQ ID NO: 2206 - DNA, 6293 bp, Homo sapiens
  source 1..6293: mol_type = genomic DNA
accgccaccatggttttggatgaccttccaaacttagaagacatctatacttccttgtgttcatcaacaatggaagactcagagatggattttgactctggactagaagatgatgacacaaaaagtgatagtattttggaggattccacaatttttgtggccttcaaaggaaatatagatgataaagacttcaaatggaaattagatgcaatattgaaaaacgtgcccaatttgttacacatggagtccagcaagctaaaagtacagaaggtggagccctggaacagcgtgcgtgtgacattcaacatcccccgggaagcagcggagcggctacggatccttgctcagagcaacaaccagcagcttcgggatttagggattctctccgttcagattgaaggggaaggtgctattaacctggctttggctcagaaccgaagccaagatgtgagaatgaatggacccatgggagctggaaattcagttaggatggaggcgggatttcctatggcaagtggtccaggaataataaggatgaacaaccctgccactgttatgatacccccgggtggaaatgtgtcatcttccatgatggcaccaggccccaatccagagctgcagcccaggactcctcgccctgcttctcagtcagatgcaatggatccactcctctctgggctccatatacagcagcaaagtcatccctcaggatctttagctcccccacatcacccaatgcagcctgtctctgtgaacagacaaatgaacccagctaattttccccagctgcagcagcagcagcaacaacaacaacagcagcagcagcagcagcagcagcaacaacagcaacagcagcaacaacagttgcaggcaagacccccacagcaacatcagcagcaacagccacagggaattcgaccccagtttactgccccaactcaggtgcctgttcctccaggctggaaccagctgccttctggagcccttcaacctcctccagcccagggttctctgggcacaatgactgcaaaccaagggtggaagaaggctcccttgcccggcccaatgcaacagcaactccaggcaagaccatccttagccacggtacagacgccttcccaccctccccctccatatccctttggcagccagcaagcctcacaagcccacacaaactttcctcagatgagcaacccaggccagttcacagctcctcagatgaagagtttgcagggagggccctctagggtcccaactcccttgcagcagccccacctcaccaacaagtctcctgcctcctcaccctcctccttccagcagggatcccctgcatcctccccaacggttaaccaaactcagcagcagatgggaccaaggccacctcaaaataacccacttccccagggatttcagcagcctgtcagctctccgggtcggaatcctatggttcaacagggaaatgtgccacctaacttcatggtgatgcagcagcaaccaccaaaccaggggccacagagtttacatccaggcctaggaggaatgcctaaacgcctcccacctggcttctcagcaggacaggccaatccgaactttatgcaaggtcaggtgccttcgaccacagcaaccacccctgggaattcaggagcccctcagctgcaagcaaatcaaaatgtccagcatgcaggtggtcaaggagctggtcctcctcaaaaccagatgcaggtgtcccacgggccgccaaatatgatgcagcccagcctcatgggaattcatggcaacatgaacaatcagcaggctggtacttctggggttcctcaagtgaacctcagcaacatgcaaggccagccccagcagggcccaccatctcagctgatgggcatgcaccagcaaatcgtgccctcccagggccagatggtccagcaacaaggaaccttgaaccctcagaaccctatgatcctttcaagggcccagcttatgccacagggccagatgatggtgaaccccccgagccaaaatcttgggccctcgccccaaaggatgaccccacccaagcagatgctttcccagcagggcccacaaatgatggcgccacataaccagatgatggggcctcaggggcaggttttgctccaacagaacccaatgatagagcagattatgaccaatcaaatgcaggggaataagcagcagtttaacactcagaaccagtccaatgtcatgccgggaccagcccagataatgaggggaccaactccaaacatgcaaggaaatatggtgcagtttacgggacagatgtcaggacagatgctgccccagcaagggcctgtgaacaacagtccatctcaggttatgggcattcagggacaggtcctgcggccaccagggcccagcccacacatggcccagcagcatggtgatcctgctactacagcaaataacgatgtcagtttatctcagatgatgcctgatgttagcattcaacaaaccaacatggtcccccctcatgtgcaggccatgcagggaaacagtgcctcgggaaaccacttctcaggccatgggatgtctttcaatgcacctttcagtggagctcccaatggaaatcagatgtcctgtggtcaaaatccaggcttcccagtcaataaggatgtcacgctaacgagcccattgttggtcaacttattgcagagtgacatatctgcaggccattttggggtaaacaataagcaaaataataccaacgcaaataaaccgaagaagaagaaaccccctcggaagaagaaaaatagtcagcaagatctaaacaccccagatactcgcccagctggtctggaagaggctgatcagccaccgttgcctggagaacaaggaattaacttggataactcaggccctaaactgccagaattttcaaaccggccaccaggttatccttctcaaccagttgaacagaggccacttcagcagatgcctcctcaactcatgcagcatgtggcacccccaccacagccaccacagcagcagccacagccacaactgcctcagcagcagcagccaccacctcccagtcagccacagtctcagcagcagcagcagcagcagcaacaaatgatgatgatgctcatgatgcagcaggatcccaaatcagttaggcttccagtctctcaaaatgtccatcctccaaggggccccctgaaccccgactcccagagaatgcccatgcaacagagtggcagtgtgcctgtcatggtcagtctgcaaggacctgcctccgtgccaccatcacctgataaacaaagaatgccaatgcctgtgaatactcccttgggaagcaattcaaggaaaatggtctatcaggagagcccgcagaatccttccagctcgccactggcggagatggcctcactccctgaagcaagtggcagtgaagcaccatctgtcccaggaggcccaaacaacatgccttcacatgtagtacttccccagaatcagttaatgatgacagggccaaaacctggaccatcgcccctttcagcaactcaaggtgcaactccccagcaaccccctgtaaattccctgcccagctctcacggccaccacttcccaaatgtggctgcgccaacccagacatctaggcccaaaacaccaaacagagccagccccagaccctattatcctcagacacccaacaaccgccctcccagcacagaaccttcagaaatcagtctgtcaccagaaagactcaatgcctccatagcaggactcttccctccacagattaatattcctttacctcctaggccaaatttaaacaggggctttgatcaacaaggcctaaatccaacaactttgaaggccatcgggcaagcaccttcaaatcttaccatgaatccttccaattttgctaccccacaaactcacaaattagattctgtggtagtgaattctggaaagcagtctaattctggagcaacaaaacgggcaagtccaagcaacagtcgcaggtctagtcctgggtccagtaggaaaaccactccaagccctgggaggcaaaattcaaaagcccctaaacttactctggcctctcagacaaatgcagccctattgcagaatgtggagttgccgagaaatgtattggtcagtcccactcctctggccaatccccctgtacctgggagctttcctaacaacagtgggctgaatcctcagaattctactgtgtctgtggctgcagttgggggtgttgttgaggataacaaggagagcttgaatgtgcctcaggacagtgattgccagaattcccagagtaggaaggaacaggtaaacattgaactaaaagcagtccctgcccaagaagttaaaatggttgtccctgaagatcagtccaaaaaggatgggcagccttcggatcctaacaaacttcccagtgtcgaagagaacaaaaatttggtgtctcctgctatgagggaagcaccaacatcgttaagtcaacttcttgacaactctggagctcccaatgtgacaattaaaccccctgggcttacagatctggaagtaacacctccagtagtttctggggaggacctcaaaaaagcatctgtcattcccacactgcaggatctgtcttcttctaaagaaccttctaattccctaaacttacctcacagtaatgagctgtgttcatcccttgtgcatcccgaattgagtgaggtcagttctaacgttgcaccaagcatccctccagtaatgtcaagacctgttagctcttcctccatttccactcccttgcccccaaatcaaataactgtatttgtcacttccaatcccatcacaacttcagctaacacatcagcagctttgccaactcacttgcagtctgcattgatgtcaacagttgtcacaatgcccaatgcgggtagcaaggttatggtttctgagggacagtcagctgctcagtctaatgcccggcctcagttcattacacctgtctttatcaattcatcctcaataattcaggttatgaaaggatcacagccaagcacaattcctgcagccccactgacaaccaactctggcctgatgcctccctctgttgcagttgttggccctttacacatacctcagaacataaaattttcttctgctcctgtaccgcctaatgccctctccagtagtcctgctccaaacatccagacaggtcgacctttggtccttagctcacgagccacccctgttcagcttccttcccctccttgtacgtcttctccagttgtcccttctcatccccctgtgcagcaagtgaaagaattgaatccagatgaggctagccctcaggtgaacacctcagcagatcagaacactcttccctcttcacagtcaaccacaatggtttctccccttttgaccaatagtccagggtcctctggcaaccggcgaagcccagtctcgtctagtaagggcaaaggaaaagtggacaaaattggccaaattttgttgaccaaggcatgtaagaaagttacaggctctcttgagaaaggggaagaacaatatggtgcagatggagagactgaaggccaagggctagacaccacagctccggggctcatgggaacagagcagttatccacagagctggacagtaaaaccccaacgcccccagcacccactctgctaaaaatgacctctagccctgtgggcccgggcactgcctcagcaggacccagcttacctggcggtgctctccccaccagtgtacgctcgatagtaaccactctggtaccctccgagctcatctccgccgtaccgaccacaaaaagcaatcatggtggcatagcatctgagtcacttgcgggtggcctagtggaggagaaggtgggatcccatccagaacttctacccagcatagccccgtcgcagaatttagtctcaaaggaaacttcaaccacagcactgcaggcctctgttgccagaccagagctggaggtaaatgctgccatagtctctggacaaagcagtgagcccaaagagatagttgaaaagtccaaaatcccaggccgaagaaactcccgaactgaagagccaactgtggcctctgaaagtgtggaaaatggacatcgtaaacgatcttctcgacctgcttcagcctccagctctactaaagacataaccagtgcggtgcaatccaagcgaagaaaatccaagtagtaatgaactagtccgtaacttgaaagtatttcgatttcttggctttatatatcttgtggaaaggacgacgcagtagagttaaagcctacagc

SEQ ID NO: 2207 - DNA, 1229 bp, Homo sapiens
  source 1..1229: mol_type = genomic DNA
accgccaccatggcctctgcgccctggccggagcgggttccgaggctgctcgctccgcgcttaccctcttacccgcccccacccccaacagtgggattacggtccatggagcaggaggagacctacctggagctctacctggaccagtgcgccgctcaggatggccttgccccacccaggtctcccctgttcagcccagttgtaccttatgatatgtacatactgaatgcatccaatccggatactgcatttaattcgaaccctgaagtcaaagaaacatctggtgatttctcatctgtggatcttagcttcctaccagatgaagttacccaggaaaataaagaccagcctgtcattagcaaacacgaaactgaagaaaattctgaaagccaaagtccacaaagtaggttgccatcacccagcgaacaggacgttgggctgggcttaaacagcagcagtttgtcaaattcccattcacagctgcaccctggtgatactgactcagtccagccctctcctgagaaaccaaactccgactccttgtctctggcatccataactcccatgacaccaatgacccctatttcagaatgttgtggaattgtacctcaactacagaatatagtttccactgtaaacctggcctgtaagttggatctgaagaaaatagctttgcatgcaaaaaatgcagaatataacccaaagaggtttgctgctgtcataatgaggatccgagagcccaggacaacagcccttatatttagctctgggaagatggtctgcacgggagccaaaagtgaagagcagtctcgacttgcagcaagaaaatatgctcgtgtggtgcagaagcttgggttccctgccagattcctcgattttaaaattcagaacatggttggaagctgtgatgtgagatttcccatcaggctggaaggtttggtgctaacccatcagcagttcagtagttacgagcctgaactgtttcctggtcttatttatagaatggtaaaaccacgaattgtgttgcttatctttgtatctggaaaagttgtgttgacaggtgccaaagaacgttctgagatctatgaagcatttgaaaacatctatcctattctaaaaggttttaaaaaagcctagtaatgaactagtccgtaacttgaaagtatttcgatttcttggctttatatatcttgtggaaaggacgaccatggttgctaggattaatctgc

SEQ ID NO: 2208 - DNA, 662 bp, Homo sapiens
  source 1..662: mol_type = genomic DNA
accgccaccatggatgcagacagtgatgttgcattggacattctaattacaaatgtagtctgtgtttttagaacaagatgtcatttaaacttaaggaagattgctttggaaggagcaaatgtaatttataaacgtgatgttggaaaagtattaatgaagcttagaaaacctagaattacagctacaatttggtcctcaggaaaaattatttgcactggagcaacaagtgaagaagaagctaaatttggtgccagacgcttagcccgtagtctgcagaaactaggttttcaggtaatatttacagattttaaggttgttaacgttctggcagtgtgtaacatgccatttgaaatccgtttgccagaattcacaaagaacaatagacctcatgccagttacgaacctgaacttcatcctgctgtgtgctatcggataaaatctctaagagctacattacagattttttcaacaggaagtatcacagtaacagggcccaatgtaaaggctgttgctactgctgtggaacagatttacccatttgtgtttgaaagcaggaaagaaattttatagtaatgaactagtccgtaacttgaaagtatttcgatttcttggctttatatatcttgtggaaaggacgaatacttgtgtgaggttagcagctc

SEQ ID NO: 2209 - DNA, 440 bp, Homo sapiens
  source 1..440: mol_type = genomic DNA
accgccaccatgctcattttcctgggctgttacagaagaagactggaagagcgcgcagggaccatgtcggcggagaccgcgagcggccccacagaggaccaggtggaaatcctggagtacaacttcaacaaggtcgacaagcacccggattccaccacgctgtgcctcatcgcggccgaggcaggcctttccgaggaggagacccagggtagtgatttgatctccaggagcaaaatatggcacccagaaagtagcccccaaagagaaggctacccccatgatagtctgccgtgcttggctttcgattacttttctctactgccgccccagtgtaaagaaatggtttagtaatgaactagtccgtaacttgaaagtatttcgatttcttggctttatatatcttgtggaaaggacgagccttgcttctagtattacagacg

SEQ ID NO: 2210 - DNA, 377 bp, Homo sapiens
  source 1..377: mol_type = genomic DNA
accgccaccatgctcattttcctgggctgttacagaagaagactggaagagcgcgcagggaccatgtcggcggagaccgcgagcggccccacagaggaccaggtggaaatcctggagtacaacttcaacaaggtcgacaagcacccggattccaccacgctgtgcctcatcgcggccgaggcaggcctttccgaggaggagacccagaaatggtttaagcagcgcctggcaaagtggcggcgctcagaaggcctgccctcagagtgcagatccgtcacagactagtaatgaactagtccgtaacttgaaagtatttcgatttcttggctttatatatcttgtggaaaggacgacgacttagtctgtctcgattcgcg

SEQ ID NO: 2211 - DNA, 323 bp, Homo sapiens
  source 1..323: mol_type = genomic DNA
accgccaccatgtcggcggagaccgcgagcggccccacagaggaccaggtggaaatcctggagtacaacttcaacaaggtcgacaagcacccggattccaccacgctgtgcctcatcgcggccgaggcaggcctttccgaggaggagacccagaaatggtttaagcagcgcctggcaaagtggcggcgctcagaaggcctgccctcagagtgcagatccgtcacagactagtaatgaactagtccgtaacttgaaagtatttcgatttcttggctttatatatcttgtggaaaggacgagatgtgtctggaggctgacgggaa

SEQ ID NO: 2212 - DNA, 791 bp, Homo sapiens
  source 1..791: mol_type = genomic DNA
accgccaccatggacgcagtggcctttgaggatgtggctgtgaacttcacccaggaggaatgggctttgctgggtccatcacagaagaatttatacagatatgtgatgcaagaaaccatcaggaacctggactgtataagaatgatatgggaagaacagaatactgaagatcagtacaaaaatcctaggagaaatctaagatgtcatatggtagagagattcagtgaaagtaaagacagtagtcagtgtggagaaacatttagcctcattcgagatagtattgtgaacaacagcatttgtcctggagaagatccatgtcaaagcgctgagtgtgaagaagtcataatgggtcatttatcccttaatagccacatcagagttgattctggacacaaaccacatgagtatcaggaatatggagagaagccacatacacataaacaacgtgggaaagccttcagttaccatcactcctttcagtcgcgtggaaggcctcacactggaaagaaacgctatgagtgtaaggaatgtggaaaaaccttcagttctcgtagaaaccttcgaagacacatggtagtgcaaggtggaaatagaccttataaatttcctatcgaagacatgagagaatgcacactggggagaaaccgtatgaatgtaagcagtgttctaaagccttgcctgattccagttcctatatagtaatgaactagtccgtaacttgaaagtatttcgatttcttggctttatatatcttgtggaaaggacgagtatatgggttgttgccaataata

SEQ ID NO: 2213 - DNA, 1811 bp, Homo sapiens
  source 1..1811: mol_type = genomic DNA
accgccaccatgtcctctgctcctagaggtccaccttctgtggccccgttacctgcaggtattgggagatccacagctaagacgccaggactccctggaagcctagaaatgggaccactgacatttagggatgtggccatagaattctctctggaggagtggcaatgcctggacacttcacagcagaatttgtataggaatgtgatgttagataactacagaaacctggtcttcctgggtattgctgtctctaagccagacctgatcacttgtctggagcaaggaaaagagccctgcaatatgaagagacatgcgatggtagccaaacccccagttgtgtgttctcattttgcccaagacctttggccaaagcagggcttaaaagattcttttcaaaaagtgatactgagaagatatggaaaatatggacatgagaatttacaattaagaaaaggctgtaaaagtgcggatgagcataaggtgcacaaaagaggttataatggacttaaccaatgtttgacaactacccagagcaaaatatttcaatgtgataaatatgttaaagtccttcataaattctcaaattcaaatatacataagaaaagacaaactggaaagaaacctttcaaatgtaaagaatgtggcaaatcatgttgcatactttcacaactaactcagcataagaaaactgctactagagtgaatttctacaaatgtaagacatgtggaaaagcctttaaccagttctcaaatcttactaaacataagataattcatcctgaagtgaatccctacaaatgtgaagaatgtggcaaagcctttaaccagtccttaactcttactaaacataaaaaaattcatactgaagagaaaccttacaaatgtgaagattgtggcaaagtctttagtgtattttcagtccttactaaacataagataattcatacaggaacaaaaccctacaattgtgaagaatgtggcaaaggctttagtatattctcaacccttactaaacataagataattcatactggagagaaaccctacaaatgcaatgaatgtggtaaagcctttaactggtcctcaactcttactaaacataagagaattcatactggagagaaaccctacaaatgtgaagaatgtggcaaagcttttaaccagtcctcaacccttactagacataagatagttcatactggagagaaaccctacaaatgtgaagaatgtggtaaagcctttaaacggtccacaactcttactaaacataagagaatttatactaaagagaaaccatacaaatgtgaagaatgtggaaaagcctttagtgtattctcaacccttactaaacataagataattcatactggagcaaaaccttacaaatgtgaagaatgtggcagtgcctttagggcattctcaacccttactgaacataagagagttcatactggagagaaaccttacaaatgcaatgaatgtggtaaagcctttaactggtcctcaactcttactaaacataagagaattcatactggagagaagccctacaaatgtgaagaatgtggcaaagcttttaaccggtcctcaaaccttactcgacataagaaaattcatactggagagaaaccatacaaacctaaaagatgtgacagtgcttttgacaacaccccaaacttttctagacataaaagaaatcatatgggtgagaaatcctagtaatgaactagtccgtaacttgaaagtatttcgatttcttggctttatatatcttgtggaaaggacgacgcggcaataatacgaacatctct

SEQ ID NO: 2214 - DNA, 1094 bp, Homo sapiens
  source 1..1094: mol_type = genomic DNA
accgccaccatgaccgatccgtcgctggggctgacagtccccatggcgccgcctctggccccgctccctccccgggacccaaacggggcgggatccgagtggagaaagcccggggccgtgagcttcgccgacgtggccgtgtacttctcccgggaggagtggggctgcctgcggcccgcgcagagggccctgtaccgggacgtgatgcgggagacctacggccacctgggcgcgctcggagtcggaggcagcaagccggcgctcatctcctgggtggaggagaaggccgaactgtgggatccggctgcccaggatccggaggtggcgaagtgtccgacagaagcggacccagattccagaaacaaggaagaggaaagacaaagggaagggacgggagccctggagaagcccgaccctgtggccgccgggtctcctgggctgaaggctccccaagccccctttgccgggttggagcagctgtccaaggcccggcgccggagtcgcccccgcttttttgcccacccccctgtcccccgagctgaccagcgtcacggctgctacgtgtgcgggaagagcttcgcctggcgctccacactggtggagcacatttacagccacaggggcgagaagcccttccactgcgcagactgcggcaagggcttcggccacgcttcctccctgagcaaacaccgggccatccatcgtggggagcggccccaccgctgtcccgagtgtggtcgggccttcatgcgccgcacggcgctgacttctcacctgcgcgttcacactggcgagaagccctaccgctgcccgcagtgtggccgctgcttcggcctgaagaccggcatggccaagcaccaatgggtccatcggcccgggggcgaggggcgtaggggccggcgccctggggggctgtctgtgaccctgactcctgtccgcggggacctggacccgcctgtgggcttccagctgtatccagagatattccaggaatgtgggtagtaatgaactagtccgtaacttgaaagtatttcgatttcttggctttatatatcttgtggaaaggacgatgcagatcagtatacattgtaatc

SEQ ID NO: 2215 - DNA, 674 bp, Homo sapiens
  source 1..674: mol_type = genomic DNA
accgccaccatgaccgatccgtcgctggggctgacagtccccatggcgccgcctctggccccgctccctccccgggacccaaacggggcgggatccgagtggagaaagcccggggccgtgagcttcgccgacgtggccgtgtacttctcccgggaggagtggggctgcctgcggcccgcgcagagggccctgtaccgggacgtgatgcgggagacctacggccacctgggcgcgctcggtgagagccccacctgcttgcctgggccctgcgcctccacaggccctgccgcgcctctgggagctgcgtgtggagttgggggccccggggccgggcaggcggcctcctcgcagcgtggggtttgcgttcttctcccccaggagtcggaggcagcaagccggcgctcatctcctgggtggaggagaaggccgaactgtgggatccggctgcccaggatccggaggtggcgaagtgtccgacagaagcggacccagattccagaaacaaggaagaggaaagacaaagggaagggacgggagccctggagaagcccgaccctgtggccgccgggtctcctgggctagtaatgaactagtccgtaacttgaaagtatttcgatttcttggctttatatatcttgtggaaaggacgagatggaatgagctcgtaagaagga

SEQ ID NO: 2216 - DNA, 2036 bp, Homo sapiens
  source 1..2036: mol_type = genomic DNA
accgccaccatggccgaggcggtcgcggctccgatttctccgtggacgatggcagccacgattcaggccatggagaggaagattgaatcgcaggctgctcgcctgctttccctagaaggtcgaaccgggatggccgagaagaagctggctgattgcgagaagacagccgtggagttcgggaaccagctggagggcaagtgggccgtgctggggaccctgctgcaggagtacgggctgctgcagaggcggctggagaacgtggagaacctgctgcgcaacaggaacttctggatcctgcggctgcccccgggcagcaagggggagtcccctaaggagtggggcaagctggaggactggcagaaggagctctacaagcacgtgatgaggggcaactacgagacgctggtctccctggactacgccatctccaagcccgaggtcctctcccagattgaacaagggaaggagccctgcaactggcgccgccctggccccaagattccagatgttcctgtggaccccagtccaggctcggggcccccagttcccgccccagacctcttgatgcagatcaagcaggagggtgagctccagctccaggagcagcaggccctgggcgtggaggcgtgggcagccgggcagccagatattggggaggagccctggggcctcagccagctggattccggagcaggagacatctccacggatgccacctctggtgtccattccaacttttccaccaccatcccgcccacctcctggcaaacggatctccctccccaccatccctcttcagcatgctcggacgggaccctgaagctcaacacagcagcctccacggaagatgtaaaaattgtaataaaaacagaagtccaggaagaggaggtggtggccacacccgtacatcctactgacctagaggctcacgggaccctgtttggaccaggccaagccacacggttcttccctagtcctgcccaggaaggagcctgggaaagccagggcagctccttccccagccaggaccctgtgctggggctgcgagagcccgcccggcctgagagggacatgggtgagctcagtcctgctgtggcccaggaggagacccctcctggggactggctcttcggaggggtccggtggggctggaatttccggtgtaaaccgccagtgggcctgaacccgaggacggggcccgaggggcttccttactcctccccggacaacggagaggccatcttggaccccagccaggccccaaggccattcaacgaaccctgtaaataccctggccggaccaaaggctttggccacaagccagggctgaagaagcaccccgcggcgccccccgggggccggcccttcacctgcgccacgtgtgggaagagcttccagctgcaagtcagcctgagcgcgcaccagcgcagctgtggggcgcccgacgggtcgggcccgggcacaggcggtggcggcagcggcagtggcggcggcggtggcggcagcggtgggggcagcgcacgggatggcagcgcccttcggtgtggggagtgcggccgttgcttcacgcgccccgcgcacctcatccgccatcgcatgctgcacaccggcgagcggcccttcccctgcaccgagtgtgagaagcgcttcaccgaacgctccaagctcatcgaccactaccgaacgcacacgggcgtgcggcccttcacctgcaccgtctgcggcaaaagcttcatccgcaaggaccacctccgcaagcaccagcgcaaccatgcagcgggcgccaagaccccggcccgaggccagccactcccgacgccgcccgcacctcctgatcccttcaagagccccgcctccaaaggacctttggcctccacagaccttgtgaccgactggacttgtggcctcagcgtcctgggacccaccgatggcggggacatgtagtaatgaactagtccgtaacttgaaagtatttcgatttcttggctttatatatcttgtggaaaggacgatcgcgtagacgacgttcttgacta

SEQ ID NO: 2217 - DNA, 2039 bp, Homo sapiens
  source 1..2039: mol_type = genomic DNA
accgccaccatggccgaggcggtcgcggctccgatttctccgtggacgatggcagccacgattcaggccatggagaggaagattgaatcgcaggctgctcgcctgctttccctagaaggtcgaaccgggatggccgagaagaagctggctgattgcgagaagacagccgtggagttcgggaaccagctggagggcaagtgggccgtgctggggaccctgctgcaggagtacgggctgctgcagaggcggctggagaacgtggagaacctgctgcgcaacaggaacttctggatcctgcggctgcccccgggcagcaagggggagtcccctaaggagtggggcaagctggaggactggcagaaggagctctacaagcacgtgatgaggggcaactacgagacgctggtctccctggactacgccatctccaagcccgaggtcctctcccagattgaacaagggaaggagccctgcaactggcgccgccctggccccaagattccagatgttcctgtggaccccagtccaggctcggggcccccagttcccgccccagacctcttgatgcagatcaagcaggagggtgagctccagctccaggagcagcaggccctgggcgtggaggcgtgggcagccgggcagccagatattggggaggagccctggggcctcagccagctggattccggagcaggagacatctccacggatgccacctctggtgtccattccaacttttccaccaccatcccgcccacctcctggcaaacggatctccctccccaccatccctcttcagcatgctcggacgggaccctgaagctcaacacagcagcctccacggaagcagatgtaaaaattgtaataaaaacagaagtccaggaagaggaggtggtggccacacccgtacatcctactgacctagaggctcacgggaccctgtttggaccaggccaagccacacggttcttccctagtcctgcccaggaaggagcctgggaaagccagggcagctccttccccagccaggaccctgtgctggggctgcgagagcccgcccggcctgagagggacatgggtgagctcagtcctgctgtggcccaggaggagacccctcctggggactggctcttcggaggggtccggtggggctggaatttccggtgtaaaccgccagtgggcctgaacccgaggacggggcccgaggggcttccttactcctccccggacaacggagaggccatcttggaccccagccaggccccaaggccattcaacgaaccctgtaaataccctggccggaccaaaggctttggccacaagccagggctgaagaagcaccccgcggcgccccccgggggccggcccttcacctgcgccacgtgtgggaagagcttccagctgcaagtcagcctgagcgcgcaccagcgcagctgtggggcgcccgacgggtcgggcccgggcacaggcggtggcggcagcggcagtggcggcggcggtggcggcagcggtgggggcagcgcacgggatggcagcgcccttcggtgtggggagtgcggccgttgcttcacgcgccccgcgcacctcatccgccatcgcatgctgcacaccggcgagcggcccttcccctgcaccgagtgtgagaagcgcttcaccgaacgctccaagctcatcgaccactaccgaacgcacacgggcgtgcggcccttcacctgcaccgtctgcggcaaaagcttcatccgcaaggaccacctccgcaagcaccagcgcaaccatgcagcgggcgccaagaccccggcccgaggccagccactcccgacgccgcccgcacctcctgatcccttcaagagccccgcctccaaaggacctttggcctccacagaccttgtgaccgactggacttgtggcctcagcgtcctgggacccaccgatggcggggacatgtagtaatgaactagtccgtaacttgaaagtatttcgatttcttggctttatatatcttgtggaaaggacgaagtgactaacgctacgtcgagcct

SEQ ID NO: 2218 - DNA, 683 bp, Homo sapiens
  source 1..683: mol_type = genomic DNA
accgccaccatggctcaggcaagtctcctggcttgtgaaggcctagcaggtgtgagtttggttcccactgcagccagcaagaagatgatgctgagccagattgccagcaagcaggccgagaatggcgagcgggcaggtagccctgatgtgctgaggtgctcgagtcagggtcaccgaaaagacagtgataagtcccggagccgcaaagatgatgacagcttgtctgaggcctctcattcaaaaaagactgttaaaaaggtggtggtagtggaacaaaatggttcttttcaagtaaagattcccaaaaattttgtttgtgaacactgctttggagcctttcggagcagttaccacctaaagaggcacatccttattcacactggtgagaagccatttgaatgcgatatatgtgatatgcgtttcatccagaagtaccacctggaacgccacaagcgtgtgcacagtggtgaaaagccttaccagtgtgaacggtgtcatcagtgtttttctcggacagatcgattactcagacacaaacggatgtgccaagggtgccagtccaagacttccgacgggcagttttctctatagtaatgaactagtccgtaacttgaaagtatttcgatttcttggctttatatatcttgtggaaaggacgactgaccatttggttctctcacgcc

SEQ ID NO: 2219 - DNA, 2438 bp, Homo sapiens
  source 1..2438: mol_type = genomic DNA
accgccaccatgaacctgaccgaggattgtatggtctttgaggatgtggccatatatttctcccaagaggaatgggggatccttaatgatgctcagagacacctgcacagcaatgtgatgttggagaactttgcgcttttgtcatcagtaggttgttggcatggagccaaggatgaggaggtaccttccaagcagtgtgtttctgtaagagtgttacaggtcacaattccaaagccagctttgtccaccctgaaggcccagccctgcaagatgtgtagctcaattctgaaggacattctgcacctggctgagcacgatggaacacaccctgagcaagggctgtacacatgtgcagcagagcatgacctgcaccaaaaggagcagattagagagaagctcaccagaagtgatgagtggaggccttcatttgtgaaccacagtgctcacgtgggagagaggaacttcacatgcacgcagggtggcaaggattttactgccagctcagaccttctccagcaacaggtcttaaacagtgggtggaagctgtacagggatacccaggatggggaagcctttcaaggtgaacagaatgatttcaactccagccaaggtgggaaagacttttgccaccaacatgggctgtttgagcaccaaaaaacccataatggggagaggccttatgagttcagtgaatgtggggaattgtttaggtacaactccaaccttattaaatatcagcaaaatcatgctggagaaaggccttatgagggcactgaatatggaaagacctttattagaaagtccaacctagttcagcaccagaaaattcacagtgaaggctttctttcaaaaaggtctgaccccattgaacatcaggagattctcagtagaccaacaccttatgaatgcacccagtgtgggaaggcctttcttacacaggctcatctggttggtcaccagaaaacccatactggagaacagccctatgaatgcaacaagtgtgggaagttttttatgtataactccaaactcatcagacatcagaaagttcacactggggagaggcgttacgagtgcagtgaatgtgggaaattgtttatggacagcttcacactcggtagacatcagagagttcatactggagaaaggccttttgaatgcagcatatgtggaaaattctttagtcaccgctccacactcaatatgcaccagagagttcatgctggcaaaaggctttataagtgtagcgaatgtgggaaagcctttagcctcaaacataatgttgttcagcatctgaaaattcatactggagaacggccttatgagtgcactgaatgtgagaaggcctttgttagaaagtcccacctagttcagcaccagaaaatccacactgatgcattttcaaaaaggtctgacctcattcaacacaagaggattgacattaggccaaggccttatacatgcagtgaatgtgggaaggccttccttacacaggctcatctggttggtcaccagaaaatccatactggagaacggccttatgaatgcactcaatgtgcgaaggcctttgttagaaagtcccacctagttcagcatgagaaaatccacactgatgcattttcaaaaaggtctgacctcattcaacacaagaggattgacctcaggccaaggccttatgtgtgtagtgaatgtgggaaggccttccttacacaggctcatctagatggtcaccagaaaatccagactggagaacggcgttatgaatgcaatgaatgtgggaaattctttttggacagctacaaacttgttattcatcagagaattcacactggagaaaagccttataaatgcagcaaatgtgggaaattctttagatatcgctgtacactgagtagacatcagaaagttcacactggagaaagaccttatgagtgtagtgaatgtgggaaattttttagagatagctacaaactcattattcatcagagagttcatactggagaaaagccttatgaatgcagcaactgtgggaagtttcttagataccgctctacattcattaaacatcataaagtttgcactggggagaagcctcatgagtgcagtaaatgtagggaattgtttaggactaaatcgagccttattatacatcagcagtctcacactggagaaagtccttttaagttaagggaatgtgggaaagacttcaacaaatgtaatactggtcagcgccaaaaaactcacactggagaaaggtcttatgagtgtggtgaatccagcaaagtgtttaaatacaactccagcctcattaaacatcagataattcatactggaaaaaggccttagtaatgaactagtccgtaacttgaaagtatttcgatttcttggctttatatatcttgtggaaaggacgaaagtttaggatacactgcacagga

SEQ ID NO: 2220 - DNA, 431 bp, Homo sapiens
  source 1..431: mol_type = genomic DNA
accgccaccatggcgcagtctattaacatcacggagctgaatctgccgcagctagaaatgctcaagaaccagctggaccagatgtatgtccctgggaagctgcatgatgtggaacacgtgctcatcgatgtgggaactgggtactatgtagagaagacagctgaggatgccaaggacttcttcaagaggaagatagattttctaaccaagcagatggagaaaatccaaccagctcttcaggagaagcacgccatgaaacaggccgtcatggaaatgatgagtcagaagattcagcagctcacagccctgggggcagctcaggctactgctaaggcctagtaatgaactagtccgtaacttgaaagtatttcgatttcttggctttatatatcttgtggaaaggacgatcctttctcctaccgataaattta

SEQ ID NO: 2221 - DNA, 917 bp, Homo sapiens
  source 1..917: mol_type = genomic DNA
accgccaccatgactgaacctcaggtggggtgtgtagcctgtccaagggtacacaaagagccggcccaagttggaaccccctggccggctaaacccaggagtcacccaagaaaacgtgaccccactgcccttctccccaggtccctctggcctgcatgccaggagtcggtcaccgccctgtgcttcctccaagagacagtggagaggctgggtcagtcccctgcccaggacaccccggtcctggggccttgctgggacccgatggctctggggactcagggccgcctgctgctggacagggattccaaggacacacagaccaggatcagccaaaagggccgccgtctgcagcccccggggactccctcggccccaccccagagaaggccccggaaacagctgaacccctgccggggcaccgagagagtggaccctgggttcgagggggtgactctgaagtttcagataaagccggactccagcctgcagatcatccccacgtacagcctgccctgcagtagccgttctcaggaatcccctgcagatgctgttgggggccctgcagcccacccaggaggcaccgaggcccactcagcaggcagcgaggccctggagccccggcgctgtgcttcctgtcggacccagaggaccccgctctggagagacgctgaagatgggacccctctctgcaacgcctgtgggatcaggtacaagaaatacggcactcgctgctccagctgctggctggtgcccaggaaaaatgtccagcccaagaggctatgtggcagatgtggagtgtccctggaccccattcaggaaggttagtaatgaactagtccgtaacttgaaagtatttcgatttcttggctttatatatcttgtggaaaggacgacgtttaggtaccgctattgagctt

SEQ ID NO: 2222 - DNA, 1403 bp, Homo sapiens
  source 1..1403: mol_type = genomic DNA
accgccaccatgcagcgaatgatccaacaatttgctgctgaatatacctcaaaaaatagctctactcaggaccccagccagcccaatagcacaaagaaccaaagcctgccgaaagcatctccagtcaccacctctcccacggctgcaactactcagaaccctgtgctcagcaaacttctcatggctgaccaagactcacctctggaccttactgtcagaaagtctcagtcagaacctagcgaacaagacggtgtacttgatctgtccactaagaaaagtccatgtgctggcagcacttccctgagccactctccaggctgctccagtactcaagggaacgggcgacctgggagacccagccagtaccgcccagacggacttcggagtggtgatggggtacctccaagaagcttacaggatggaaccagggaaggttttggacactccacatcactcaaagttccactggctcgatccctgcagattagtgaagaactactgagcagaaaccaattgtccacagctgccagccttgggccatctggattacagaatcatggacaacacttaatattatccagggaagcctcttgggcaaaaccacattacgagttcaacctcagccgtatgaagttcaggggaaatggtgcactcagcaacatcagtgaccttccttttcttgcagaaaactctgcctttccaaaaatggcacttcaagcaaaacaagatggaaaaaaggatgtgagccattcatctcctgtagatttaaagataccacaagttcgaggaatggatctttcttgggagtctcgcactggtgatcagtacagctatagctctttggtaatgggttcacaaacggagagcgcgcttagtaaaaaattaagggctattcttccaaaacaaagtagaaaaagcatgttagatgctggacccgattcttggggctcagatgctgagcagtctacctctggacagccatatcccacatcggatcaagaaggagaccctggctccaagcagcctcggaagaaaagagggcgttacagacagtacaacagtgagatactggaggaagcaatctcagtggttatgagtggaaaaatgagtgtttccaaagctcagagtatttatgggattccccacagtacactggagtacaaagtaaaggagaggctgggcactttgaaaaaccctccaaagaaaaagatgaaattaatgaggtcggaggggccagatgtttctgtaaagattgaattagatccccagggagaggcagcacaaagtgcaaatgaatcaaaaaacgagtagtaatgaactagtccgtaacttgaaagtatttcgatttcttggctttatatatcttgtggaaaggacgagagtgcaccgcactattaccatgc

SEQ ID NO: 2223 - DNA, 905 bp, Homo sapiens
  source 1..905: mol_type = genomic DNA
accgccaccatggacgatcagggttgccctcggtgtaagaccaccaaatatcggaacccctccttgaagctgatggtgaatgtgtgcggacacactctctgtgaaagttgtgtagatttactgtttgtgagaggagctggaaactgccctgagtgtggtactccactcagaaagagcaacttcagggtacaactctttgaagatcccactgttgacaaggaggttgagatcaggaaaaaagtgctaaagatatacaataaaagggaagaagattttcctagtctaagagaatacaatgatttcttggaagaagtggaagaaattgttttcaacttgaccaacaatgtggatttggacaacaccaaaaagaaaatggagatataccaaaaggaaaacaaagatgttattcagaaaaataaattaaagctgactcgagaacaggaagaactggaagaagctttagaagtggaacgacaggaaaatgaacaaagaagattatttatacaaaaagaagaacaactgcagcagattctaaaaaggaagaataagcaggcttttttagatgagctgggtcaacatatttcactggcacctattcacaagcttgaagaagctctgtatgaataccagccactgcagatagagacatatggaccacatgttcctgagcttgagatgctaggaagacttgggtatttaaaccatgtcagagctgcctcaccacaggaccttgctggaggctatacttcttctcttgcttgtcacagagcactacaggatgcattcagtgggcttttctggcagcccagttagtaatgaactagtccgtaacttgaaagtatttcgatttcttggctttatatatcttgtggaaaggacgacagagggtgttggatttatatccg

SEQ ID NO: 2224 - DNA, 4037 bp, Homo sapiens
  source 1..4037: mol_type = genomic DNA
accgccaccatgtctcgccgcaagcaagcgaaaccgagatccctcaaagaccccaactgtaaacttgaagacaagactgaagatggagaggcactagattgtaagaagaggccggaagacggggaggagttggaagacgaagctgtgcacagctgtgacagctgcctccaggtgtttgaatcgctgagcgatatcacagaacacaagattaatcaatgtcaactgacagatggagtggatgttgaagatgatccgacttgctcttggccagcttcctcaccttctagcaaggatcagacttcccctagccatggagaaggttgcgattttggagaggaagaaggtggccctgggcttccatacccgtgtcaattctgtgacaagtcgtttagccgcctcagctacctaaagcaccatgagcagagtcacagtgacaaactgcctttcaaatgcacctactgcagtaggctgttcaaacacaagcgcagccgagatcgccacataaaactccacaccggggacaagaagtaccactgcagtgaatgtgatgctgcgttttccagaagtgatcacttgaagatccacttaaagactcacacgtccaacaagccatataaatgtgccatttgtcgccgtgggtttctgtcctctagttccttacacggacacatgcaggttcatgagaggaacaaggacggctctcagtccggttccaggatggaggactggaagatgaaggacactcagaagtgcagtcagtgtgaggaaggctttgacttcccggaagacctccaaaaacacattgcagagtgccaccccgaatgctccccaaatgaggaccgagcggccctccagtgtgtctactgccacgagctcttcgtagaggagacctccctcatgaaccacatggagcaggtgcatagcggggagaagaagaactcatgcagcatttgttctgagagtttccacacagttgaggaactgtacagccacatggacagtcaccagcaaccggagtcatgcaatcacagcaacagcccttccctggtcacggtgggctatacctccgtgtccagtacgactccagattccaacctctcagtggacagctcaaccatggtggaagctgccccgccaatcccaaagagtcgagggaggaagagggccgctcaacaaacccctgacatgactggtccctcgagtaaacaagcaaaagttacctacagctgtatttactgcaacaaacaattattttcaagtcttgcagttctgcagattcacctgaaaactatgcacttagataagccagaacaggcccatatttgtcagtattgcttggaggtcctgccctcactctataacctaaatgaacatcttaagcaagtgcatgaagctcaggacccaggtctgattgtttctgccatgcctgccattgtctaccagtgtaacttctgttccgaagttgtcaacgacctcaacactcttcaggaacacatccgatgttctcatggatttgcaaaccctgcagctaaagatagtaatgcattcttttgtccccattgctatatggggtttctcactgactcttccctggaagagcatattagacaggttcattgtgacctcagtggctcccgatttgggtctccagtgcttgggactcccaaagaaccagtagtagaagtctattcttgttcctattgtacaaattcgccaatattcaacagcgttcttaaactgaacaagcatatcaaagagaatcataaaaacattcccttggccctgaattatatccacaatgggaagaaatccagggccttaagccccctatctcctgtggccatagagcagacatctcttaagatgatgcaggcagtaggaggtgcacctgcacgtcccactggagaatatatctgtaatcaatgtggtgctaagtacacatccctagacagctttcagactcacctaaaaactcatctcgacactgtgcttccaaaattgacctgtcctcagtgcaacaaggaattccccaaccaagaatccttgctgaagcatgttaccattcactttatgatcacttcaacgtattacatctgtgagagttgtgacaagcaattcacatcagtggatgaccttcagaaacacctgctggacatgcacacctttgtcttctttcgctgcaccctctgccaggaagtttttgactcaaaagtctccattcagctccacttggctgtgaagcacagtaacgaaaagaaagtctataggtgcacatcttgcaactgggacttccgcaacgaaactgacttgcagctccatgtgaaacacaaccacctggaaaaccaagggaaagtgcataagtgcattttctgcggtgagtcctttggcaccgaggtggagctgcaatgccacatcaccactcacagtaagaagtacaactgcaagttctgtagcaaagccttccatgcgatcattttgttagaaaaacacttgcgagaaaaacactgtgtattcgaaaccaagacacccaactgtggaacaaatggagcttccgagcaagtgcagaaagaggaagtggagctgcagactttgctgaccaacagccaggagtcccacaacagtcacgatgggagcgaagaagacgttgacacctctgagcctatgtacggctgcgacatttgtggggcagcctacactatggaaactttgctgcagaatcaccagctccgagaccacaacatcagacctggagaaagtgccatcgtgaaaaagaaagctgagctcattaaagggaattacaagtgcaacgtgtgctctcgaaccttcttctccgaaaatggcctccgggaacatatgcagacccacctaggccctgtcaaacactacatgtgccctatttgcggagagcggtttccctcccttttaactcttactgaacacaaagtcacgcatagtaagagtcttgatactggaaactgccggatttgcaagatgcctctccagagtgaagaggagtttttagagcattgccaaatgcaccctgacttgaggaattccctgacaggctttcgctgcgtggtgtgcatgcagacagtgacctccaccttggaactcaaaatccatgggacgttccacatgcaaaagacagggaatgggtctgcagttcagaccacagggcggggccagcacgtccaaaaactgtataagtgcgcatcttgcctcaaagaattccgttccaagcaagatctggtgaaacttgatatcaatggcctgccatatggtctgtgtgccggctgcgtgaatctcagtaagagcgccagcccaggcattaacgtccctcccggcacgaatagaccaggcttgggccagaatgagaatctgagtgccattgaggggaaaggcaaggtggggggactgaagacacgctgctctagctgcaacgttaagtttgagtctgaaagtgaactccagaaccacatccaaaccatccaccgagagctcgtgccagacagcaacagcacacagttgaaaacgccccaagtatcaccaatgcccagaatcagtccctcccagtcggatgagaagaagacctatcaatgcatcaagtgtcagatggttttctacaatgaatgggatattcaggttcatgttgcaaatcacatgattgatgaaggactgaaccatgaatgcaaactctgcagccagacctttgactctcctgccaaactccagtgccacctgatagagcacagcttcgaagggatgggaggcaccttcaagtgtccagtctgctttacagtatttgttcaagcaaacaagttgcagcagcatattttctctgcccatggacaagaagacaagatctatgactgtacacaatgtccacagaagtttttcttccaaacagagctgcagaatcatacaatgacccaacacagcagttagtaatgaactagtccgtaacttgaaagtatttcgatttcttggctttatatatcttgtggaaaggacgaagaggagtctccgaacgaagccaa

SEQ ID NO: 2225 - DNA, 3377 bp, Homo sapiens
  source 1..3377: mol_type = genomic DNA
accgccaccatgcaggttcatgagaggaacaaggacggctctcagtccggttccaggatggaggactggaagatgaaggacactcagaagtgcagtcagtgtgaggaaggctttgacttcccggaagacctccaaaaacacattgcagagtgccaccccgaatgctccccaaatgaggaccgagcggccctccagtgtgtctactgccacgagctcttcgtagaggagacctccctcatgaaccacatggagcaggtgcatagcggggagaagaagaactcatgcagcatttgttctgagagtttccacacagttgaggaactgtacagccacatggacagtcaccagcaaccggagtcatgcaatcacagcaacagcccttccctggtcacggtgggctatacctccgtgtccagtacgactccagattccaacctctcagtggacagctcaaccatggtggaagctgccccgccaatcccaaagagtcgagggaggaagagggccgctcaacaaacccctgacatgactggtccctcgagtaaacaagcaaaagttacctacagctgtatttactgcaacaaacaattattttcaagtcttgcagttctgcagattcacctgaaaactatgcacttagataagccagaacaggcccatatttgtcagtattgcttggaggtcctgccctcactctataacctaaatgaacatcttaagcaagtgcatgaagctcaggacccaggtctgattgtttctgccatgcctgccattgtctaccagtgtaacttctgttccgaagttgtcaacgacctcaacactcttcaggaacacatccgatgttctcatggatttgcaaaccctgcagctaaagatagtaatgcattcttttgtccccattgctatatggggtttctcactgactcttccctggaagagcatattagacaggttcattgtgacctcagtggctcccgatttgggtctccagtgcttgggactcccaaagaaccagtagtagaagtctattcttgttcctattgtacaaattcgccaatattcaacagcgttcttaaactgaacaagcatatcaaagagaatcataaaaacattcccttggccctgaattatatccacaatgggaagaaatccagggccttaagccccctatctcctgtggccatagagcagacatctcttaagatgatgcaggcagtaggaggtgcacctgcacgtcccactggagaatatatctgtaatcaatgtggtgctaagtacacatccctagacagctttcagactcacctaaaaactcatctcgacactgtgcttccaaaattgacctgtcctcagtgcaacaaggaattccccaaccaagaatccttgctgaagcatgttaccattcactttatgatcacttcaacgtattacatctgtgagagttgtgacaagcaattcacatcagtggatgaccttcagaaacacctgctggacatgcacacctttgtcttctttcgctgcaccctctgccaggaagtttttgactcaaaagtctccattcagctccacttggctgtgaagcacagtaacgaaaagaaagtctataggtgcacatcttgcaactgggacttccgcaacgaaactgacttgcagctccatgtgaaacacaaccacctggaaaaccaagggaaagtgcataagtgcattttctgcggtgagtcctttggcaccgaggtggagctgcaatgccacatcaccactcacagtaagaagtacaactgcaagttctgtagcaaagccttccatgcgatcattttgttagaaaaacacttgcgagaaaaacactgtgtattcgaaaccaagacacccaactgtggaacaaatggagcttccgagcaagtgcagaaagaggaagtggagctgcagactttgctgaccaacagccaggagtcccacaacagtcacgatgggagcgaagaagacgttgacacctctgagcctatgtacggctgcgacatttgtggggcagcctacactatggaaactttgctgcagaatcaccagctccgagaccacaacatcagacctggagaaagtgccatcgtgaaaaagaaagctgagctcattaaagggaattacaagtgcaacgtgtgctctcgaaccttcttctccgaaaatggcctccgggaacatatgcagacccacctaggccctgtcaaacactacatgtgccctatttgcggagagcggtttccctcccttttaactcttactgaacacaaagtcacgcatagtaagagtcttgatactggaaactgccggatttgcaagatgcctctccagagtgaagaggagtttttagagcattgccaaatgcaccctgacttgaggaattccctgacaggctttcgctgcgtggtgtgcatgcagacagtgacctccaccttggaactcaaaatccatgggacgttccacatgcaaaagacagggaatgggtctgcagttcagaccacagggcggggccagcacgtccaaaaactgtataagtgcgcatcttgcctcaaagaattccgttccaagcaagatctggtgaaacttgatatcaatggcctgccatatggtctgtgtgccggctgcgtgaatctcagtaagagcgccagcccaggcattaacgtccctcccggcacgaatagaccaggcttgggccagaatgagaatctgagtgccattgaggggaaaggcaaggtggggggactgaagacacgctgctctagctgcaacgttaagtttgagtctgaaagtgaactccagaaccacatccaaaccatccaccgagagctcgtgccagacagcaacagcacacagttgaaaacgccccaagtatcaccaatgcccagaatcagtccctcccagtcggatgagaagaagacctatcaatgcatcaagtgtcagatggttttctacaatgaatgggatattcaggttcatgttgcaaatcacatgattgatgaaggactgaaccatgaatgcaaactctgcagccagacctttgactctcctgccaaactccagtgccacctgatagagcacagcttcgaagggatgggaggcaccttcaagtgtccagtctgctttacagtatttgttcaagcaaacaagttgcagcagcatattttctctgcccatggacaagaagacaagatctatgactgtacacaatgtccacagaagtttttcttccaaacagagctgcagaatcatacaatgacccaacacagcagttagtaatgaactagtccgtaacttgaaagtatttcgatttcttggctttatatatcttgtggaaaggacgaaatacaacccgcgtaggcgttgag

SEQ ID NO: 2226 - DNA, 3986 bp, Homo sapiens
  source 1..3986: mol_type = genomic DNA
accgccaccatgccttatgaagtcaatgctgggtatgattttacaaatatggtccggaaaaagaacccccctctgagaaacgttgcaagtgaaggcgagggccagatcctggagcctataggtacagaaagcaaggtatctggaaagaacaaagaattttctgcagatcagatgtcagaaaatacggatcagagtgatgctgcagaactaaatcataaggaggaacatagcttgcatgttcaagatccatcttctagcagtaagaaggacttgaaaagcgcagttctgagtgagaaggctggcttcaattatgaaagccccagtaagggaggaaactttccctcctttccgcatgatgaggtgacagacagaaatatgttggctttctcatctccagctgctgggggagtctgtgagcccttgaagtctccgcaaagagcagaggcagatgaccctcaagatatggcctgcaccccctcaggggactcactggagacaaaggaagatcagaagatgtcaccaaaggctacagaggaaacagggcaagcacagagtggtcaagccaattgtcaaggtttgagcccagtttcagtggcctcaaaaaacccacaagtgccttcagatgggggtgtaagactgaataaatccaaaactgacttactggtgaatgacaacccagacccggcacctctgtctccagagcttcaggactttaaatgcaatatctgtggatatggttactacggcaacgaccccacagatctgattaagcacttccgaaagtatcacttaggactgcataaccgcaccaggcaagatgctgagctggacagcaaaatcttggcccttcataacatggtgcagttcagccattccaaagacttccagaaggtcaaccgttctgtgttttctggtgtgctgcaggacatcaattcttcaaggcctgttttactaaatgggacctatgatgtgcaggtgacttcaggtggaacattcattggcattggacggaaaacaccagattgccaagggaacaccaagtatttccgctgtaaattctgcaatttcacttatatgggcaactcatccaccgaattagaacaacattttcttcagactcacccaaacaaaataaaagcttctctcccctcctctgaggttgcaaaaccttcagagaaaaactctaacaagtccatccctgcacttcaatccagtgattctggagacttgggaaaatggcaggacaagataacagtcaaagcaggagatgacactcctgttgggtactcagtgcccataaagcccctcgattcctctagacaaaatggtacagaggccaccagttactactggtgtaaattttgtagtttcagctgtgagtcatctagctcacttaaactgctagaacattatggcaagcagcacggagcagtgcagtcaggcggccttaatccagagttaaatgataagctttccaggggctctgtcattaatcagaatgatctagccaaaagttcagaaggagagacaatgaccaagacagacaagagctcgagtggggctaaaaagaaggacttctccagcaagggagccgaggataatatggtaacgagctataattgtcagttctgtgacttccgatattccaaaagccatggccctgatgtaattgtagtggggccacttctccgtcattatcaacagctccataacattcacaagtgtaccattaaacactgtccattctgtcccagaggactttgcagcccagaaaagcaccttggagaaattacttatccgtttgcttgtagaaaaagtaattgttcccactgtgcactcttgcttctgcacttgtctcctggggcggctggaagctcgcgagtcaaacatcagtgccatcagtgttcattcaccacccctgacgtagatgtactcctctttcactatgaaagtgtgcatgagtcccaagcatcggatgtcaaacaagaagcaaatcacctgcaaggatcggatgggcagcagtctgtcaaggaaagcaaagaacactcatgtaccaaatgtgattttattacccaagtggaagaagagatttcccgacactacaggagagcacacagctgctacaaatgccgtcagtgcagttttacagctgccgatactcagtcactactggagcacttcaacactgttcactgccaggaacaggacatcactacagccaacggcgaagaggacggtcatgccatatccaccatcaaagaggagcccaaaattgacttcagggtctacaatctgctaactccagactctaaaatgggagagccagtttctgagagtgtggtgaagagagagaagctggaagagaaggacgggctcaaagagaaagtttggaccgagagttccagtgatgaccttcgcaatgtgacttggagaggggcagacatcctgcgggggagtccgtcatacacccaagcaagcctggggctgctgacgcctgtgtctggcacccaagagcagacaaagactctaagggatagtcccaatgtggaggccgcccatctggcgcgacctatttatggcttggctgtggaaaccaagggattcctgcagggggcgccagctggcggagagaagtctggggccctcccccagcagtatcctgcatcgggagaaaacaagtccaaggatgaatcccagtccctgttacggaggcgtagaggctccggtgttttttgtgccaattgcctgaccacaaagacctctctctggcgaaagaatgcaaatggcggatatgtatgcaacgcgtgtggcctctaccagaagcttcactcgactcccaggcctttaaacatcattaaacaaaacaacggtgagcagattattaggaggagaacaagaaagcgccttaacccagaggcacttcaggctgagcagctcaacaaacagcagaggggcagcaatgaggagcaagtcaatggaagcccgttagagaggaggtcagaagatcatctaactgaaagtcaccagagagaaattccactccccagcctaagtaaatacgaagcccagggttcattgactaaaagccattctgctcagcagccagtcctggtcagccaaactctggatattcacaaaaggatgcaacctttgcacattcagataaaaagtcctcaggaaagtactggagatccaggaaatagttcatccgtatctgaagggaaaggaagttctgagagaggcagtcctatagaaaagtacatgagacctgcgaaacacccaaattattcaccaccaggcagccctattgaaaagtaccagtacccactttttggacttccctttgtacataatgacttccagagtgaagctgattggctgcggttctggagtaaatataagctctccgttcctgggaatccgcactacttgagtcacgtgcctggcctaccaaatccttgccaaaactatgtgccttatcccaccttcaatctgcctcctcatttttcagctgttggatcagacaatgacattcctctagatttggcgatcaagcattccagacctgggccaactgcaaacggtgcctccaaggagaaaacgaaggcaccaccaaatgtaaaaaatgaaggtcccttgaatgtagtaaaaacagagaaagttgatagaagtactcaagatgaactttcaacaaaatgtgtgcactgtggcattgtctttctggatgaagtgatgtatgctttgcatatgagttgccatggtgacagtggacctttccagtgcagcatatgccagcatctttgcacggacaaatatgacttcacaacacatatccagaggggcctgcataggaacaatgcacaagtggaaaaaaatggaaaacctaaagagtagtaatgaactagtccgtaacttgaaagtatttcgatttcttggctttatatatcttgtggaaaggacgatagctaggatcaacgagttcgtgc

SEQ ID NO: 2227 - DNA, 3947 bp, Homo sapiens
  source 1..3947: mol_type = genomic DNA
accgccaccatggtccggaaaaagaacccccctctgagaaacgttgcaagtgaaggcgagggccagatcctggagcctataggtacagaaagcaaggtatctggaaagaacaaagaattttctgcagatcagatgtcagaaaatacggatcagagtgatgctgcagaactaaatcataaggaggaacatagcttgcatgttcaagatccatcttctagcagtaagaaggacttgaaaagcgcagttctgagtgagaaggctggcttcaattatgaaagccccagtaagggaggaaactttccctcctttccgcatgatgaggtgacagacagaaatatgttggctttctcatctccagctgctgggggagtctgtgagcccttgaagtctccgcaaagagcagaggcagatgaccctcaagatatggcctgcaccccctcaggggactcactggagacaaaggaagatcagaagatgtcaccaaaggctacagaggaaacagggcaagcacagagtggtcaagccaattgtcaaggtttgagcccagtttcagtggcctcaaaaaacccacaagtgccttcagatgggggtgtaagactgaataaatccaaaactgacttactggtgaatgacaacccagacccggcacctctgtctccagagcttcaggactttaaatgcaatatctgtggatatggttactacggcaacgaccccacagatctgattaagcacttccgaaagtatcacttaggactgcataaccgcaccaggcaagatgctgagctggacagcaaaatcttggcccttcataacatggtgcagttcagccattccaaagacttccagaaggtcaaccgttctgtgttttctggtgtgctgcaggacatcaattcttcaaggcctgttttactaaatgggacctatgatgtgcaggtgacttcaggtggaacattcattggcattggacggaaaacaccagattgccaagggaacaccaagtatttccgctgtaaattctgcaatttcacttatatgggcaactcatccaccgaattagaacaacattttcttcagactcacccaaacaaaataaaagcttctctcccctcctctgaggttgcaaaaccttcagagaaaaactctaacaagtccatccctgcacttcaatccagtgattctggagacttgggaaaatggcaggacaagataacagtcaaagcaggagatgacactcctgttgggtactcagtgcccataaagcccctcgattcctctagacaaaatggtacagaggccaccagttactactggtgtaaattttgtagtttcagctgtgagtcatctagctcacttaaactgctagaacattatggcaagcagcacggagcagtgcagtcaggcggccttaatccagagttaaatgataagctttccaggggctctgtcattaatcagaatgatctagccaaaagttcagaaggagagacaatgaccaagacagacaagagctcgagtggggctaaaaagaaggacttctccagcaagggagccgaggataatatggtaacgagctataattgtcagttctgtgacttccgatattccaaaagccatggccctgatgtaattgtagtggggccacttctccgtcattatcaacagctccataacattcacaagtgtaccattaaacactgtccattctgtcccagaggactttgcagcccagaaaagcaccttggagaaattacttatccgtttgcttgtagaaaaagtaattgttcccactgtgcactcttgcttctgcacttgtctcctggggcggctggaagctcgcgagtcaaacatcagtgccatcagtgttcattcaccacccctgacgtagatgtactcctctttcactatgaaagtgtgcatgagtcccaagcatcggatgtcaaacaagaagcaaatcacctgcaaggatcggatgggcagcagtctgtcaaggaaagcaaagaacactcatgtaccaaatgtgattttattacccaagtggaagaagagatttcccgacactacaggagagcacacagctgctacaaatgccgtcagtgcagttttacagctgccgatactcagtcactactggagcacttcaacactgttcactgccaggaacaggacatcactacagccaacggcgaagaggacggtcatgccatatccaccatcaaagaggagcccaaaattgacttcagggtctacaatctgctaactccagactctaaaatgggagagccagtttctgagagtgtggtgaagagagagaagctggaagagaaggacgggctcaaagagaaagtttggaccgagagttccagtgatgaccttcgcaatgtgacttggagaggggcagacatcctgcgggggagtccgtcatacacccaagcaagcctggggctgctgacgcctgtgtctggcacccaagagcagacaaagactctaagggatagtcccaatgtggaggccgcccatctggcgcgacctatttatggcttggctgtggaaaccaagggattcctgcagggggcgccagctggcggagagaagtctggggccctcccccagcagtatcctgcatcgggagaaaacaagtccaaggatgaatcccagtccctgttacggaggcgtagaggctccggtgttttttgtgccaattgcctgaccacaaagacctctctctggcgaaagaatgcaaatggcggatatgtatgcaacgcgtgtggcctctaccagaagcttcactcgactcccaggcctttaaacatcattaaacaaaacaacggtgagcagattattaggaggagaacaagaaagcgccttaacccagaggcacttcaggctgagcagctcaacaaacagcagaggggcagcaatgaggagcaagtcaatggaagcccgttagagaggaggtcagaagatcatctaactgaaagtcaccagagagaaattccactccccagcctaagtaaatacgaagcccagggttcattgactaaaagccattctgctcagcagccagtcctggtcagccaaactctggatattcacaaaaggatgcaacctttgcacattcagataaaaagtcctcaggaaagtactggagatccaggaaatagttcatccgtatctgaagggaaaggaagttctgagagaggcagtcctatagaaaagtacatgagacctgcgaaacacccaaattattcaccaccaggcagccctattgaaaagtaccagtacccactttttggacttccctttgtacataatgacttccagagtgaagctgattggctgcggttctggagtaaatataagctctccgttcctgggaatccgcactacttgagtcacgtgcctggcctaccaaatccttgccaaaactatgtgccttatcccaccttcaatctgcctcctcatttttcagctgttggatcagacaatgacattcctctagatttggcgatcaagcattccagacctgggccaactgcaaacggtgcctccaaggagaaaacgaaggcaccaccaaatgtaaaaaatgaaggtcccttgaatgtagtaaaaacagagaaagttgatagaagtactcaagatgaactttcaacaaaatgtgtgcactgtggcattgtctttctggatgaagtgatgtatgctttgcatatgagttgccatggtgacagtggacctttccagtgcagcatatgccagcatctttgcacggacaaatatgacttcacaacacatatccagaggggcctgcataggaacaatgcacaagtggaaaaaaatggaaaacctaaagagtagtaatgaactagtccgtaacttgaaagtatttcgatttcttggctttatatatcttgtggaaaggacgagggatctgtgttgctgtacagaga

SEQ ID NO: 2228 - DNA, 3959 bp, Homo sapiens
  source 1..3959: mol_type = genomic DNA
accgccaccatgcagagtaatatggtccggaaaaagaacccccctctgagaaacgttgcaagtgaaggcgagggccagatcctggagcctataggtacagaaagcaaggtatctggaaagaacaaagaattttctgcagatcagatgtcagaaaatacggatcagagtgatgctgcagaactaaatcataaggaggaacatagcttgcatgttcaagatccatcttctagcagtaagaaggacttgaaaagcgcagttctgagtgagaaggctggcttcaattatgaaagccccagtaagggaggaaactttccctcctttccgcatgatgaggtgacagacagaaatatgttggctttctcatctccagctgctgggggagtctgtgagcccttgaagtctccgcaaagagcagaggcagatgaccctcaagatatggcctgcaccccctcaggggactcactggagacaaaggaagatcagaagatgtcaccaaaggctacagaggaaacagggcaagcacagagtggtcaagccaattgtcaaggtttgagcccagtttcagtggcctcaaaaaacccacaagtgccttcagatgggggtgtaagactgaataaatccaaaactgacttactggtgaatgacaacccagacccggcacctctgtctccagagcttcaggactttaaatgcaatatctgtggatatggttactacggcaacgaccccacagatctgattaagcacttccgaaagtatcacttaggactgcataaccgcaccaggcaagatgctgagctggacagcaaaatcttggcccttcataacatggtgcagttcagccattccaaagacttccagaaggtcaaccgttctgtgttttctggtgtgctgcaggacatcaattcttcaaggcctgttttactaaatgggacctatgatgtgcaggtgacttcaggtggaacattcattggcattggacggaaaacaccagattgccaagggaacaccaagtatttccgctgtaaattctgcaatttcacttatatgggcaactcatccaccgaattagaacaacattttcttcagactcacccaaacaaaataaaagcttctctcccctcctctgaggttgcaaaaccttcagagaaaaactctaacaagtccatccctgcacttcaatccagtgattctggagacttgggaaaatggcaggacaagataacagtcaaagcaggagatgacactcctgttgggtactcagtgcccataaagcccctcgattcctctagacaaaatggtacagaggccaccagttactactggtgtaaattttgtagtttcagctgtgagtcatctagctcacttaaactgctagaacattatggcaagcagcacggagcagtgcagtcaggcggccttaatccagagttaaatgataagctttccaggggctctgtcattaatcagaatgatctagccaaaagttcagaaggagagacaatgaccaagacagacaagagctcgagtggggctaaaaagaaggacttctccagcaagggagccgaggataatatggtaacgagctataattgtcagttctgtgacttccgatattccaaaagccatggccctgatgtaattgtagtggggccacttctccgtcattatcaacagctccataacattcacaagtgtaccattaaacactgtccattctgtcccagaggactttgcagcccagaaaagcaccttggagaaattacttatccgtttgcttgtagaaaaagtaattgttcccactgtgcactcttgcttctgcacttgtctcctggggcggctggaagctcgcgagtcaaacatcagtgccatcagtgttcattcaccacccctgacgtagatgtactcctctttcactatgaaagtgtgcatgagtcccaagcatcggatgtcaaacaagaagcaaatcacctgcaaggatcggatgggcagcagtctgtcaaggaaagcaaagaacactcatgtaccaaatgtgattttattacccaagtggaagaagagatttcccgacactacaggagagcacacagctgctacaaatgccgtcagtgcagttttacagctgccgatactcagtcactactggagcacttcaacactgttcactgccaggaacaggacatcactacagccaacggcgaagaggacggtcatgccatatccaccatcaaagaggagcccaaaattgacttcagggtctacaatctgctaactccagactctaaaatgggagagccagtttctgagagtgtggtgaagagagagaagctggaagagaaggacgggctcaaagagaaagtttggaccgagagttccagtgatgaccttcgcaatgtgacttggagaggggcagacatcctgcgggggagtccgtcatacacccaagcaagcctggggctgctgacgcctgtgtctggcacccaagagcagacaaagactctaagggatagtcccaatgtggaggccgcccatctggcgcgacctatttatggcttggctgtggaaaccaagggattcctgcagggggcgccagctggcggagagaagtctggggccctcccccagcagtatcctgcatcgggagaaaacaagtccaaggatgaatcccagtccctgttacggaggcgtagaggctccggtgttttttgtgccaattgcctgaccacaaagacctctctctggcgaaagaatgcaaatggcggatatgtatgcaacgcgtgtggcctctaccagaagcttcactcgactcccaggcctttaaacatcattaaacaaaacaacggtgagcagattattaggaggagaacaagaaagcgccttaacccagaggcacttcaggctgagcagctcaacaaacagcagaggggcagcaatgaggagcaagtcaatggaagcccgttagagaggaggtcagaagatcatctaactgaaagtcaccagagagaaattccactccccagcctaagtaaatacgaagcccagggttcattgactaaaagccattctgctcagcagccagtcctggtcagccaaactctggatattcacaaaaggatgcaacctttgcacattcagataaaaagtcctcaggaaagtactggagatccaggaaatagttcatccgtatctgaagggaaaggaagttctgagagaggcagtcctatagaaaagtacatgagacctgcgaaacacccaaattattcaccaccaggcagccctattgaaaagtaccagtacccactttttggacttccctttgtacataatgacttccagagtgaagctgattggctgcggttctggagtaaatataagctctccgttcctgggaatccgcactacttgagtcacgtgcctggcctaccaaatccttgccaaaactatgtgccttatcccaccttcaatctgcctcctcatttttcagctgttggatcagacaatgacattcctctagatttggcgatcaagcattccagacctgggccaactgcaaacggtgcctccaaggagaaaacgaaggcaccaccaaatgtaaaaaatgaaggtcccttgaatgtagtaaaaacagagaaagttgatagaagtactcaagatgaactttcaacaaaatgtgtgcactgtggcattgtctttctggatgaagtgatgtatgctttgcatatgagttgccatggtgacagtggacctttccagtgcagcatatgccagcatctttgcacggacaaatatgacttcacaacacatatccagaggggcctgcataggaacaatgcacaagtggaaaaaaatggaaaacctaaagagtagtaatgaactagtccgtaacttgaaagtatttcgatttcttggctttatatatcttgtggaaaggacgacgggagtacggataggacgcaaag

SEQ ID NO: 2229 - DNA, 1931 bp, Homo sapiens
  source 1..1931: mol_type = genomic DNA
accgccaccatggctgtggggctttgtaaagccatgtcccaggggttggtgaccttcagagatgtggcgctagacttttcccaagaagagtgggaatggctgaagccatctcagaaggatttatacagagatgtcatgttggagaactacaggaacttggtatggcttggactctccatttctaagcccaacatgatctccttactggagcaagggaaggaaccgtggatggtggagagaaagatgtcacagggtcactgtgcagactgggagtcttggtgtgaaattgaggaattatctccaaaatggttcattgatgaagatgaaatatcccaggagatggtaatggaaaggctagcaagtcatggccttgaatgctccagtttcagagaagcctggaaatataagggtgaatttgagctacatcagggaaatgcggagaggcatttcatgcaagtgacagctgttaaggaaatctctactgggaaaagagacaatgaatttagtaattctgggagaagcatacccctgaaatcagtatttttaacacaacagaaagttcctaccatacagcaagtacataaatttgatatttatgataaactcttcccccaaaattcagtcataattgaatataaaagactccatgctgagaaggaatctttgataggtaatgaatgtgaagaattcaaccagagtacgtaccttagtaaagatataggaattcctcctggggagaaaccttatgaaagtcatgatttttcaaagctcttaagtttccactcattatttactcaacatcagaccactcattttggaaaattaccccatggatacgatgaatgtggtgatgcctttagctgttactcattctttactcaacctcagagaattcacagtggagaaaaaccatatgcatgcaatgactgtggaaaagcctttagccacgacttctttctcagtgaacatcaaagaactcatattggggagaaaccttatgaatgtaaggaatgtaacaaagctttcagacagagtgctcaccttgctcaacatcagaggatccacactggagagaaaccgtttgcgtgcaatgaatgtgggaaggcctttagccgttatgccttccttgttgaacatcagagaattcacacaggtgagaaaccatatgaatgtaaagaatgtaataaagccttcagacagagtgctcaccttaatcaacatcagaggattcacactggagagaaaccctatgaatgtaatcagtgtggaaaagccttcagcagacgcatagcccttactctacatcaaagaattcacacaggagagaaacccttcaaatgtagtgaatgtgggaagacctttggctatcgctcacacctgaatcaacatcagagaattcataccggagaaaagccctatgaatgcatcaaatgtgggaagttttttaggactgactcacaacttaatcgacatcatagaattcacactggagagagaccatttgaatgcagtaaatgtgggaaagccttcagtgatgctttagttctaattcaccataagagaagtcatgcaggagagaaaccctatgaatgtaacaaatgtggaaaggccttcagttgtggctcatatcttaatcaacatcaaagaattcatactggagagaaaccctatgaatgtagtgaatgtgggaaggcttttcatcagatcttgtccctaagactacaccagagaattcacgctggagaaaaaccttataaatgtaacgaatgtgggaataattttagctgtgtctcagcccttagacgacatcagagaattcataatagagaaacgctctagtaatgaactagtccgtaacttgaaagtatttcgatttcttggctttatatatcttgtggaaaggacgatgcgtgtgagtatagtacgcgtct

SEQ ID NO: 2230 - DNA, 1541 bp, Homo sapiens
  source 1..1541: mol_type = genomic DNA
accgccaccatggctcttcctcagggtctattgacattcagggatgtggccatagaattctctcaggaggagtggaaatgcctggaccctgctcagaggactctatacagggacgtgatgctggagaattataggaacctggtctccctgggtatctcttccaaatgcacaatgaaggagttctcatcaacagcacaaggcaatacagaagtgatccacacagggacattgcaaagacatgaacgtcatcacattggagatttttccttccaggaaattgagaaagatattcataactttgagtttcagtggcaagaagatgaaagaaatggccatgaagcacccatgacaaaaatcaaaaaattgatgggtagtacagagcaatatgatcacaggcatgctggaaacaagcctattaaatatcagcttggatcaagctttcattcacatctgtctgaactccacatatttcagcccaaagggaaaattaataatcaagtggagaagtctatcaacgatgcttcctcggtttcaacagcccaaagaatttcttgtaggcccaaaacccatatatctaataactatggggataattttctgaattattcattactcacacaaagacaggaagtacgcatgagagaaaaatctttccaatgtattgagagtggcaaagcctttaattatagctcactcttaaggaaacatcagattattcatctaggagagaaacaatataaatgtgatgtatgtgacaaggtctttattcggaagcgataccttgcacgccatcgtagatgtcacactggtgagaaaccttacaagtgtaatgagtgtggcaagtccttcagtcagatgtcatcccttacatatcatcatcgacttcatactggagagaaaccttacaaatgtgaagaatgtgacaaagctttcagacacaattcagcccttcaaagacataggagaattcatactggagagaaaccacataagtgtaatgagtgtggcaagacctttagtcagaagtcataccttgcatgccatcgtagcattcatactggaaagaaaccttacgaatgtgaagaatgtgacaaagctttcagtttcaaatcaaaccttgaaagtcataggataactcatactggagagaaaccatacaagtgtaatgattgtggcaagaccttcagtcatatgtcaacccttacatgccatcgtagacttcatactggagagaaaccttacaagtgtgaagaatgtgatgaagctttccgtttcaaatcaagtcttgaaagacataggagaattcataatggagagaaactgtacaaatgtaatgagtgtggcaagaccttcagtcaggagttatcccttacctgccattgtagacttcatagtggagagaaaccttgcaagtgtggagaatgtgacaaggcttacagtttcaaatagtaatgaactagtccgtaacttgaaagtatttcgatttcttggctttatatatcttgtggaaaggacgactcgtggataacttagtcctgacg

SEQ ID NO: 2231 - DNA, 461 bp, Homo sapiens
  source 1..461: mol_type = genomic DNA
accgccaccatggctcttcctcagggtctattgacattcagggatgtggccatagaattctctcaggaggagtggaaatgcctggaccctgctcagaggactctatacagggacgtgatgctggagaattataggaacctggtctccctgggttcttgctgtgcggttgaagttggtcttgatctcctgggctcaagacatcctcctcggcctcccaagaagctgggattacaggcgccaacccccgtacctaactattggcttttgtttttaaactttttgcatatgtgtgtccttagggctaatatgagtcttctgtggacaacaagtagttggttcctgttgattgagtcagtctttgccttctagtaatgaactagtccgtaacttgaaagtatttcgatttcttggctttatatatcttgtggaaaggacgagcgtcagtcactaattcaggacca

SEQ ID NO: 2232 - DNA, 260 bp, Homo sapiens
  source 1..260: mol_type = genomic DNA
accgccaccatggctcttcctcagggtctattgacattcagggatgtggccatagaattctctcaggaggagtggaaatgcctggaccctgctcagaggactctatacagggacgtgatgctggagaattataggaacctggtctccctggatggagttttcctctagtaatgaactagtccgtaacttgaaagtatttcgatttcttggctttatatatcttgtggaaaggacgataagacgacactggtttgaaacgg

SEQ ID NO: 2233 - DNA, 1433 bp, Homo sapiens
  source 1..1433: mol_type = genomic DNA
accgccaccatgctggagaattataggaacctggtctccctgggtatctcttccaaatgcacaatgaaggagttctcatcaacagcacaaggcaatacagaagtgatccacacagggacattgcaaagacatgaacgtcatcacattggagatttttccttccaggaaattgagaaagatattcataactttgagtttcagtggcaagaagatgaaagaaatggccatgaagcacccatgacaaaaatcaaaaaattgatgggtagtacagagcaatatgatcacaggcatgctggaaacaagcctattaaatatcagcttggatcaagctttcattcacatctgtctgaactccacatatttcagcccaaagggaaaattaataatcaagtggagaagtctatcaacgatgcttcctcggtttcaacagcccaaagaatttcttgtaggcccaaaacccatatatctaataactatggggataattttctgaattattcattactcacacaaagacaggaagtacgcatgagagaaaaatctttccaatgtattgagagtggcaaagcctttaattatagctcactcttaaggaaacatcagattattcatctaggagagaaacaatataaatgtgatgtatgtgacaaggtctttattcggaagcgataccttgcacgccatcgtagatgtcacactggtgagaaaccttacaagtgtaatgagtgtggcaagtccttcagtcagatgtcatcccttacatatcatcatcgacttcatactggagagaaaccttacaaatgtgaagaatgtgacaaagctttcagacacaattcagcccttcaaagacataggagaattcatactggagagaaaccacataagtgtaatgagtgtggcaagacctttagtcagaagtcataccttgcatgccatcgtagcattcatactggaaagaaaccttacgaatgtgaagaatgtgacaaagctttcagtttcaaatcaaaccttgaaagtcataggataactcatactggagagaaaccatacaagtgtaatgattgtggcaagaccttcagtcatatgtcaacccttacatgccatcgtagacttcatactggagagaaaccttacaagtgtgaagaatgtgatgaagctttccgtttcaaatcaagtcttgaaagacataggagaattcataatggagagaaactgtacaaatgtaatgagtgtggcaagaccttcagtcaggagttatcccttacctgccattgtagacttcatagtggagagaaaccttgcaagtgtggagaatgtgacaaggcttacagtttcaaatagtaatgaactagtccgtaacttgaaagtatttcgatttcttggctttatatatcttgtggaaaggacgacagcgtgtctcgtcctctgatgtc

SEQ ID NO: 2234 - DNA, 254 bp, Homo sapiens
  source 1..254: mol_type = genomic DNA
accgccaccatggctcttcctcagggtctattgacattcagggatgtggccatagaattctctcaggaggagtggaaatgcctggaccctgctcagaggactctatacagggacgtgatgctggagaattataggaacctggtctccctgggatttctatagtaatgaactagtccgtaacttgaaagtatttcgatttcttggctttatatatcttgtggaaaggacgaataatataagaggttacacgccgt

SEQ ID NO: 2235 - DNA, 1793 bp, Homo sapiens
  source 1..1793: mol_type = genomic DNA
accgccaccatggccaactcaagtttcattggggatcatgtccatggagctcctcatgctgtcatgccagaagtggaattccctgaccaattctttacagttctaaccatggaccatgaactggtgacactcagggatgtggtcatcaacttctctcaggaggaatgggaatatctggattctgctcagaggaacttgtactgggatgtgatgatggagaactacagcaacttactctcactggatttggagtccaggaatgagactaagcatttatctgtaggaaaagatattattcaaaacactggttctcagtgggaggtaatggaaagtagcaagttatgtggccttgaaggttccattttcagaaatgactggcaaagcaaaagcaagattgacttacaaggacctgaagtgggatatttcagtcaaatgaaaatcatctctgaaaatgtgcccagttacaaaactcatgaatctcttactttacctcggagaactcatgacagtgagaagccctatgaatacaaggaatatgagaaggtcttcagttgtgacttagagtttgatgaatatcagaaaatacatactggtggaaaaaactatgaatgtaatcaatgttggaaaacctttgggatagataactccagtatgttacaactgaatattcatactggtgtgaaaccttgtaaatatatggaatatgggaatacatgtagtttttataaagactttaatgtataccagaaaattcataatgagaagttctataaatgtaaggaatacagaaggacctttgaaagagttggaaaagttactccacttcaaagagttcatgatggtgagaaacactttgaatgctcattctgtgggaaatcctttagagtgcatgcacaacttactcgacatcagaaaatccatactgatgagaaaacttacaaatgtatggaatgtggcaaggacttcagatttcattcacagcttaccgaacatcagagaattcatactggtgagaaaccctacaaatgtatgcactgtgagaaggtttttagaattagttcacagctcattgaacatcagagaattcacactggtgagaaaccttatgcatgtaaggaatgtgggaaggcttttggagtatgtagagaacttgctcgtcatcagagaattcatactggtaagaaaccctatgaatgcaaagcatgtggaaaggtctttagaaatagttcatccctgactagacatcagaggattcatactggtgaaaaaccctataaatgtaaagaatgtgagaaagcatttggagtaggtagtgaacttactcgacatgaaagaattcacagtggtcaaaaaccttatgaatgtaaggagtgtggaaagttctttagacttacgtcagcccttattcaacatcaaagaattcatagtggtgagaaaccttatgaatgtaaggtatgtgggaaggcctttagacatagttcagcccttacagaacatcagagaattcatactggagaaaaaccctatgaatgcaaggcatgtgggaaggcctttagacatagttcatcctttaccaaacatcagcgcattcatactgatgataaaccctatgaatgtaaggagtgtgggaattcctttagtgttgttgggcatcttacttgccaaccgaaaatttacactggtgagaaatcatttgactagtaatgaactagtccgtaacttgaaagtatttcgatttcttggctttatatatcttgtggaaaggacgaacattacgtgatcggtagatagcg

SEQ ID NO: 2236 - DNA, 1478 bp, Homo sapiens
  source 1..1478: mol_type = genomic DNA
accgccaccatggaaagtagcaagttatgtggccttgaaggttccattttcagaaatgactggcaaagcaaaagcaagattgacttacaaggacctgaagtgggatatttcagtcaaatgaaaatcatctctgaaaatgtgcccagttacaaaactcatgaatctcttactttacctcggagaactcatgacagtgagaagccctatgaatacaaggaatatgagaaggtcttcagttgtgacttagagtttgatgaatatcagaaaatacatactggtggaaaaaactatgaatgtaatcaatgttggaaaacctttgggatagataactccagtatgttacaactgaatattcatactggtgtgaaaccttgtaaatatatggaatatgggaatacatgtagtttttataaagactttaatgtataccagaaaattcataatgagaagttctataaatgtaaggaatacagaaggacctttgaaagagttggaaaagttactccacttcaaagagttcatgatggtgagaaacactttgaatgctcattctgtgggaaatcctttagagtgcatgcacaacttactcgacatcagaaaatccatactgatgagaaaacttacaaatgtatggaatgtggcaaggacttcagatttcattcacagcttaccgaacatcagagaattcatactggtgagaaaccctacaaatgtatgcactgtgagaaggtttttagaattagttcacagctcattgaacatcagagaattcacactggtgagaaaccttatgcatgtaaggaatgtgggaaggcttttggagtatgtagagaacttgctcgtcatcagagaattcatactggtaagaaaccctatgaatgcaaagcatgtggaaaggtctttagaaatagttcatccctgactagacatcagaggattcatactggtgaaaaaccctataaatgtaaagaatgtgagaaagcatttggagtaggtagtgaacttactcgacatgaaagaattcacagtggtcaaaaaccttatgaatgtaaggagtgtggaaagttctttagacttacgtcagcccttattcaacatcaaagaattcatagtggtgagaaaccttatgaatgtaaggtatgtgggaaggcctttagacatagttcagcccttacagaacatcagagaattcatactggagaaaaaccctatgaatgcaaggcatgtgggaaggcctttagacatagttcatcctttaccaaacatcagcgcattcatactgatgataaaccctatgaatgtaaggagtgtgggaattcctttagtgttgttgggcatcttacttgccaaccgaaaatttacactggtgagaaatcatttgactagtaatgaactagtccgtaacttgaaagtatttcgatttcttggctttatatatcttgtggaaaggacgacagcctttcctccaactatgactg

SEQ ID NO: 2237 - DNA, 1988 bp, Homo sapiens
  source 1..1988: mol_type = genomic DNA
accgccaccatggcccttactcagggacccttgaaattcatggatgtggccatagagttctctcaggaagagtggaaatgcctggaccctgcgcagaggactttatacagggacgtgatgttggagaattataggaacctggtctccctgggaatctgtcttcctgacctgagtgttacctccatgttagagcaaaagagagatccctggactctgcagagtgaagagaaaatagcaaacgatccagacggcagggagtgcatcaaaggtgtgaacacagagaggagctctaaattgggaagtaatgcaggaaacaagccttgtaaaaatcaacttggattcacttttcagttacatctgagtgatctacagctatttcaagctgaaaggaaaatttctgggtgtaagcattttgaaaaacccgtcagtgacaattcctcagtttcaccgcttgaaaaaatttcttccagtgtcaaatcccaccttttaaataaatatagaaataattttgatcatgctccattacttccacaagaacagaaagcacacattagggaaaaagcttataaatgtaatgagcacggccaagtctttagagcatctgcaagccttactaaccaagtaatccataacgcagataatccttacaaatgcagtgaatgtggcaaggtctttagttgcagttcaaagcttgtgatacatcgaagaatgcatactggagagaagccttacaaatgtcatgaatgtggcaagctcttcagtagcaattcaaacctttcacaacatcaaagaattcatactggagagaagccttacaaatgtcatgaatgtgacaaggtctttcgaagcagttcaaagcttgcacaacatcaaagaattcatactggagagaagccttacaaatgtcatgaatgtgacaaggtcttcaatcaaattgcacaccttgtacgacatcaaaaaattcatactggagagaaaccttacagttgtaataaatgtggcaaggtctttagtcgccattcatatctagcagaacatcaaacggttcatactggtgagaaaccttacaaatgtgaagaatgtggcaaagcattttcagtgcgttccagcctcataacccatcagttaattcacactggaaggaaaccttacaaatgtaaagaatgtgacaaggtctttgggcgcaagtgtttcctgacctctcatcagagaattcatactagagagagaccttatggatgcagtcagtgtggcaagatctttagtcagaaatcagaccttatacgacatcgaaaaactcatactgatgagaagccttacaaatgtaataaatgtggcacagcgtttagagagttttcagaccttactgcccattttctaatccatagtggagagaaaccttatgaatgtaaagaatgtggcaaagtcttcaggtacaagtcttctctaaccagtcatcatagaattcatactggagagaagccttacaaatgtaacagatgtggcaaggtcttcagtcgcagttcaaacctggtatgccatcagaaaattcatacaggagaaaagccttacaaatgtaatcaatgtggcaaggtctttaatcaagcatcataccttacaagacatcaaataattcatactggagagaggccttacagatgtagtaaatgtggcaaagcatttcgagggtgttcaggccttactgcccatcttgcaatccatactgaaaagaaatctcatgagtgtaaagaatgtggcaagatcttcactcagaagtcttccctcaccaatcaccatagaattcacattggagagaaaccttacaaatgcaccctgtgcagtaaggtcttcagtcacaattctgaccttgcacagcatcagagagttcattcatagtaatgaactagtccgtaacttgaaagtatttcgatttcttggctttatatatcttgtggaaaggacgagcgggctttcactactttactaag

SEQ ID NO: 2238 - DNA, 2117 bp, Homo sapiens
  source 1..2117: mol_type = genomic DNA
accgccaccatggcagccacattccagcttccagggcaccaggagatgccgctgaccttccaggatgtggccgtgtacttctctcaggcggaggggcggcagctgggcccccagcagcgggcgctctaccgggatgtgatgctggagaactatgggaacgtggcctctctgggattccctgtccctaagccggagttgatctcccagctggagcaggggaaggaactttgggtcctgaatcttctgggagctgaggaaccagatatcttgaaaagctgccagaaagattctgaggttgggaccaagaaggaactatctattttaaaccaaaaattttccgaagaagtaaaaaccccagaatttgtatcaagaagactcttaagggataatgcacaggccgctgagtttcgggaagcatggggccgtgagggcaaactcaaagagcgcgtgggaaattctgccgggcagagtttgaacaaacccaatattcacaagagagttttaacagaagctaccgtgggcagggaaagatctttgggagaaagaacccaagagtgtagtgcatttgatagaaacttgaatctggaccaaaatgttgttagacttcaaagaaataaaacaggagagagggtctttaaatgtgatatatgcagcaaaaccttcaaatataattcagacctaagtagacaccagagaagtcacactggggagaagccgtacgaatgtggccggtgtgggcgagcctttactcacagctcaaatcttgttctgcaccatcacattcacactggaaataaaccatttaaatgtgatgaatgtgggaaaacttttggactcaattctcacctccgtcttcatcggagaattcacactggagaaaaaccctttggctgtggtgagtgtgggaaggctttcagtcgaagctcaactcttattcaacatcggatcattcacacaggagagaaaccctacaagtgtaatgaatgtggaagaggctttagccagagcccccagttaactcagcatcagagaattcacactggagagaagccgcatgaatgcagtcactgtgggaaggccttcagtcgaagctccagccttattcagcatgagagaattcacactggagagaagccccataaatgcaatcagtgtgggaaggccttcagtcagagctcaagccttttcctccatcatcgggttcatactggagagaaaccctatgtatgtaatgaatgcggcagagcctttggttttaactctcatcttactgaacacgtaaggattcacacaggagaaaaaccctatgtttgtaatgagtgcggcaaagcctttcgtcggagttccactcttgttcagcatcgaagagttcacactggggagaagccctaccagtgcgttgaatgtgggaaagctttcagccagagctcccagctcaccctacatcagcgagttcacactggagagaagccctatgactgtggtgactgtgggaaggccttcagccggaggtcaaccctcattcagcatcagaaagttcacagcggagagactcgtaagtgcagaaaacatggtccagcctttgttcatggctccagcctcacagcagatggacagattcccactggagagaagcacggcagagcctttaaccatggtgcaaatctcattctgcgctggacagttcacactggtgagaaatcctttggatgtaatgaatatggaaaagctttcagtcccacctcacgacccactgaagatcagataatgcatgctggggaaaagccctataaatgtcaagaatgtggaaacgccttcagtggaaagtcaacccttattcaacatcaggtaactcacactggtcagaaaccatgtcattgcagtgtgtatgggaaagccttcagccagagttcacagctcacaccacctcagcagactcgtgttggagagaaacctgctttaaatgatggctctaaaagatactttattcatatcaagaagattttccaagaaagacatttttagtaatgaactagtccgtaacttgaaagtatttcgatttcttggctttatatatcttgtggaaaggacgaccgcagttgatggaggagtgcgga

SEQ ID NO: 2239 - DNA, 1769 bp, Homo sapiens
  source 1..1769: mol_type = genomic DNA
accgccaccatggcagcagccagactcctgccagtgccggcaggaccccaggccaagctgaccttcgaggatgtggctgtgctcctctcccaggatgaatgggaccgcctgtgccctgctcagaggggtctctacagaaatgtgatgatggaaacctatgggaatgtagtctcattgggacttccaggatccaagcctgacataatctcccagctggagcgaggggaagatccctgggtcctggacaggaagggggctaagaagagccagggcctgtggagtgactactcagacaacctcaaatatgaccacactacagcctgtacacaacaagacagtttatcttgtccatgggaatgtgaaaccaagggagagagtcaaaatacagacttgagtccgaagccattaatttcagagcaaacagtgattctggggaaaacacccttggggaggattgatcaagaaaataatgaaacaaagcaaagcttctgtctgagtccaaactctgttgaccaccgtgaagttcaggtcttaagccaaagcatgccactcactccgcaccaggcagtgcctagtggagagaggccctacatgtgtgttgagtgtgggaagtgctttggccggagttcccacctccttcagcatcagcgtatccacactggagagaagccctatgtgtgcagtgtatgtgggaaggccttcagccagagctcagtccttagtaaacacaggagaattcacacaggtgagaagccctatgagtgtaatgagtgtggaaaagcctttagagtgagctcagatcttgctcagcatcacaagatacatacaggagagaagcctcacgaatgtcttgagtgtcggaaagccttcactcaactctcacatctcattcagcaccagcggatccacacgggagaaaggccatatgtgtgtccgttgtgtgggaaagccttcaaccatagcactgttctgcggagccaccagagggtacacactggggagaagcctcacaggtgcaatgagtgtgggaaaaccttcagtgtgaagaggacactgctgcagcaccagaggatccacaccggggagaagccctacacgtgcagcgagtgtgggaaggccttcagcgaccgctcagtcctcattcagcaccacaacgtgcacaccggggagaagccctatgagtgcagtgagtgtgggaagaccttcagccaccgctccacactgatgaatcacgagcggatccacaccgaggaaaagccctatgcatgctacgaatgtgggaaggccttcgttcagcactcacacctgatccagcaccagagagtccacactggggagaagccctatgtgtgtggtgaatgtgggcacgccttcagtgcacgccggtctctgatccagcatgagagaatccacacaggtgaaaagcccttccagtgcacagaatgtggcaaagccttcagcctgaaagcaactctgattgtgcacctgaggacccacacgggcgagaagccatatgagtgcaatagctgcgggaaggccttcagccagtactcagtgctcatccagcaccagcggatccacacaggcgagaagccctatgagtgcggggagtgtgggcgtgccttcaaccagcatggccacctaatccagcaccagaaagtgcacagaaagttgtagtaatgaactagtccgtaacttgaaagtatttcgatttcttggctttatatatcttgtggaaaggacgagaaatagtgattgatccctaggcg

SEQ ID NO: 2240 - DNA, 1784 bp, Homo sapiens
  source 1..1784: mol_type = genomic DNA
accgccaccatggcagcagccagactcctgccagtgccggcaggaccccagcccctgtcgttccaggccaagctgaccttcgaggatgtggctgtgctcctctcccaggatgaatgggaccgcctgtgccctgctcagaggggtctctacagaaatgtgatgatggaaacctatgggaatgtagtctcattgggacttccaggatccaagcctgacataatctcccagctggagcgaggggaagatccctgggtcctggacaggaagggggctaagaagagccagggcctgtggagtgactactcagacaacctcaaatatgaccacactacagcctgtacacaacaagacagtttatcttgtccatgggaatgtgaaaccaagggagagagtcaaaatacagacttgagtccgaagccattaatttcagagcaaacagtgattctggggaaaacacccttggggaggattgatcaagaaaataatgaaacaaagcaaagcttctgtctgagtccaaactctgttgaccaccgtgaagttcaggtcttaagccaaagcatgccactcactccgcaccaggcagtgcctagtggagagaggccctacatgtgtgttgagtgtgggaagtgctttggccggagttcccacctccttcagcatcagcgtatccacactggagagaagccctatgtgtgcagtgtatgtgggaaggccttcagccagagctcagtccttagtaaacacaggagaattcacacaggtgagaagccctatgagtgtaatgagtgtggaaaagcctttagagtgagctcagatcttgctcagcatcacaagatacatacaggagagaagcctcacgaatgtcttgagtgtcggaaagccttcactcaactctcacatctcattcagcaccagcggatccacacgggagaaaggccatatgtgtgtccgttgtgtgggaaagccttcaaccatagcactgttctgcggagccaccagagggtacacactggggagaagcctcacaggtgcaatgagtgtgggaaaaccttcagtgtgaagaggacactgctgcagcaccagaggatccacaccggggagaagccctacacgtgcagcgagtgtgggaaggccttcagcgaccgctcagtcctcattcagcaccacaacgtgcacaccggggagaagccctatgagtgcagtgagtgtgggaagaccttcagccaccgctccacactgatgaatcacgagcggatccacaccgaggaaaagccctatgcatgctacgaatgtgggaaggccttcgttcagcactcacacctgatccagcaccagagagtccacactggggagaagccctatgtgtgtggtgaatgtgggcacgccttcagtgcacgccggtctctgatccagcatgagagaatccacacaggtgaaaagcccttccagtgcacagaatgtggcaaagccttcagcctgaaagcaactctgattgtgcacctgaggacccacacgggcgagaagccatatgagtgcaatagctgcgggaaggccttcagccagtactcagtgctcatccagcaccagcggatccacacaggcgagaagccctatgagtgcggggagtgtgggcgtgccttcaaccagcatggccacctaatccagcaccagaaagtgcacagaaagttgtagtaatgaactagtccgtaacttgaaagtatttcgatttcttggctttatatatcttgtggaaaggacgatcttccacgggccgctaatagcct

SEQ ID NO: 2241 - DNA, 1571 bp, Homo sapiens
  source 1..1571: mol_type = genomic DNA
accgccaccatgctggacatgggagataggaaagaggtgaaaatgatccccaagtcctcgttcagcatcaacagcctggtgcccgaggcggtccagaacgacaaccaccacgcgagccacggccaccacaacagccaccacccccagcaccaccaccaccaccaccaccatcaccaccacccgccgccgcccgccccgcaaccgccgccgccgccgcagcagcagcagccgccgccgccgccgcccccggcaccgcagcccccccagacgcggggcgccccggccgccgacgacgacaagggcccccagcagctgctgctcccgccgccgccaccgccaccaccggccgccgccctggacggggctaaagcggacgggctgggcggcaagggcgagccgggcggcgggccgggggagctggcgcccgtcgggccggacgagaaggagaagggcgccggcgccgggggggaggagaagaagggggcgggcgagggcggcaaggacggggaggggggcaaggagggcgagaagaagaacggcaagtacgagaagccgccgttcagctacaacgcgctcatcatgatggccatccggcagagccccgagaagcggctcacgctcaacggcatctacgagttcatcatgaagaacttcccttactaccgcgagaacaagcagggctggcagaactccatccgccacaatctgtccctcaacaagtgcttcgtgaaggtgccgcgccactacgacgacccgggcaagggcaactactggatgctggacccgtcgagcgacgacgtgttcatcggcggcaccacgggcaagctgcggcgccgctccaccacctcgcgggccaagctggccttcaagcgcggtgcgcgcctcacctccaccggcctcaccttcatggaccgcgccggctccctctactggcccatgtcgcccttcctgtccctgcaccacccccgcgccagcagcactttgagttacaacggcaccacgtcggcctaccccagccaccccatgccctacagctccgtgttgactcagaactcgctgggcaacaaccactccttctccaccgccaacggcctgagcgtggaccggctggtcaacggggagatcccgtacgccacgcaccacctcacggccgccgcgctagccgcctcggtgccctgcggcctgtcggtgccctgctctgggacctactccctcaacccctgctccgtcaacctgctcgcgggccagaccagttactttttcccccacgtcccgcacccgtcaatgacttcgcagagcagcacgtccatgagcgccagggccgcgtcctcctccacgtcgccgcaggccccctcgaccctgccctgtgagtctttaagaccctctttgccaagttttacgacgggactgtctgggggactgtctgattatttcacacatcaaaatcaggggtcttcttccaaccctttaatacattagtaatgaactagtccgtaacttgaaagtatttcgatttcttggctttatatatcttgtggaaaggacgaggtaaatacggatctagctgagcg
